United States Patent Application Publication US 2014/0325702 A1 - sequence listing, part 28

SEQ ID NO: 43465 - DNA, 1310 bp, Heterodera glycines
tgccattcgtgctttgtaatcgtcccacaattttttcaaatcttccggcggtgttgcgtctgccgtttcgaatgctcgacaaacttcgccagcaattttctcctgcccaacgggcaaaataaaggtgtaggcccatcctttattgcccgctcttccagttcgaccaacgcggtgcacatagtcttcgtaatggttgggcgcatcataattaaccactagaatcagtttcttgacatccaacccacgcgcagccacagaagtggccaccttaattttgaaaaatggtgaaacttattttgacgaagcaataataccattagcttcaaacgtcccgttttgaagtccaaaatggtaaagtcgcggtcgtcctggtcaatgccgccgtgcaatggggcgcagttgtacccggcgcccatcagttgggacaccaaatcatcggctttttcttgcttttccacgaaaaccaacacattcccatgctcccaatattggccaagcaattccaacagtttaagaaacttttggtgctcttcaagcacaaaagcgtgttgttcaacttccttgcaaacgacacttcgtccgccaaccttaaaatgtcatgttaaaagactaaacaataagattctttaaatattttgaagtattgaatggttatttccaaaattcactgaaaatatcataaattactaactaattagtcacttatttatgccgttaatgctaatggagattgtaaaaatatatccacctgaatttccaccggcctctccaacacttttcgcgccaatgcttccatttgtttgggaaatgtggcagaaaaaagcacagtttgtcgatccggacgaatgttattgacaattttcatcacttgtggctcaaaacccatgtcgaacattcggtcggcctcgtccatgaccaaataagtgactcgccgaagatttgttacttttcctgaacaataataaaataaggaatggtcatttgcgtttagaaaccattgtttgcggctaacatgtcaatcattctaccgggtgtacacacaattacttcggctcccttcttcagctctgcaatttgctcggaaataccgactccaccgtatacacaaaccacgtgaaggccgaggttacgagcaaatttattagcctctttccatgtttgaagagcgagttcgcgagttggtgacatgatcagggcttaacagtgccattaatgcaaattaggaacgaaaaaaaaaacgaagaaaaaagaccggcccttaccaattggcccatccatttcttcgagatgcggctgatccatcacatggc

SEQ ID NO: 43466 - DNA, 1250 bp, Heterodera glycines
agaataattggtaaatttttttttacctcccaagatatttatttattaaattaaggcaaaaatttgcccctccattccgtctgcttcttcatttgctgtccacggcgttcaaaacacgccactcggttcatctccatcggtcattccaaactcattgcaatcggataattcaccacatcctgtgcccgacgaaagtaaaatttattttttatttttttttggaattatttatttatttattttattgcgcaaaattaataaaattttatttctcgactttagatgtgtgtaggttgttatcttgcgatttcaacaatggagaaagtatgtgtttgtatagcaggtacttttttaaattaaatatttatttattttaattatttttttttttttgctaaatgtttcttttttttaatttgcccttttgagtgaataaaaaacccttttttgtccatattttcgaagttgacttaaaaatgctttcaattttaaattcacagttattaaaaactttgtataaacagcaaaatttttatctttttcttactaaaatcttctcatactttctaaattttttgaaaatttggctaataaattaaaaggattaaattgaaaaaagaggtcgccaaagaaattaatattaatttttttaatataaattatttgagttaataaagccttttgtttgctcattcttaaaaatcttgcgaattattctattttgttttacttcttttttagtacgcgtatttcttcttcgctgtccctttttcgttcttttaatcggagtgctttttcaatgctttttggaaggaatcgcgttacaatgattgaggcaaacgaccaaaaataaaaataaataaaataattaattaattaattcaaattcaaatttcagtcatctcagttccatttgaacgcgcctgctcgactacattttgacttctcaattacggtgcatatttgctcgaaaatattaaatttcatagtttataatcctgctgatcctgtctgagctcgaataaatcctcaccgggataaaatttgatgattttttagtgaaaatctgttaacaaattatattcaaattttcaaaaattttcccgccagccccctcttctctaaattttttttggaaaaagcgcgcttcgcaatttcgcgttttttggaatttcgcatttatttttatttcgcattttttactttcgcaaatttcgcgtttcgcattttattttccgattggccaatcc

SEQ ID NO: 43467 - DNA, 990 bp, Heterodera glycines
  unsure (1)..(990): unsure at all n locations
aaattttgaaatcatgtttcccactcctttctcgcaggggtattatttgtaaaagtcttttgttccacaataaacttgtcaaaccgcattnttcgcaccgtgaatgttatttttattgacttctgaaccgttttgagtagattagactagaaaacattgaaaattttgaaatcatgtttcgcactcccttctcccaggggtattattttgtaaagtctttttttccccaataaacttgtcaaaccccatttttcgcaccgtgaatgttatttttattgaattctgaaccgttttgagtagattagactagaaaacattgaaaattttgaaatcatgtttcccactcccttctcccaggggtattattttgtaaagtctttttttccccaataaacttgtcaaaccccatttttcgcaccgtgaatgttatttttattgaattctgaaccgttttgagtagattagactagaaaaaattgaaaattttgaaatcatgtttcccactcccttctcccaggggtattattttgtaaagtctttttttccccaataaacttgtcaaaccccatttttcgcaccgtgaatgttatttttattgaattctgaaccgttttgagtagattagactagaaaaaattgaaaattttgaaatcatgtttcccactcccttctcccaggggtattattttgtaaagtctttttttcacaataaacttgtcaaaccccatttttcgcaccgtgaatgttatttttattgaattctgaaccggtttgagtagattagactagaaaaaattgaaaattttgaaatcatgtttcccactcccttctcccaggggtattattttgtaaagtctttttttccccaataaacttgtcaaaccccatttttcgcaccgtgaatgttatttttattgaattctgaaccgttttgagtagattagactaaaaaaaattgaaaattttgaaatcatgtttcccactcccttc

SEQ ID NO: 43468 - DNA, 850 bp, Heterodera glycines
acacttgaaaaaatcgatttatttttgttttcggggctcttcaaccgaaccgatgcgcccagatttatggggagaccgaatccttccggaatagcttccctatagcctgtactttaattctgcgttggatttttgctccccataaatgtttgagtaccccaaacggacacttgaaaaaatcgatttttttgttttcggggcagtccccccgaaccgatgcgcccagatttatggggagaccgaatccttcgggaatagcttccctatagcctgtactttaatttctgcgttggatttttgctccccataaatgtttgagtaccccaaacggacacttgaaaaaatcgatttatttttgttttcggggcagtccccccgaaccgatgcgcccagatttatggggagaccgaatccttccggaatagcttccctatagcctgtactttaattctgcgttggatttttgctccccataattgtttgagtaccccaaacggacacttgaaaaaatcgatttttttgtttcataaatatttttttcagaaagtgctctaaagcgcaccaaattttatttacaacttaattttagcactctgatgctttttctatcaaaaagggagatgaataaatttaaaaaaatttttaattcctttttaaacaggccaaaaagtttaggcttaacttttttttcagaaactgatcagaagcgccccaaactttgcagggatactgaaaggaaaagaattaacctgttttatcacattagcttgtcatcagtttttataaaaaattttcaaaattctgagtctcctattattttatttttttttcaaaattttgaagggcgggg

SEQ ID NO: 43469 - DNA, 280 bp, Heterodera glycines
tataataacgctgcggacatctacatttttgaattgaacttactgaggtaattactctttctttttctccatattgaccaccttactcatactccccccaccctttctcctccttcatttttttttttcctttccttctccaaccctctcctccctctcttgatagtttaaactgaaggcgggaaacgacaatctgatccccatcaagctagcttctgcaggtcctgctcgagcggccgcccggggatcgatccccgatctagtaacatagatgacaccg

SEQ ID NO: 43470 - DNA, 944 bp, Heterodera glycines
atgaaatttgattaaattttccaaccaatatgccattcccattgtttcgccaaaatagctggcaatggaagaaattgcaaccttatgaccatggcccgcagcttccatggcaggcaaaaaggagcgaattgtctgaaaaattttaaattaattattcctaattaaaatttctaaatttaaaatcagaatttttacattaattgtgccaagaacattcacatccaacgcctttctgatctgatcgtctttcaaattttgggtcagctcaaaaaacaaaatggcagcattcgcaataacaatgtcaacattgccttaaaacgataaaaaaaataatttatttttttttaatttaaaaatgaaattttaaaatttttcattataccaaaatgttgtcgaattttattggcacactgtcgtaattcctcggcattcacaatgtcacagcaccaactgttttttaaaatttaattcattatttcatgtataaattaaataaaaaatttatcattatttttttaattctaaattttatagtaaacccctgatttttttagaattaaattatatatatttaaataaatttttatatacgcttttgcaattccgccctttccacaaattgtttctgctaccttctcagcttcgtccttaaatgataaatggataaaaaagtacatttaaaaaatgccgttaatcaccaaatttcgatcaattatggcaactcttgcccccaaaccggacggatcggcaaaaatttcgctcatccgaagccccttaaacgtgcaaatttttgaaaattcaaaattttaatagcagtcaatttgaattttgctttttcttacaagcccagatgctcctccggtgatcacaacacattttcccttcacacttttttggcgaaggcacaaccaacgaaagaaatccttaatttatttaattttcat

SEQ ID NO: 43471 - DNA, 975 bp, Heterodera glycines
atcagctgtttttccatctctatattaattttgaatgactttatgattggacaacttttaatttgattgacattttaataaataagggaaaacaattttattcaaataccgtatcaaatggcatttaaattatatatcattttgttgttttaagtttcataaagtccttatttttttattttttgaaaattcatttataatttccccaatttgcttaaatcaattcgttttacaactttgtaaaatcctccgtatctttacttttgctttatattgccgaaacactatttttctttctttgcttttaatctttttacttttgtttatttgtctattttaaattaagttatgaaaagtaatttcatttaggtgggaggttaaaccaatcattgaaatagaagagttcaagttgaattgccaaatgtaccgtaaataaatttttaccgtgtttccttatattagaattttatttattttttagactttccttcccaaagggcatattttgttcctttaattcattttttctttcgagtttttttcattttgctttctttttaatgtgtcccattataagcgatccgattgatctttatttttatataaaaatggagaatatttacatttgaaaagtcaaatataataagcagaaaatatactttacataaatctaattacatttaaaaaatttatgttgaaacatttgtgggcttcgcgaaaaaagacaatttaaattagaatttaattaaaacattgcttataatcaggatgagaataactgaaaaatatataaaataatgacaaaaaattaaaatataaaaaaaaacaataatctgaacaatatagtgtaaaaatacattttgtaatcaaatttactgtttgactgcaagattactgtaatcaaaaatatgaattcttaattatttgaataaatcatttcaaaaaattataagtaaattattaatattaagagtt

SEQ ID NO: 43472 - DNA, 1594 bp, Heterodera glycines
ctcaacgcgaggaggtagtgacgagaaataacgagacccatttcttatgaggccggtcatcggaatgggtacaatttaaaccctttaacgagtatctatgagagggcaagtctggtgccagcagccgcggtaattccagctctcaaaatgcatagaattattgctgcggttaaaaagctcgtagttggatctgtgctagccgtccggtgcacactttgtgtgttactggttcggttggcttttctgccggtctctccccggcgttggcctttaccggtcggcgtcggtgggctggcgagtttactttgaacaaatcagagtgcttcaaacaggcgtttcgcttgaatgttcgtgcatggaataatagaagaggatttcggtccgattttattggttttgctgaccgagataatggttaacagagacaaacggggccattcgtattgctacgtgagaggtgaaattcttggaccgtagcaagacggactacagcgaaagcatttggcaagaatgtcttcattaatcaagaacgaaagtcagaggttcgaaggcgatcagataccgccctagttctgaccgtaaacgatgccaactagcgatccgccggcggatttattcgccctggtggggagcttcccggaaacgaaagtcttccggttccgggggaagtatggtgcaaagctgaaacttaaggaattgacggaagggcaccaccaggagtggagcctgcggcttaatttgactcaacacggggaaactcacccggcccggacaccgtaaggattgacagattgatagctttttcatgattcggtggatggtggtgcatggccgttcttagttcgtggagcgatttgtctggtttattccgataacgagcgagactctagcctactaaatagttggctcattgcttctgtgggcacaacttcttagagggattttcggtgttcagccgcacgaaattgagcaataacaggtctgtgatgcccttagatgtccggggctgcacgcgcgctacactggcaaaatcagcgtgcttgtccttccccgaaaggggttggtaaaccggtgaaaatttgccgtgattgggatcggacattgcaattattgtccgtgaacgaggaattccttgtaggggcgagtcatcaactcgctctgaatacgtccctgccctttgtacacaccgcccgtcgctgcccgggactgagccatttcgagaaattcggggacggttagtgttccggcttcggtcggtatgcagactggaaccgatttaatcgcagtggcttgaaccgggcaaaagtcgtaacaaggtagctgtaggtgaacctgctgctggatcattacccaagtgattcctattcaccacctacctgctgtcctgttgggctagcgttggcaccaccaaatgcccccgtccgctgatgggcacaggtcgttcgagatgacttgtggacgctgcccaacattacggggcagctgcctcacgagccatgcttttggggtgcttccatacgttggagctgtggtataccgctcagtgctgcacatgtgaaagcctgtgtatggctgctgcgtggcaatgtgtcgg

SEQ ID NO: 43473 - DNA, 807 bp, Heterodera glycines
cttttgggaaatgggcgaggggagagggtccggcggtggcgataggcgccgccgaaaaatttttttttgtaatttcgttctgatttgataacagcttttcaccaaaaaaggcattttttgcaattaaaagccaagcgacgatttttttttcgcttttaaaaacacttttttgcggggccattcttccaaaaattttggaggacaggggacccggcggcgccgataggtgccgccgggaaaaatgtgtgattttagtacgatttgttaacagatttttgtccaaaaaatgaccaaattttgccataaattttatatttttttgtaaaatagtgacattaggccataaaattttaaaattatgagtttgtttaagaaatcagaacaaattttggtcgctaccccaaaatcagaacatttctgacaaatcagaacatttttattttatcagatttggaccctccaatgataaatcagaacagatccgaaccctgttatagccacagtttatcctatttttataaaaacacaactaatgtgacgttttattttttactgcttaaaactagggctgatatttataggtgctaaaaatggaaaataggtgccaaaaagttccgaatttaggggtgtaaaaagacaaaatttattcaaaaaagtaaaaaaattagcccaaatcagtattgagctaaaaaattttaaaatcacaaattcttgtcaagaaataaataaataaattttggagataaatttttgagaaatttttcatttcttaggggtgtatttttgaaaattttcgggtcgattctt

SEQ ID NO: 43474 - DNA, 547 bp, Heterodera glycines
  unsure (1)..(547): unsure at all n locations
atttatgtcaatatacataantttctgttccaaaaatccccggttctcccaatcttcagtcagtcaatttttacctttttacctctcaaaattagttcatccgcgtacagaccaaactgggtcttttcattgtacccaatgtacagccgttttggatcaatcggcaccggacacgagccacattcgcccaggcattcacatcgcacatcgcacggcacaattagggaattccatggcacaatttttttcacattatattcaactaattttccatcctggcaatttaatgaaaaaaccaaaattatgaatattattttgcaaaatcaaatttttcacaaatttttcatctattttctcatcaaacagaaaattttttacaaaaaaaaatattcataaccttgcccaagattaatcaaattttcaaaaatttagagctattgaataagaatttaaaaaatggttgctttctagcaaatttgtaagcaaataaattttttaataacgctcattttgatggtttttgagtaacgtcataacaccccccccc

SEQ ID NO: 43475 - DNA, 1042 bp, Heterodera glycines
  unsure (1)..(1042): unsure at all n locations
ccattatgagcgctaaaattatcagagtgccgaaaatcgcatgtgatctaagcctagcaaaaatggtgtaagtaaaaatcgtgaattacgctcaaaaagtttctcaaacaattttaacgcttccaattccttctacaatcgcctttatacatcccattatgaacgctaaaattatcagagtgccgaaaatcgcatgtgatctaagcctagaaaaaaatggtctaagtaaaaatcgtaattacgctcaaaaagcttctcaaacaattttaacgcttccaattcttccttctacaatcgcctttatacatcccattatgagcgctaaaattatcagagtgccgaaaatcgcatgtgatctaagcctagcaaaaaatggtttaagtaaaaatcgtaattacgctcaaaaagcttctcaaacaattttaacgcatccaattccttctacaatcgcctttatacatcccattatgagcgctaaaattatcagagtgccgaaaatcgcatgtgatctaagcctagcaaaaaatggtctaagtaaaaatcgtaattacgctcaaaaagcttctcaaacaattttagcgcatccaattccttctacaatcgcctttatacatcccattatgaacgctaaaattatcagagtgccgaaaatcgcatgtgatctaagcctagcaaaaaatggtgtaagtaaaaatcgtaattacgctcaaaaagcttctcaaacaattttaacgcttccaattccttctacaatcgcctttatacatcccattatgaacgctaaaattatcagagtgccgaaaatcgcatgtgatctaagcctagcaaaaaatggtgtaagtaaaaatcgtaattacgctcaaaaagcttctcaaacaattttaacgcttccaattccttctacaatcgcctttatacatcccattatgagcgctaaaattatcagagtgccgaanatcgcatgtgatctaagcctagaaaaaaatggtctaagtaaaaatcgtaattacgctcaaaaagctttctcaacaattttagcgct

SEQ ID NO: 43476 - DNA, 1020 bp, Heterodera glycines
taaacactttcttcaacccgagcatgccttacctacagcagtcggcgaatcattagctgctcattttctaatatttttagaaatctcctcttcattttagaaaaagcactattttcgtgtctttttcagactgaattcatgacaaaatccgattaaaattctctcaattacatccaaaaccaattgcatctatattaactgctgcaaagaccaacctgcgtatgaattctgataaaattatgacgatcaaataaacagcaatttaaacccgagcatattcacttattgcatccaccggtgtataatagctgctcattttctaatatttttagaaacctcttcttgcatttgtgaaaatgctatatactcgtgcattttgaaaactgaatcccagtcaaatcccaacgaaatttcactcaaatacacacaaaacgaatttattattaatcgagattatgcactgcaacggtggttattttctgtcatataaaatcacaaaagttttaaagttttctcgacgacgctgcttaagggaaaaatataataaactcaccagagctgatatcgaaaataatcaaatcaaatcgtttctccgttttgagaaagcatgttgtttggctgatgtgtttttggtaaaattatgatgacccactaaacactttcttcaaacccgagcatgccttacctacagtagtcggcgaatcattagctgctcattttctaatatttttagaaatctcctcttcattttagaaaaagcactattttcgtgcctttttcacactgaattcatgacaaaatccgattaaaattctcacaattacatccaaaaccaattgcatctatattaactgctgcaaagaccaacctgcgtatgaattctgataaaattatgacgatcaactaaacagcaatttaaacccgagcatattcacttattgcatccaccggtgtataatagctgctcattttctaatatatttagaaacctcttcttgcatttgtgaaaatgctatatac

SEQ ID NO: 43477 - DNA, 1644 bp, Heterodera glycines
  unsure (1)..(1644): unsure at all n locations
aatatttaaataaaattttttattttttggttaagttggccatcaattagtctttgattactttttgagaagccgttttaatgatggtgaaggtgccggtggaggaatgagcttttcatttgcatatttatcaccgaatgttattgaaggcggcggcaaaccaacatttgaaggacgacgagaaggcgacctaattgctttgataattaattttgaataaaaaataataaaattttctttagtgatttaattttcaaaattggttttttactttttattgatagagagacttttgaggcataatatgccttttttctgcgcaatagtttcgatatataagcataaaaaaacgcattttacacttcatttgaagctcctacgttgacttttatgtccttttttttttgcctttttcggggtttttgtgccgtaaatgccggctacctgacgtttcgtcactgaaataaatttttttaaaaatgccaaatttccagagctttccagggtcgctgattacgaatccggcatccatttcgacctatatcgaacccggactcaaaatcgaacaaaaagtcgaaaaatttcagaattcacttttatgttctaaaatagattaaaacagcaaaattaaatagaaaccattgcaacattagaaaataatcattctgcacagattcgaacataaaagtgaattctgaaattttttgaattttcgactttttgttcgatttcgagtccgggttcgatataggtcgaaatggatgccggattcgtaatcagcgaccctggaaagccctggaaatttggcattttaaaaaaaaatttatttcagtgacgaaacgtcttgccaccttaaatgccttttttggcattttggtgccttttttggcgttttttccagaaaattctattaaagatgcacctaagaatgaaaaattttctcaaaaaaggatcgtcaaaatttaattttttttttcttggtaaaaattttaggtttaaaaattttccttattcgaaaataaaatttaaaaatatttaatctttttttgcaatattttggtgcctattatagtgcctttttcacgatttttggttcctttttagtcggtctctatttattactttaaatgactgtgccttcgccgttttcgcaaattattcaaagcattttctaaatggtgatcatctgaaaaaagtattcaaaatcatattaaaaatgttttttatttaattacttgttggaaattcgccctccgggtatgaattgctccttctcaactcaatgcattcgccgccaacaaaagaaacccacagggactggaccaattcagtaccaaaaattactgaaaaaagattttggcaaataaaacaaaactacaagggcagtgaaggatttttaggtaaatagttattttatgcgnaatganaataagcaagaaaatacacattttccacatgatttgaggcttctagactaactttataatccaatttcttattaanttgtcttctacatattatttaaaagtacatatttttcaggattttcnaaaaattgcttaacaaaaattcaaaaagaaaaaagcactcctaaacttnatctccgaacaaaattttggctatttaaaaatttttgctcctttc

SEQ ID NO: 43478 - DNA, 1093 bp, Heterodera glycines
  unsure (1)..(1093): unsure at all n locations
aaaaatcgattttttcaagtgtccgtttggggtactcaaacatttatggggagcaaaaatccaacgcagaattaaagtacaggctatagggaagctattcccgaaggattcggtctccccataaatctgggcgcatcggttcggggggactgccccgaaaacaaaaaaatcgattttttcaagtgtccgtttggggtactcaaacaattatggggagcaaaaatccaacgcagaattaaagtacaggctatagggaagctattccggaaggattcggtctccccataaatctgggcgcatcggttcggggggactgccccgaaaacaaaaaaatcgattttttcaagtgtccgtttggggtactcaaacaattatggggagcaaaaatccaacgcagaattaaagtacaggctatagggaagctattccggaaggattcggtctccccataaatctgggcgcatcggctcggggggactgccccgaaaacaaaaaaatcgattttttcaagtgtccgtttggggtactcaaacaattatggggagcaaaaatccaacgcagaattaaagtacaggctatagggaagctattcccgaaggattcggtctccccataaatctgggcgcatcggttcggggggactgccccgaaaacaaaaataaatcgattttttcaagtgtccgtttggggtactcaaacaattatggggagcaaaaatccaacgcagaattaaagtacaggctatagtgaagctattccggaaggattcggtctccccataaatctgggcgcatcggttcagggggactgccccgaaaacccaaaaaaaaattttttggataaaaattatttaaatgaactgactagataatatttaaaataggttatttctcttcctttcagtatccctgcaaagtttggtgcgcttctgatcagtttctgaaaaaaaagttaagcctaaactttttggcctgtttaaaaaggaattaaaaatttttaaaaattttattcatctccctttttgatagaaaaagcatcagagtgcctaaacaaagatgtaaataaaatttggtgcgtttcaganaccctttct

SEQ ID NO: 43479 - DNA, 908 bp, Heterodera glycines
cgctccacttcgcccatcaccgtctcctggcgtttaatgctctggtcgattttctctttcaatggtccgaataattctttgattttctctgagctcattttctcttcattgattacgccattttcactcaatgcttttgcaaaatcggagctcatatcgcagcgaatctgaatggatataattttatttatttttaatataatttcggaaccttcttcaattccttttcaatgttttctcgctccattttgatttcttgcacttggtccagcaaatttcgtaaggtgtttactgtctgtgaatttgaattccctttatttgttccaatgcctggaattgtgttcttcagttcactctaaaataaaactaaaattctggaaaagtcaattagacagaaatgcctcagtcatgctcaacagttcaatgccacggcgattggcctcgaatttgctgcgcactaaggcatccgaatttgacgcggtgtgcataatcccgcggtacttccccaattcctgcatgagcggcgccgtgagattctccgaagggactcgcgtccatttcgaatggaattgagcacggagactgtcgtcattttccttttcctctttgataagtcgtgaagtctgacaatgaatggggagatggcatttgttttagcacggcttctacctcattcaaaatctcatcgtttctcttataaagcgatggaagttcgtttatcttcgctgacattgcagagattccgccgttgtttttcaccttggccgacttttcgcgaatagactcgggacactgctcctgttttgtcacgtcatccaaagcagcgggcaaattcaaagatgacaaacatctaaatatattcgtatttttactgtctatgaaaaatgcgctgacgcatcatcagctga

SEQ ID NO: 43480 - DNA, 906 bp, Heterodera glycines
aaagctcttcaatactccgaaatctcgaatcgccatccgtctcacttttacttatttacgcacgtttttattttattttcggcataataaatcgtaaatttccacgagaattaaattttaatttaattttaaaaaattaaaatcgtgaattccgttcataatctgcgtatcatattttcctcctaccgcacaccaagattttttgaatgataccaagatttagttggcaaaaagcttaaaaatatttttaaatatctcatttttcggtaggcgccacttgtttggtggctccggaaagagcattatttcttttgggggcttttttatggtaaaataatatttcgtgacaaaatttcctattttccttggttgatgaccccttccaaaacctcgcgcatccaaatttctcaaaaaaatttcgcaattttttccaaaaatccacaaaaattagctaaaataaaatttttttgtaatttttaggtgaaaatctgttaacaaatcacatcaaaattttaaaaaattttgccggcggcgcctatcggcatcgctggcccccttgttcccgaaattttatcggactctgcgacccccctaaatccatctggtgtcgcatctattcgacttttgatcagagaactggtcctgacatgatcaaatggatttcctagatccccaacatgggaaatttgggaaatgcgtaagtatttttctgggtacaagtcgaaatgacgttttgccttgctgcaatttcatgcaaaaagggaaaagcttaaacgagaaaagttacggtacatttaaaatattggatgtttactgcaaaagtgtatacatattgtttcgacacgaatggttttcattgagaagtactggagtgtactttctgtggtacgactgctgatagactgc

SEQ ID NO: 43481 - DNA, 1168 bp, Heterodera glycines
  unsure (1)..(1168): unsure at all n locations
gtggatcaacactttatntgaaacccgaattttcnatatatggatattgactcacttttgttgcaactttttaggggataaatttttctacatcttctgcgggataggtatggaccgggatccccgctcccgaggatgagaaaacgacggacatcggtaaaatccgcgaatcccctactctgtttgacctgctgaagatatttcgtccaaatcatccgtatccaattcatcggtatcataattctgatcatcgctttccactcaagaagctctcacaaatgccacccaaccagtgcaacaaatagaattattttccacatagctaaaaattgaccatgatttttttgccattaaatttgatttttgatataattttttaaaactgttcatgccattttatttaatatcgaacaaattaatataagtgaatttatttatttaaatgctatttttctaggttttctttttttctttttctctgctgaggttccacctctcatgatatcatttacaaaaaaaaatttttttgatgcaatacttttgacctgagtgtattttttcaattatcgaggcggaaaagtccaatttaattgacaaatttcaaaaatttttaccgacgcatattgaaaaaagcttctcaaggatatttggaagacgaattttatttaaatcgaatttaccgctttcaaaatttcaaattcatcactgaacaacaaacgatcattatcgagaagattgcacaacattttctgatcagtttgcaaaaataaatgccatcaccgagtaaatgaatctcaactttgaacgctgctggttcaacgtcggggacctccaccataaggcaattagcagaggctaattgaaaattaactaaagtaattaggatagactaattggagaatgaaagatgattaaatttttcttttaaaacaaattttttaccgttttcgatttgttttttcttggcgtcaaacaggaacattgcctcaaaaacatagaaagcattcttcaaaatgagttgatgtgaaggctaattaattcaaattgaaaaataaaaattttaaattagactcgccttttttgcgtctccgttcaccaccaaaaagtgcaaatccgaatgtttacccgagcgcaacaaatgattcatccgtcccattaataaggaaaa

SEQ ID NO: 43482 - DNA, 903 bp, Heterodera glycines
tggtgtagtaaaatttaattctcgctgatcgatcttcttcgcgagtttggcccctcaacgaattttttgttgctcccgatggatgggttggtccgtccgattttcccccgagattgggtggggttgggcttcttttgtaagttggattatgcgcacccaaagttcgtccatataaattgtttaatttggttttccctccattttcccatgttttcctccggcggtgtttccgttgcccttttttggcttttgtctttctctttttcggcggatgggctcagttttctcttttttctcatcggcaccaatcagttcgaacgtcacacttttgagtttatggcacaggaatttgcgcgaagggctcacaaagtgatgacggtgaagcccattttggtgccggaggaaccgcgattggtacaaaaaagcagaggaaagggaagaaatgaaacaccggacaaatgcccggggggatttaaagatgcaatggttaaatctccgaccaatttgataaatggggaaaaacagcgaacatttgccatttggttccctccctttccctgaaaattattaaattttcggttttttttgttaggtaaagcccattctgcacatggtcaatgagaaagtactcaaagatgtgttgccgaggtgaataaattggaaaatcgaattgaaaaacggacaaagggaaaaaagaattgcaaaatgtccaatgactaatgatacagtaaccaccaaaaaaaaaacagtaaccaccaaaggagccgctgaagcaacaccatacactcagcagagagcataaaaacacgtgctaattaatcactgttcccttatcaaaaggcgtctctccgaacccctggcgcatgtcggacaaaatgtgccctgggcgaagaaacggacgcg

SEQ ID NO: 43483 - DNA, 1411 bp, Heterodera glycines
tttattaaattataaaataaccgatttgaagaaattttaaaaacgtcgattttgaacaaaaaatcacatctttcgatctttaagtttttttattttttaatcgggactaaccgcaaattcggggattccccagcagttagttgcccggtttcatcgttacgtcgtcgaatttgtgctggaaatcgcgcacatcgctcttttgtgagacaaagcgaagagttgccgaacaaatgcagcccaaattggagtcttcaaaccaattaatcagttaattagcacttttaattgcccaattaattttcatttaccatcttttggagcgtcgtacaataggaaaaagcccagctatttctcacagccagcgatttccctccactttttgagttcttcccatttttttttgcgttcattattgttttcatcgttttccttcaattttttaccgttttcttccaatttttcatcaatttccaacaatttcttactgttttctatcaatctttcaccgttttcctctattttgttggcattttccattaatctttcaccgtcttcctccaatttttggcattttccaccaatctttcacccttttcatccaatctttcacccttttcatccaatctttcaccattttcatccaatctttcaccgttcctccaattttttggttcctctaatctttcaccattttccttcagtttttcacaggtttccttcaatgtttcactgttttccatcatttcccgggcattttccttcattttctcaatgtcttccaataatcttttagtgataaatttttcaatgttctcctccattttctttgtcttctccttcagttttcaatgatcccttccatttttcattgttcctccaattttcccatgttttctttccattttttattattttccatcaatgtttcactgttttccttcattttctcattgttttccaccaatttggcattgctttctctccatctttcactactttctgtccatttctctctgctttccatcactttttcggcatactctttcttcatttggatttgtgctattattttccatggaaatattttgatcttcataacttcactatgtcgcttatttccaataatttgtcgcataaattgcgacactttttcaatgcccatcacaattgtgccaaatgtcaacattcgccaatgacttggaaattgcagtgggtacaataagccaccggatgtgccactaatgttcgggaggcaaaggaactgataaacgccgaccacttcttccattgttaacacaccggaagaaactggaaaaacaattttaattcattaaaaatagtaaaaaaaaaaattgtaattttcgcccgggaaaagaaacacgattttgagttcttagtttttaaaatagca

SEQ ID NO: 43484 - DNA, 1019 bp, Heterodera glycines
agtctattggaaatagtcacaaacaaactttttttcactcccaatatctaccagttatcatacaaaaaggcaatagttaagcaccgagatataaaaaaatcgtctagaataattatctaaacaatttgtcgggaaagctcgtataaattctagggaaaaaacttttcaagaaaagctgaaaaattttcaatcgcatcagaagcagcctcaaattcttcaacaacataatgtaaaaaatattacgcaagaaattatttttagatcctttttagaaatgctgcataaatttttattgtaaatagtcacaaaaaaacttttttttactcccaatatctaccagttatcatacaaaaaggcaatagttaagctttgagatataaaaaaatcgtctagaataattatctcaacaatttgtcgggaaagttgaataaatttcagttgcaataggcatattggcacaatacataaatgtagagcaggctcaaaatagaggaaataccaaagattaaaaaattcgtgtttatggcccactctgctttggctggacataactcgccagagagtggagatagaccctttgttgatacatttgaaaatgtagagctcggctagcgcattcgaataacacaaaatttgttttcatttgcccccaaacaatccgcttatgacgggccgaaagaaaattcacaaaaatttggcaccggaaaaactccatttttttatgggccagcataataaagtaaacccaaaatgtaagtgaatttaaattggtcatgtgagatgtttagttttttatttgacccatccgttttctgggaaaaaacttttcgagaaaagctgaaaaattttccaattgcatcagaagcagactcaaattcttcaacaacataatgtaaaaaatattacgcaagaaattatttttacatcctttttagaaatgctgcataaatttttattgtaaatagtcacaaacaaacttttttttcactccccatatctacccagtatcatacaaaaag

SEQ ID NO: 43485 - DNA, 1076 bp, Heterodera glycines
ccttcagaaaaaatttgaggatggtggcgatggtggtggcggagatttttcgaggaggaattggtatagctccttccgaccaaagaagactggttatcaaacatccaagggggagtggctcgattcccccgtccccggctggcctttgtagcactatcaatacaatggggaataattccagccaaaagcctttcggggtaaaaaggaacatccgaaatactgaagcgagatttcattttggtgtagtggaattgggcgacatgttcaacagagctacccaatttctgcacataatcctttggagcttcttttgaaggtgatgtatctcctcctccttgttggacaacacccaaaatttgattgatgactaagtcttggcggggttttttgggaagaatatcaacgaatggagaattcgaaggacgtttttgttggtaatgttccattacgaataattgatttttttttttttttgtaaaatttatcaaatgaatggctaattttactaggtgaagaaatgacggctatttatattaattgtgacaaactttcgtttcaatacatacttttggcgctaaaaattaaattcaaattaagaccatagccgaacaataatttgtttaacacgcaacgccagcttattttggtgccaaaattaaattcaaattactataaattgtcttacaatacgctatacacaacgccaatttcgtttcaataacatagtttttggtactaaaattcaatcaaattactcaaattgtctaacaatacgccatacacaacgccaaattcgtttcaataacagggtttttggcgctaaaattcaattcgaattttgcgctaaattttaaagtcaaaaactcatataaaattagtttcgcaatgatattccatgagtggcgattaaattctaactggtacaaaaagttaaacaaataaatttacagaacgccatttttatggaaagccaaaaatggcggaatcttaaatttaaaccgagtcaacatgcttgcgccaaaagtaaatttacataacgtcaatttcgcatgatactctatgagtggcgattaaat

SEQ ID NO: 43486 - DNA, 1045 bp, Heterodera glycines
  unsure (1)..(1045): unsure at all n locations
gagtgtgtgtgaatttgcaaaatggtgggttactttggttatccatctctccccttctccccccccccccccttcttttgtgtacctttcgttcgttcgcttaatcaatttttatcttctgtgaagggatgactcactctcatcgttcgcatttgtcacattttatttttccgagtttactctttaaaaaatgtgcagcttatttttcattgtcagaatagcaatttaggtaaaccatcaaagtaagtgatgaatgactgtacagagaattcggaaacggcactccaacaacaattattattatcagaaaatattcaacagaaagagaaaaaccaattccaaagccgaggaaatcactgccaaacaattttcacaataaatcaacttttatcacgactaaatacgatttggataagagcaatttggtcccaattcacaatcagccaattcaaatagccaataccaacagaaacaccacttaataactcccacccggccactttcgccacctccgttaccgccgcggccttcgctttccggcatggaacggccgctaccactgcctcagttgattgaccacggcggtgccctttttcacacttcggccattgataaaagcattatcggagaaaagaaaacgcagcggatttacccgattttagacgaccttttttacacaaacacaaatgagatggacaacgagaagtcgaattcggcactcgcacagacaatgagttgctcttcgaccactgccagtgactcccattcttcagaaaacagcacttcttttatcgcttcttcaattggccttgagattgcgccttctccttccaatcccttctcgtcgtattgcgagcctttcgatggctatttaaaatttgatggtgaatcgatttgcttctcgggttgggtccaactgccccaaggaatgttcaaacatcgcaaaaggggttgggctgttgtgcggaacaacacattctcaatcagccaagacagacgaagttttcccggaaaagcttctcaaantgttcccatttgacctgca

SEQ ID NO: 43487 - DNA, 995 bp, Heterodera glycines
  unsure (1)..(995): unsure at all n locations
gaaaaagaagaagaaaaaaggggaaataattggaaaatattataaaatcaaagaaaaaatcaagcaaaaagggagaaaatattcaggaaaagaatcgaataaaattgaaagaaaaattgcgaaaaaattggggacaaatcgaacgaaaatttatgaatggattaaagaatttggtcttcaaaaacaaatacagaaaagctataaatcaaaaactgatgaagaaaaaaaatttatgaattaattttgcaaaaaataaataaaaacgaaagactcagattttcgaaaatttttttagagccagctaactcggcgctcatttcagtgtaagttagtcctttaccggggagtatccctgcaaagtttggtacgcttctgctcaattagcaaaaaatatgagtgatcgaattttcactaaaaaagttaagcctaaattttttggcatatttaaaaagcaattaaaaatttttaaaattttattcacctcccttattgatagaaaaagcatcagagagccttatttaacttgtaaataaaatttggtgcgtttcagagccctttctgaaaaaatatttatgaattaattttgcaaaaaataaataaaaacgaaagactcagattttcgaaaatttttttagagccagctaactcggcgctcctttcagtgtaagttagtcctttaccggggagtatccctgcaaagtttggtacgcttctgctcaattagcaaaaaatatgagtgatcgaattttcactaaaaaagttaagcctaaattttttggcatatttaaaaagcaattaaaaaatttttaaaattttattcacctcccttattgatagaaaaagcatcagagagccttatttaacttgtaaataaaatttggtgcgtttcagagccctttctgaaaaaatatttatgaattaattttgcnaanataaataaaaacgaaagactcagattttcgaaaatttttttagagccagctaactcggcgctc

SEQ ID NO: 43488 - DNA, 660 bp, Heterodera glycines
atcagtagggttgtaaattatatgcttttgcatattttttctgcgcatatgctatgaagaaagggggctcaaaaatagcatttctgcattaaaattttttgatttggtgcaggtttttagtgcatataaaagcatattttgggggtttttgagaataagtgcatatttgaccatttttgcatttttagagcatattttggtcattttttggaaattttcataagaaaaatgcgataaaagcgaaaaatacacccctaaggatcgactttttggaattttttaaaaaatacacccttaaaaatcgaaaaaattttaaatttttgtaagaatttttggaaaaaaaatttatgtatatgtaaaatgtaatgttgttttagcatataataaaatttataaatttggaaatttcaatatttttgcaattgtctaaaaacgctccttagccattgttttggtgttttaaaagtcaattcttaatttatacacaatttttggcattttttgagggctaaaagccatttttggcagttttttaaggcatattttagtgcatatttgggcatttttcgggtttttagggcatatttgggggatttttagtgcatattttatgcgcatatttgccattttttagtgcatataacttataaccctaattat

SEQ ID NO: 43489 - DNA, 1686 bp, Heterodera glycines
  unsure (1)..(1686): unsure at all n locations
aaattcccgtctttttctttctaatctctcttcactctttaattttactgcatcaatttcgcggtttttgtttaaaatgctttcaanacgcaacggaagctctgttcaatgcggaccgtcgaccaaaaaatgggatttccgttcaatcgggtaagcgttaataaaatatttaaagaaaatattaagagacaacgtaatcgttttctaccaattaaaaaataaataaattttaggaacaattttactgaagaaatggaaaattataaattgctggattatcaaacgactacttgccaaaaatttggatttacgaagaacattacggaatttcgtgtcaacccggacgggggacgccctgatgaagcaatgagggaagcgatcgacgacatgataaaggtggcttttaagactacggaagaaaaaatgaagcgaaaagtgcggatgtttggagtggcaattacgggtgccgggcttgctttcccggtatgggtaccgtacagggcgtacccgcagaacaatgcggatgttatcatgcaggagattaataagctggggcagagcggggacggggatgaaaataagaaaatgcttttattatcggaaccagttactatgaaaattacttgcgtgaccatgcccagtggagaggggccgaggaatgtccacaaatttgactttggattgaaggaacaccagcggatagggtaagtgtttttaataaaataaaattaaaatagaaaaaaactaaaataaaaaaaaatcaataaataaatttaaaataattatttctaaaaaatttaatgaagcaaaaaaaaatttttttttaaagaaaaaaatgaaaaaataataatttaatgaaacaaaaaaaaacacagaataaaattaaaaataaagaaagtaaaaaataaatttaaaataattattttaaaaaattttaatgaaacaaaaaaaaaaaaaacttaaaatatttatttttaaataatttaattaggcaaaaaaaaaaaaaaaaaaaaaaagtaaattttaggattgtgaatactgataaattttgccttttttacgcactggcgtcgtcgatgaattatttaattatggataaatattcgtttattcgttttatgaagaacttagcaagacaaaaggaagcggctgttgaacttttacggaattgtggaattgatattaacgaatatagctatggtgtggagcaattgccgaatgttcagaaatattgggtgggttaaatgaaaaaatgcaaaattaataaatttttcaggatgagatttaccccggaaagtaccgggttgttgcgtttgagaagtctgcagatccgcggaaatcgatccgtgttttgtggaagggccctatgggacgtgaaaatgtagtgccgatatttttggagaacggacattgggatggtctgaagaattatgtctgctttttcaaccgggggaggaagttctgcgttgaatgtgaatgcttttacgatcaggatgtttatcatacgatggattgccgggcgagatgttattactgcaatagagttggaggaatgccgtgtcaaaaggagagtggagtgaagattgaatgcccgaagtgccaccgttacttttataattgggagtgttacaactatcatcagggacatcagacttgcaaattatggaggcgttgcgtgatctgtga

SEQ ID NO: 43490 - DNA, 1432 bp, Heterodera glycines
  unsure (1)..(1432): unsure at all n locations
gaaggaatggatttaattaaattctctccttcggggattttttcccattaggtcgtccgttagcgttcgattgctctagtcaatttttcaaaatttttgttgaaatatttgtcgtgctctgaagggcgtgggagggggggggggcgaagggcccaccacganggccgcgaagaggccgagtgagtaccttcggtgcaggaaaattattaaattttaaaattttttaattgctttttaaatatgccaaaaaatgtaggcttaacttttttagtgaaaattcgatcactcatattttttgctaattgagcagaagcgtaccaaactttgcagggatactccccggtaaaggactaacttacactgaaatgagcgccgagctagctggctcaaaaaaatttttcgaaaatctgagtctttcgtttttatttatttgcaaaattaattcataaatattttttcagaaagggttctgaaacgcaccaaattttatttacatgttagtttaggcactctgatgctttttctatcaataatggaggtgaataaaattttaattgctttttaactttgggaaaaagtttaggcttaactttttagtgaaagtttgatcactcatatttttttagtctaatctactcaaaacggttcagaattcaataaaaataacattcacggtgcgaaaaatggggtttgacaagtttattggggaaaaaaagactttacaaaataatacccctgggagaagggagtgggaaacatgatttcaaaattttcaattttttctagtctaatctactcaaaccggttcagaattcaataaaaaaaacattcacggtgcgaaaaatggggtttgaaaagtttattttgaaaaaaagactttacaaaataatacccctgggagaagggagtgggaaacatgatttcaaaattttcaattttttctagtctaatctactcaaaacgggtcagaaatcaataaaaaaaaccctcccggggcgaaaaaagggggttgacaaattttttggggaaaaaaagactttacaaaatttttcccctggggggggggggtggggggcctggtttcccngttttcccttttttcttgttttttcttctcccnccggttccgggttccctttggttttccttcccggtgcgggnnttggggtttggccngttttttgggggnnnnnngncttttccnnnttnttcccctggggggngggggtggggnccctggtttccnngttttccnttttttcttgtcttgtcttctccnnncggttccgnnttcgnttnnnnttcccttcccggtgcgnnncntggggtttgncccgtttcttgaggaaaaaacactttacaaaataatacccctgggacacgggtgagaggaaacaatgatttcaaanattttcaaattttttctnagtct

SEQ ID NO: 43491 - DNA, 874 bp, Heterodera glycines
ctccctcccaatgggcatatacccaatgactcccccgttgggcatatacccaatgactccctcccaatgggcatatacccaatgactccccccattgtgcatatacacaatgactccctcccaatgggcatatacccaatgactccctcccaatgggcatatacccaatgactccctcccaatgggcatatacccaatgactcccccgttgggcatatacccaatgactccctcccaatgggcatatacccaatgactcccccaatgggcatatacacaatgactccccccaatgggcatatacacaatgactccccccaataggcatatacccaatgactccttcccaatgggcatatacccaatgactccccccattgggcatatacccaatgactcccccgttgggcatatacccaatgactccctcccaatgggcatatacacaatgactccccccaataggcatatacccaatgactccttcccaatgggcatatacccaatgactccccccatcgggcatatacccaatgactccctcccaatgggcatatacacaatgactccccccattgggcatatacccaatgactcccaccattgggcatatacccaatgactccctcccattgtgcatatacacaatgactccccccattaggcatatacccaatgactccctcccaatgggcatatacccaatgactccccccagtgtgcatatacccaatgactcccccattgggcatatacccaatgactcccccattgtgcatatacacaatgacaggccccattaggcatatacccaatgactccttcccagtgggcgggacccaatgctccccccatcgggcatatacccaatgac

SEQ ID NO: 43492 - DNA, 1025 bp, Heterodera glycines
tgctctggatagataatatttaaaataggttatttctcttcctttcagtatccctgctaagtttggtgcgcttctgatcagtttctgaaaaaaaagttaagcctaaactttttggcctgtttaaaaaggaattaaaaattttttaaaatttattcatctccctttttgatagaaaaagcatcagagtgcctaaactaacatgtaaataaaatttggtgcgtttcagagcattttctgaaaaaaaatatttatgaattaataccacacaagtattatttttttttaattatttttttcattttatcacccaacgttctagactgatcagaagctcaccaaattttgcagggaaactgctgagaacccttcaaatgcttataaattttcatagaattttttgcctggaggaacacagttcttcacacttgccacaccagcattatttttttttaattgtttttctcattttctcgcccatcgttctaggctgttcagaagctcaccaaatgatgcagggaatctccagagaacccttcaaacgcttattaatttacttagaatttttagcctggaggaactcagttcttcactcttaccacaccagcattagtctttgataattatttttttctttttatcacccaacgttctagtatgatccgaacctcaactaaatctacagggaaactgttaagacccctgcaaatgcgcataaattttcttagaattttttatccgttggaacacagttcatcacactaaccactccatcagtatttttgtataatcacttaattcggtttatgcgtaaaaacgatgtagcctcatgaaaatatcaacataataacggggcaccacaaatacacaccaacagatcacatcaataataaatataagtaataatagggagccatgaaggtgagagtgagtgcgctgcttgcagagggtgagcaggtggttcatcacatctccaagaattgttaagggtgcgcacgcggtcgacaagactaaaaaaacaattgaca

SEQ ID NO: 43493 - DNA, 1256 bp, Heterodera glycines
  unsure (1)..(1256): unsure at all n locations
agagaagggaacccttttttagtagggaaatgtcgtccgattgacctccttgcccaagtcggggaaaaggcgggcgaaagagtcgggcaattggaagtcgtagacattgggttgagcaacgaacaattgctgacctaaacaaaccaatggacaaggaaaaggtcggaaaaaagaccgatttccttaagcgctgtgctcgatagagtgatgcaaagcatcgattgaccgtttctcttcccgctctgtgggtaaaggtaatcggccccagtgctggcaggaaacttaggcacagagtgcaccagccaaaagccggaaatgtcgtcgaagacgagcactccctaaagcgggcccattcgatcgccaagggatggatgccctcgtccgtgcccttctcactttcatatgcgctcgatttgagtccgttttgccattgtttgggttctcatcattaaacaaggtaaagaaatcgccctcaaatggaaaacggttcagaaggcagttgagacagttctgcttgccttttttttctttgctgtgaacagttgcgagacggtcagtccaattgctgaacttttgtcctccacatttttgtcggaaaggcgccaagcggcggtgttcgcgtccgaataaagaaaggcggtgccgtcgccatcggaccccaaatcgggcaatttgtaagcgacaaacctgtaaaatggcaagggaagcaaaagaaatctaaccaatcagtcgaactgaccaatcgacctcctttcccgacaacgatttgcaagaatacccgaagagattctgtgggaaaacggagaacagcgccaaaaaggaggcgagacagacaacggcacccattgaatactttaaaaatgttcgatgcaatgttcacaaaaattattaggttgtatttgaacatcctatgcatatatttactagacaatgaaccaataaatcaaattttatcatcaattgtatacacagcggtccaagttcagaggtccccagacgcacttttactctaaaacattggaccgcaagtttgagtaatatttgaaatcgattgatcagagatttgtgtttaatatccataaaatacagaaaggagtttgaattacaaattacagaatgggatgaaaaaaagcaatcctaagtattatatatagcaaagacaatgaaggacaaatgacggcgccattccattcggaaaaataagtccacaaatttttaaataacaaatgcaatggatggaccncgtaaaaagttac

SEQ ID NO: 43494 - DNA, 877 bp, Heterodera glycines
gaatttgcgcagaatttgtcgacaaaaaagagatgacagagaaaggagcggcacaaccgaacccaatgcttagaattgagaatggcaattagcgaatttgaagaagacgattttgggaatgcaaaaaatgacatcgaaataaaagggaaaagagggacaatcggtacagagaaatgggcaaaagtgcgcgaaaaaggcattgacaaagtgccaacccaaccatttgacaaatggaaacacattccatgtcgagaaggggagacagacaaattttgatttgaaatgccattttgttgagaaatgaaaatgaaaaagggcatcccacttaaaatgtttaaaagtgatgggacggcggcgatgacatttgtacggttatttatgcttaatgatgaaaatgcttaaaaggttttacgagacaaaacaacacattgacatttcttaaatgatgcaatgaaaagccaaaaaagaaaaagttgcgggagggagtgactgagagagattaaatgcaaaaagtgatgtgaggggataaagcggatgaaaaaaggatcgaacattaacagggggggggggggaagccgaaagaccgaccgatggacagccaacggaaattagccattaaaaagggcacagcagcagtgccaaaagcatggcgtgggttgggagcagcgcgcggcattattaagttacggatgaccgaacggtgacaaattgggggtcaacaaacagaccgtaagaaggcgtaaagcgtaatccgagaagaatttatgatgagttctcaaaaatttcacaattaaataaattcgctaattgaaattttaaccgaatttttaatggcttttcaaattgcctcctctcgtcacaattggggggggggggg

SEQ ID NO: 43495 - DNA, 539 bp, Heterodera glycines
attatgcaaaaaacaaataaaaacgaaagactcagattttcgataatttttttgagccagctagctcggcgctcatttcagtgtaagttagtcctttaccggggagtatccctgcaaagtttggtacgcttctgctcaattagcaaaaaatatgagtgatcgaattttcactaaaaaagttaagcctacattttttggcatatttaaaaagcaattaaaaaatttttaaaatttaataattttcctgcaccgaaggtactcactcggcctcttcgcggcctcgtggtgggccttcgccccccccccctcccacgcccttcagagcacgacaaatatttcaacaaaaattttgaaatcatgtttcccactcccttctcccaggggtattattttgtaaagtctttttttccccaataaacttgtcaaaccccatttttcgcaccgtgaatgttatttttattgaattctgaaccggtttgagtagattagactaaaaaaatatgagtgatcaaactttcactaaaaagttaagcctaaac

SEQ ID NO: 43496 - DNA, 987 bp, Heterodera glycines
ggataaaaaatgtcaatctgctatacaacagcgatgctatgtggcgcatcacgctgactgatgttcacacattcatgcgcacgggagagacaacaatagagctgatacctgacgcattgccattggcatgttttgaatatggcaatcacaacttttttattttcgacctaaaaaatggagcaaatgaagtggcagtgatgcgtggtcaaaaacaaaaagttgcacatcaactgacctcatatggacgcgtactatttgaccacatcgatgctcggctgtatttagtagacaagagagaacggcgcatcaatgagctgtccatctcagacttggcgcgatggtggctgatgaataacactgctgctgctgctgttacaggaaatggcaataacaacgctacacaccaggttcgaagcacttttgtcggattgttgcccgagcaaaaaacggattatttcattgcttcaaatcatgtgtacctgattaggagaagacgtgtgtataagttccgagtaggcggctaccataatcagtcattctcacagctccagtttgtgaccaactccagcgacactcgtttcaattttcttctgtttgaagaaaagaagcgcgaacgtggtgacggccattttgcacgatcagctgcaacatccagtgtagttcatccctcatcaaattgggcagaaaacttgatgtttacattaacctacctgcttgatatggtggtcctactgatcggaatatgtgctattcgtatggtccgtcggagcaacagaaacagcgatgccgctgtgacaaagctggacgaatatgacctgattcactcaatgtctttattgcaaggtacagggggcggcccatacccccaacaatctaccgttttataattctacaacggtgacagcatcatcactatagcttaagtcgtcaggaatcggtatataaactcgccgattttgcctacagataattccattattcatcaac

SEQ ID NO: 43497 - DNA, 1043 bp, Heterodera glycines
ctgcagcatttcatgcagctcttcaaaagctgtccgaacatatttttctttcttttctaacgcattttccaagcggatttacacccatttttggacccgtattttttgtaccccgatcacattctgaaaaaaataattgatgcgctaaccctaagtctccccagttattctgcgcattgctttctccaacgcgagagcaaagccgcgaatttgtttcattttcctcctttttgtcttttttcatgccgctctcgaccctaactcagcaacgggtgggcgtacagcagcggcgactgcagcattcaatgcagctcttcaaaaggtgtccgaacatatttttctttcttttctaacgcatctccaagcggagttacacccatttttggtcccgtattttttgtaccccgatcacattctgaaaaaaataattgatgcgctaaccctaagtctccccagttattctgcgcattgctttctccaacgcgagggcaaagcagcgaatttgtttcattttcctcctttttgtcttttttcatgccgctctcgaccctaactcagcaacgggtgggcgtacagcagcggcaactgcagcattcaatgcagctcttcaaaagctgtccgaacatatttttctttcttttctaacgcatctccaagcggatttacacccatttttggacccgtattttttgtaccccgatcacattctgaaaaaaataattgatgcgctaaccctaagtctccccagttattctgcgcattgctttctccaacgcgagggcaaagccgcgaatttgtttcattttcctcctttttgtcttttttcatgccgctctcgaccctaactcagcaacgggtgggcgtacagcagcggcaactgcagcattcaatgcagctcttcaaaagctgtccgaacatatttttctttcttttctaacgcatctccaagcggatttacacccatttttggacccgtattttttgtaccccgatcacattctgaaaaaaataattgatgcgctaaccctaagtctccccagtta

SEQ ID NO: 43498 - DNA, 963 bp, Heterodera glycines
  unsure (1)..(963): unsure at all n locations
tagatcggcccaatttctgtgaagaccagcagcttttttgtgtcggcatcagtgactgctcggagtttgatgaagaattcgaagcgctcctcccagattttccatgccatctccgctgtgtagggtcccggcccttttccaacttttgcttttggctcggccatcctttgtgaatgttgacgaatttggacgctgatgatttgacgtgggaattactttacccttttgtgaaacttcagctttgtagacagaattactttactgagctgacaaaacgaattcgtgtttactttcacgtttttaaattagctttttgagcttttcgttggatgaagtcggcagttgaacgctttactttgcgtattttatttaactccgattgtgcctcgtcgctttgttttgcactgctgactgcgccagtgaactgttgtgtccgaccaacagccaatttattttatgcagtgaagaaataacaaatatatgcggaggtcaaagttgatgaggaagaacaaaataataaatgaagaaagactgggaagactgcggggagaaggagggaaagacaacatttaaatagacagcaatgacagttggggattaagaggtaaaatatgaaatgtccatttgagtcccatcaaataagtcctcatacacgacaatattcccactaatttaatttttggttgcaatacacacgtcggagagtgcaaatgtcggcaaaaccattcattaagattaagaaatgtccccatttacataaacaaaaatgatgattaaataatgtatttaattgatgggatggctcacttttcataagagaaagtaataacaaagggacgacgaaacagtaatgatgcccaaaaaatgtcaaaatgggaaaggaaatgagaagcatttacatatcaaattncngcattttatgcctgcttcttctgctgacaattagaggcgccgcttaactct

SEQ ID NO: 43499 - DNA, 946 bp, Heterodera glycines
agaatttgaaacgagtaataacctctgaattatatattttggtacaatttgtcggatttaccctccccccccccccccgttcctttttgggtccggaaaatccgtcagtagacaattagtcagcaaatttttttaagcaattatcgagaagcttggtatttaataataaaaaaaaagaaattggatgggcttttacaacacttcttaattaaaaaaaatccaatttatcattctatagaaataatcttttaaaatggttattcgttacttttataaaataaaacaaattattatttaagtttttccaatttaattcatttttacatttttatttaaaattttgcggttcaaaataaaattgctgatggattggccaggggcacttcattttcaccatttcctcgtcaacatatttcccatggatttggcggcggggcggggatggaatggctttgggtcctcgggcggtggtcgctttttggcggtaattttaacaaaaggccgggggccaatggggggggcaattgaaaaagctggaatgggggggaaataaaattcagtgatctggccgcctctttctgctgacgatggcgatttagcttttacttcttctttatggatattaaattactattaggtgctaattaacgcgaaattgtcgattaactttgctcacatcgctcatccgcgccttcagccgataattgtgcttcatcgtgtccagcttcgccttgcgcagtcccttctccgtggacataggcgaataccaccgaaattatgaaaaggcaaatcaaccgctaattgggcccatttagtgctttcaaacaatttccggaaggatggggccgggattttttcgaggtttgtgcccttttttaatgggagggattttgcaggggatttccaggggaaagaaataatcgcgcagcggcccacaaattaaagg

SEQ ID NO: 43500 - DNA, 1118 bp, Heterodera glycines
agaaaagctggcattgccaaagttatgaaaaataaatggggcatcgattggataatgaaacgatgcaaaatgggggaggccgtattcgttcagcagcagaagaaagatgaaaagtggatcaacaatttaacaatgtgatcatttggcatgttggtggcactaatagcattgggtgagcaattagaaaagacatttaattttgtttaaataattcgaattgcgcttaattaaggccattgtctcctccaccggcagaagaaatgaattaattagaaatgaccgatcgaccataattatatcattgatcaaatgcattttatgaagaaaaccctctcaatttcggtaaataaatcggatgtataaaaatgggttttctatatatcgaatgtatgaatttcggtacttgtgcagtttacatgatacttttaactagagaccggaggggatcgggactcccgcgggattttacggaattcacgctccggtaaattttgaactcccgatcccgctcccggaaattttacccaaaaaacgggagtaaaaatgcactggtaagaattgagttttttggtaaaaataataatttttgattgaaaaatctattgaaaatatagtccaagccattcttaggggtgtatatttaaccccgaccccgagtcggggttaagggtcggggttggaagcgtcggggttcgggggcccaaccctacttttttgccccaactcgttttgagtcaactcctttttattaccccaactcgttttctgatgggaaaatcgaggtcgaatcaaagaatttcaaagattttttggtacttgtccgttatctgtggtgcagattttcaaaaaaaaaatttgttttaataaacttgttctaggggtttttagagccgggaaaaccaattctggcatctattttggccaaattcgaaccccaaacccggattcgaacaaaaaaaagtcaaagtccgtttttttaaattcacattttatataccagatttccacgactaagaccacagaaccaaaaaaatgccccgaccgacgactcgtatgaccaaaaaacccctagaacaagtttattttcaaaaaatttttttttgaaatctgcacacaga

SEQ ID NO: 43501 - DNA, 914 bp, Heterodera glycines
tctctccgccggccattcgccgtttttaggttcagtcgcgttatttgagcagccgccgtgccgaccttctcagtgcgtgcactttccccagcggcaccgccgggggcagccaccactttgtgtcgacagtgccgggctcagcccgccgcgttgggcttttccccatcggcaacgatgctaatcgcccggcaaattcggcagcaagtttcggctcacgaacattcccttccctcgcgcggtcattggcgccgtttctgttaagcggagccgacgcggggccaccgccgtacgcgcccccgggacaaagaggtggggaaaggatggagaaaaaggaacagacactaacggcacaatgccaaattaccattcgaatattttgacagttcgtcggtcacgcaacgaagcgttgccgcctttgccttcttatgaagacgcgaccaaacttcccgcgctgatcccagcggcacaagaaaatacggacgaacagagacacgggattgaggagagagcaggaagagagacagaggaacagagacaaaggaacggagagagagcaggaagagagacaggggaacagagacagaggaacgaagagagagcaggaagagaggcagaggaacagacagggggagaagacgaagcagtaacagaagcagcagcaggacaggcggaggaaggagccatcggccgaccaatcccccgttaattttgatccccctccccatttgacacttatactttactttaaaagggtcagccgaattaaatgagtggcgatctctaaccttttgtattattaattagtcttgttaatgaatggtgatgctggcgctatttaaatagaggtccattttgaattttatcaaaaagtaaaaacaacaggggggacccttttgctttgcaatattttttaa

SEQ ID NO: 43502 - DNA, 1398 bp, Heterodera glycines
  unsure (1)..(1398): unsure at all n locations
cagaatattgcatggggagtgaatcgatctgtcaaaaaataaaattatcatactctggctagttgattcgaccaactatagtagttgttctgtgtttgcatatcgataagtttccagcgttttgttccggattttgtcctgaccgaggcacagagccggccgcgattctcttttatcagctttccaatcttttttggttgctgtgtatgccgctccatttttgggaatgaatacaaccgttctttcgtccacaccccgctgatcgtccttaaatatgttggttcgcaaccgtaacgatggatctgatgcagcgtgcatatcaatcttcaaattcctatagggacggccggtcgcttagcggtaaccaccaaggaaaaagtcgagctgtctcggacagagcaggacaccaatgaggtcaatggacaacatggtattaggggtctgcatcagcgccagttatcgagcgttcagacggcccacattgagcaacgataggagcggggaactgatgatatctccgataataaattaatccgcaaagtcatcacctttgtactcctcacagtcaaacagtcgggcactgggtagaggccaagaaagcattggacagctgaggaattggaatttgcaaacattcattaaccaatccatcgatgcaatactttttagctgaaaacaaaaaaataaatattattgttgttatgtccgaagataacaaattaaataagtttatttgccgaagaaaataaaataataaataaatgcagagaaaataaattgggaggtcaaaattggtgggcacaataacaactgaatgaggggaatgggagggtgaagatggcgaagtggcgtggggtcatacacctaatcaataattacttccttctctaacacaatttaaaaaataattaaataaaaagggaaaaatcgattcgattacttaatatcaatgcataataatcagtcaagaagagcagtttgaaaaaattcaatttaatcttggcataacaattaataaaataaatgaaacattttaatttgttaggggatacacctgctttcaaatggggccaaaaattgactgaaaagaaaattatttaataaaacactttaaatatttaaagattttttattccaacaagatatattatattattgtgaaattattctccatataaactattaatttttgaagatcataaaatttttcgaatatattgatgtatttttactagaactgagcgnngccgggaattttgacaaaaacccagaccgggacttaccgggccagaaaagtcgggaaagtgtgaaaaacattanaaaaataaaatacattgaagggagccgaactgtcaaaaaagcaatcaatcattttccaccttgctacgcagcaaatct

SEQ ID NO: 43503 - DNA, 273 bp, Heterodera glycines
aaaatgaaggagaaagaggagcattagtgtccctcaggacagaaattcccccgagacttcactggagcgaaacatggcccaggaatctaggctcgagaatccgagaccgtaattgccataaccaatttaacactatggaggacaatgccgaccgtgggggcggagcttgtgtacttttgcgaaaatggggcggtgcaaaggtgccgaggtcggaagatggcacgtgaagaaggggagaacagggcggattaatgattaacacctgacgagcgg

SEQ ID NO: 43504 - DNA, 1019 bp, Heterodera glycines
  unsure (1)..(1019): unsure at all n locations
atttctaaaacggttataccaacccccagatttttgaatccggttttcagaaaaaatgccttgtggtgaaaacaatatttcacatttcactccataccatggtgagttcggcacggatcgagaccgggataagaccattggaaagagcagctcgagctctacaagaacgtatggaaagaaaaaatagttatttctgggactttttcagaaatcagaattaattctccaatgtggcccaaattttaggcccccagccacagccccttgcttctcccagttttaagtcttggatttgtcaaataaattcaagacttcaaaataataatcaaaaattctcttaaaatttttttgaacccaattcaaaaaaggaaaaaaatttgcagtcaaaaaattattcgaatttctccaattttgtttccataatttccgaaagttattcggtatcataatgccaaaacaaaacgaaatcgttttaaaatattcctttctggacttgacttggtttcttgatatcgaagctgttttctacgctatttctaaaacggttataccaaaccccagatttttgaatccggttttcagaaaaaatgccttgtggtgaaaacaatatttcacatttcactccataacattgtgagttcggcacggatcgagaccgggataagaccattggaaagagcagctcgagctctacaagaacgtatggaaagaaaaaatagttatttctgggactttttcagaaatcagaattaattctccaatgtggcccaaattttaggcccccagccacagccccttgcttctcccagttttaagtcttggatttgtcaaataaattcaagacttcaaaataataatcaaaaattctcttaaaatttttttgaacccaattcaaaaaaggaaaaaaatttgcagtcaaaaaattattcgaatttctccaattttgtttccataatttccgnaagntattcggtatcataatgccaaaacaaaacgaaatcgttttaaaatattccttt

SEQ ID NO: 43505 - DNA, 974 bp, Heterodera glycines
  unsure (1)..(974): unsure at all n locations
ttttgctccccataaatgtttgataccccaacgggacactgaaaaaatcgattttntgtttcggggcagtcccnccgaaaccgatgcgcncagatntaggggagaccgaatccttcgggaatagcttccctatagcctgtactttaattctgcgttggatttttgctccccataattgtttgagtaccccaaacggacacatgaaaaaatcgatttttttgttttcggggcagtccccccgaaccgatgcgcccagatttatggggagaccgaatccttccggaatagcttccctatagcctgtactttaattctgcgttggatttttgctccccataaatgtttgagtaccccaaacggacacttgaaaaaatcgatttttttgttttcggggcagtccccccgaaccgatgcgcccagatttatggggagaccgaatccttccggaatagcttccctatagcctgtactttaattctgcgttggatttttgctccccataattgtttgagtaccccaaacggacacttgaaaaaatcgatttttttgttttcggggcagtccccccgaaccgatgcgcccagatttatggggagaccgaatccttccggaatagcttccctatagcctgtactttaattctgcgttggatttttgctccccataattgtttgagtaccccaaacggacacttgaaaaaatcgatttttttgttttcggggcagtccccccgaaccgatgcgcccagatttatggggagaccgaatcattcgggaatagcttccctatagcctgtactttaattctgcgttggatttttgctccccataattgtttgagtaccccaaacggacacttgaaaaaatcgatttttttgtttcataaatatttttttcagaaagtgctctaaagcgcaccaaattttatttacaacttaattttagcactctgatgctttagtatcaaaaaggaag

SEQ ID NO: 43506 - DNA, 1167 bp, Heterodera glycines
cgacctaatggaaaaaaatccctccataacaaggctccattaaatccattccttcgggggaccgtccttttgtgccgcggggaaagcagcgctggatcgaagcatcacggcaccgaaccttttggctagtcagcaatctgtttcttaacttgccagatcggacgggtgcgcatgattccactgatccaagcaccccaccaaaagcaaaacgatataaccaaaatataaggaaaaatttttaaaaaaattttttctccatcttcctattttgatactaaagcatcagagtgctaaaattaagttgtaaataaaatttggtgcgctttagagctctttctgaaaaaaatatttatgaaacaaaaaaatcaattttttcaagtgtccgtttagggtactcaaacaattatggggagcaaaaatccaacgcagaattaaagtacaggctatagggaagctattcccgaaggattcggtctccccataaatctgggcgcatcggctcggggggactgccccgaaaacaaaaaaatcgattttttcaagtgtccgtttggggtactcaaacaattatggggagcaaaaatccaacgcagaattaaagtacaggctatagggaagctattcccgaaggattcggtctccccataaatctgggcgcatcggttcagggggactgccccgaaaacccaaaaaaaaatttttttggataaaaattatttaaatgaactgactagataatatttaaaataggttattactcttcctttcagtatccctgcaaagtttggtgcgcttctgatcagtttctgaaaaaaaagttaagcctaaactttttggcctgtttaaaaaggaattaaaaattttattcatctccctttttgatagaaaaagcatcagagtgcctaaactaacctgtaaataaagttttgtgtgtttcagagcactttctgaaaaaatacttatgaattaattttgcaaaaaataaataattaatgaaaaagtcagaatttcgaaaaattttaaaaacaacaagcgttggcattttttcaggttaagttagtcctttacaatggagaaggcctgcaaaatttggagagattatatcgattttagtgcgctaggttcgataagactttttaaaatataagcctaaactttttggcctgt

SEQ ID NO: 43507 - DNA, 1333 bp, Heterodera glycines
aaacaaatcgccagcagaacggagtgccaaagtgcctaaaatggatgcggaaaaacagcagataaatgcgggtgaaacggactttggaaaaatggcatacagtgaaggaaaccggcgcacgaaggtagggaatttaaagaaaatattaattaaataataatttaattcagtttttaaaagagatatttccgttttcatttaattaataaatttgtttttgaattttgcgtagaaataatgaaaaaaaatatttataaatttatttaaaaataatgtaaactctgccacttttttttaactttttaattaatttttattgtaagacaaaaaatattaacaaaacatgcaaaaaaataaaagaaaaaaaaccaacagaaaagttgcaagtaagaaaatcgtatgcttttgtcaaaagaaaaaaaaattcattttttgaaataaataaattatttaaaaatacaaaaaaatatatatggaagatacttaagaaaagttattagagctatagaaactttaaagaaagaacaaagataaagagaaaaaatatatagaaggttattctccgtttttccatgtttgatatttccataaaatataccgtattccttgaaatacatccctccccctgaaataaagccacccttttgagggagttgaaaaataaagagccaggagacttaatttcaatgaacacggtacttccaactacaggagaagcatgctttcattgagctcagctcacttgtaccattgccaccgccaatacgtgatcagctcgacaaaacggccacccttcgctcgacaatagcatttttgtaatttgattttttcaattactgaattttttttaaaacagaaaaattcggcgtttgttcggcactttcatttcattttccacgttggcaaatggccaatgtgttggcacttcgtcacagaatgaccaatcggccgccaaatttgaatcagatgaaaagcgcaggcattggccaaattatggcgggttttatggcatgggcgcaacaacaacaaattgtaatcaagaacaaatgacgatgcaccaattctcgtacaatttgttccaagtcagtttaaattaatactaatttatcaaaatataattaattaattatactataattagtgaacaaattaaagaagtgttaaaaggatgaatatgggtagtgtactacttactgttacagggttgttccgggacgagaaaaatatcgggtcgggattcgggtcgggtcggccgaaaaaacatcgggtcgggattcgggtttcgggacgagaaaaatatcgggattcgggattcgggtcaattaaaaatttt

SEQ ID NO: 43508 - DNA, 1083 bp, Heterodera glycines
  unsure (1)..(1083): unsure at all n locations
cttttgccagaatttccctggacattggactctcattgtccatgatgtgcaatttggcactcattttgccgattctttgcctaccacatatggcaggttggatccgcaactgacggataaaattaaaaatatcatttcggatattttgccgtcagcagtgttgacagggattgttgatgtcgaaaatctgacggtccaacacgatggtaatagttgtgggtacttcgtgtgcctgtatgctgagtcatggcttatgaacaatcgcacatttgttctgcctgatttatccatcaattatgaaaaaaagcgcattttatggcacattaacgagctgtatggctctgataatgtgccatatcatccaagggaaggggtgccaactccttgcccaattgtctatcggcatacggatgaagcgcagtcgacatccaaggccgctgagctaatggaagttgatgaacatgatgatataatgatcatcgaaccacagacaagtggacaggcagttgatgccattctcgcccaagcccaagtggccggtgaaaaccaagctgacacgcttggtttggtgtcggagtcttgcataccgcaagagccaattgcgcaggctgatgatgtaattttcatcagacctaagacgccaccaaggcgatcaatgcgcgttcaaaaaaggctttcagcttctgtaagccgttcgccttcaccggcgccgaaacgccccccgccagcaaattcgctaagagtggcaacgccgatcacacggcgttgctctgcatttcacaaggggtggcaatgcgctgcagcagcagccaaacatttcccggaatattgtgactccgggaaactcggtgacaaaaaatgcgccgattgcggtgcacatctcttctcacatgaagacagtaccatttgctgccggaagggaagagttgtgctgccaatgcttaacccgcatcctgatgagctcaaagagctgattgtggggaataagcatcccgtgaagggaaagaatttgtgcgacacatgtcgcngtataacaacctgctccnatttgcgagcgtttccgctggcagcaaaccagccctg

SEQ ID NO: 43509 - DNA, 1256 bp, Heterodera glycines
tgaaatggtttttcccttacgtaaatgaaataattatgaacaaaaatttatttcttacaataaattatacatattttcaaaaaataatgaaaatgtttttttaataaattattggttaatttaaaaaaaacaaataacaaaaagatttaatgttaaatttagtcaaaactcaacaataagaagaaacaatagtttatcacatttaattttaagaagatgagatatagaaaaaaaagaaaaaataaagaatcagaaaatcaaatgaaaaaaaaaataagaatttaacagcaaaggtttatgcgagggaattttgttttgtaaacctaaaaaatatttaccctaatgcataaatcaccaaaatgtatttataaaatattattaaacatggattaaattcgttgctaaagtatattacttttatttactattctatttatcaatttatttggttataaaagaaaacgttgaatgtcaatcgaacaaagtaatttttgttaaataaaaaagttttgctcaattttttttttatattgaagagaattatttgtttaatcatttttttccaaattttatcacgaaataaaaaaagaaataataaaatgacaatttaaaaaatcaacaataaatttttaataaaatttttgtaaattaaacaatcaaaaatactcgtaaaaaataaaaaataatagattatataatttaaaaataatatatagaaagtattaaattacaaaatattttttgtattccatatttctgaaaatatgattaacaataattctcaaaaaagttgacgactgcttttccagtgacaaaaagcggtcgtgatcatgggctgatttacttatactttccttgggttggtgtgtttcgctgtctttcaattaaaaaaaaatattttgtatacattctgttccaaaattataaattaaaattttttttctcaaatttttccttgccgaatggtgtaaataatcagaagaaatcatgcgaatttcattaaataattattagattatatttttagatatattaatgtattttcttattttttaaattaaattttaaactatttttatttaagctttaatttttatcaaaaataataatttatttcactggccatttgtttttattcatttctgttgacttcatcgttagatttttcaaaattcggattaaaatttccgcttatttaaatagacaattggacaatgagaatgttaatttaaacatttttgaataaagattatctg

SEQ ID NO: 43510 - DNA, 620 bp, Heterodera glycines
  unsure (1)..(620): unsure at all n locations
cacaatttgccgtanntttgccttggttattaaagatgactttttttgtatttaaagcattttgcatttttaaataaaaattaatttaatcataccttcgccacagaaattttgaatgattgttgtgcctttgcccgattgggtgaaatactaaaaatgaaaaattcgtgtaaatattaaatttaataaagttagaggtatatgagtttatatcgagaacgttatgtggatctctgggattatgagataaattagttaattgtttactttgtctgcagagccttggccagcgccaccaatcactttgtatgtgtacgatttgcttgtgtctgtgtatgctaatccaacagcatggtaacacagttttttatagcttcaacattttttaaaattaaatgattaaatttaaacttaaaatcaaacaaagtgttctgatagtcggtattctaaaaattctgttgaattcttatattttttatatttaaatttgaattctttttttatagttttactggaaatgggtggaaaatgattaaaagaattcccgttttgcccggtgtttgccccaaaagccgtaagtggaagccccggcaaagtcacgacgaaactctagtcccatt

SEQ ID NO: 43511 - DNA, 301 bp, Heterodera glycines
cggtgtcatctatgttactagatcggggatcgatcctctttcggccgctcgagcaggacctgcagaagctagcatgatgcagatcagattgtcgtttctcgccttcagtttaaactatcaagagagggaggagagggttggagaaggaaaggaaaaaaaaatgaaggaggagaaagggtgggtggcggaagaagaaaagggtggggggagtatgagtatgatggtcaatatggagaaaaagaaagagtaattaccaattttttttcaattcaaaaatgtagatgtccgcagcgttattata

SEQ ID NO: 43512 - DNA, 1220 bp, Heterodera glycines
  unsure (1)..(1220): unsure at all n locations
aaaatttttattcctttttaacaggccaaaaagtttagctttactttntagtgaaattcaatcactcatttttcgagtagtgatcagaagcgcaccagattttgcaggggcctaaaagggtcaaggaaaggcgtctctgcgttgatntagcagtagtacctatgaatttaaattttctatgaatttttaaagttttttgtaacttttttagtgaaaattcgatctctgcaaaattttttcaccgggttgagaagaagcgtaccaaactttgcaagcatttgcagtgtaaaggactacttacactgaaatgagcgccgagccagctggatcaattacaaattatttatcgaaaatcaaagtctttagtttttatttatttttgcaaaattaattcttaaatatttttttcagaaaatgctctgaaacgcaccaaattttatttacatgctagtttaggcactctgatgctttttctatcaaaaagggagatgaataaaatttttaaaaatttttaattcctttttaaacaggccaaaaagtttaggcttaactttttagtgaaaattcaatcactcatttttcgagtagtgatcagaagcgcaccagattttgcaggggcctaaaaaggtcaaggaaaggcgtctctgcgttgatttagcagtagtacctatgaatttaaattttctatgaatttttaaagttttttgaaatttttttaagtgcaaaagtggtggtgtctgcaaaaaattttcaccgggtttaaaaaatctaggaaaattagtaagcatttgtagtgttccgatacgtatccctgcaaaatttggtgagcccctgatcaattacaaattatttatggacgatcaaatttttagaaatttttatttatttttgcataattaattcataaatatttttttcagaaaatgctctgaaacgcaccaaattttatttacatgctagtttaggcactctgatgctttttctatcaaaaagggagatgaataaatttttaaaaatttttaattcctttttaaacaggccaaaaagtttaggcttaactttttatgaaattcaatcactcatttttcgagtagtgatcagaagcgcaccagatattgcaggggcctaaaaaggtcaaggaaaggcgtctctgcggtgatttaacagtattacctatgaatttaattttctattaatttttaaagtttttgaaatttttt

SEQ ID NO: 43513 - DNA, 655 bp, Heterodera glycines
attcgtccgcctcgcggcttcaggacgggcgcttcgcgcccgtttttaaattttttgggggacatttggccgcttcgcggcctcaggacgggtgcatcgcgcccgtttttaaattttttgggggacattcggccgcttcgcggcctcaggacgggcgcttcgcgcccgtttttaattttgttcagaacatttggccgcttcgcggcctcaggacgggcgcttcgcgcccgtcatttaattttgttgaggacattcggccacttcgcggcctcaggaagggcgcttcgcgcccgtcatttaattttgttgagaacatttggccgcttcgcggcctcaggacgggcgctcccacccctcagaatccccaataacacggggattctgaggtcttaaccatgtctaaagtaaaatctgattactattcgtgatcagcggcccaaataacccctaaaatcatatttttggaagatttttggttaaaaaaattttccactcaaaaatcatagtcacacccctgtggtcccaaattccaaaatcacttttatttctataacttttttcaaaaaagtgataaaaagctaaaataaaatttataaaatagagcaaaaaattgcggattttttgagtatattatttttataaaatactttttcag

SEQ ID NO: 43514 - DNA, 1108 bp, Heterodera glycines
  unsure (1)..(1108): unsure at all n locations
tttctaggcttagatcacatgcgattttcggcactctgataattttagcgctcataatgggatgtataaaggcgattgtagaaggaattggaagcgctaaaattgtttgagaagctttttgagcgtaattacgatttttacttagaccatttttttctaggcttagatcacatgcgattttcggcactctgataattttagcgctcataatgggatgtataaaggcgattgtagaaggaattggatgcgctaaaattggttgagaagctttttgagcgtagttacgatttttacttacaccatttttttctaggcgtagatcacatgcgattttcggcactctgataattttagcgttcataatgggatgtataaaggcgattgtagaaggaattggaagcgctaaaattgtttgaggagctttttgagcgtaattacgatttttacttgaccatttttttctaggcttagatcacatgcgattttcggcactctgataattttagcgttcataatgggatgtataaaggcgattgtagaaggaattggaagcgctaaaattgtttgaggagctttttgagcgtaattacgatttttacttacaccattttttgctaggcttagatcacatgcgattttcggcactctgataattttagcgctcataatgggatgtataaaggcgattgtagaaggaattggaagcgttaaaattgtttgagaagctttttgagcgtaattacgatttttacttacaccattttttgctaggcttagatcacatgcgattttcggcactctgataattttagcgctcataatgggatgtataaaggcgattgtagaaggaattggaagcgctaaaattgattgagaagctttttgagcgtaattacgatttttacttagaccattttttctaggcttagatcacatgcgattttcggcactctgataattttagcgctcataatgggatgtataaaggcgattgtagaaggaattggaagcgctanaattgtttgaggagctttttgagcgtaattacgatttttacttacaccattttttgctaggcttagatcacatgcgaatttcggcactctga

SEQ ID NO: 43515 - DNA, 911 bp, Heterodera glycines
aaaagcaaatccatacaaccaaaatacaagtaaaagtgttttaaaaaattttttctccatcttccttattgatactaaaacatcagagtgctaaaattaagctactcccgaaggattcggtctccccataaagcccttaaatcggttcggggggactgccccgaaaacaaaaaatcgattttttcaagtgtccgtttggggtactcaaacaattatggggagcaaaaatccaacgcagaattaaagtacaggctatagggaagctactcccgaaggattcggtctccccataaatctgggcgcatcggttcggggggactgccccgaaaacaaaaataaatcgattttttcaagtgtccgtttggggtactcaaacaattatggggagcaaaaatccaacgcagaattaaagtacaggctatagggaagctattccggaaggattcggtctccccataaatctgggcgcatcggttcggggggactgccccgaaaacaaaaaaatcgattttttcaagtgtccgtttggggtactcaaacaattatggggagcaaaaatccaacgcagaattaaagtacaggctatagggaagctattcccgaaggattcggtctccccataaatctgggcgcatcggttcggggggactgccccgaaaacaaaaataaatcgattttttcaagtgtccgtttggggtactcaaacaattatggggagcaaaaatccaacgcacaattaaagtacaggctatagggaagctattccggaaagattcggtctccccataaatctgggcgcatcggttcggggggactgccccgaaaacaaaaaaatcgattttttcaagtgtccggttggggtactcccacaattatgggggagcaaaatcccacgcagaaattaagtacag

SEQ ID NO: 43516 - DNA, 890 bp, Heterodera glycines
tccccatcaagttcaagcagtgcagcaacaaaaccctcagcagaaagacacaccggcggcactttctgttaggtctcaactgccaattaagccaggcccaaagccgaaaaaaccacaaatggaaaagaaacagcgaaaggaaaagccgccaccacccccccccaaacagaaggacttgaaaattacgtgcagtccctgcggagagattggccacatgaaaacgaaccgtcactgtcccctctacggaaaagaggaggatttggcatccaaaacagtcggcgagatttgccaggcaataatattgctggttgacatcaatgtgtaacgtgcccattttcagccgaccacttccaaactcagtgacgtgcccgatgaggagggcgaccgtttgccttccggcgaactgatcgaggtggaggggacgcggctgaaaatatccaaaaaactgtacaaatgcgcggaaaaggagcgaaaagaagcactgaggtggcataattttgaacgaactgccgaattgggagagaaattccaatttccacagattgcacattccacgcaaagcattggagcggccgttgaagaaaaaaaaattgctgaaaagtgcaggcaaaaaaacgatgacattgatgccaacggcagaaacaacgacagcgaatttgggcactccaacggaacaaaatcagccgcaggagcagcagcaaaaggcagggacagcagcggggacaacgacgacagctgcagcaactgacgctgcttctgctgcggttgtaatggaagaacagagtgagtcggttgactcatattccgtataaatttcgcataattagccggggcagtgtttgttcgccaaagatctgttaaactgtccaatgttagcatttccccatttg

SEQ ID NO: 43517 - DNA, 971 bp, Heterodera glycines
  unsure (1)..(971): unsure at all n locations
tccgttcgccttctccggtgccaagcaaatataatcaatttgatagtgggacaatttagaaaaattaaatttttcaccaaaattaacaaatttttgttccattttttaaatgggaatttgggattaataagtttataatgttactcggttcgattttcaaattgtttgaaatttggtcagagttacctaacttaataatatgctcttttttaataaattcagttttttcaatgaatttttttttttgcatatacaatcttgttaattactggtattttaaactgtattatattccttgtgctaatggccaaacgaacgcacaaccaaaaaaaccattcgcagttgtctctgtgtgtcggcaccgctcgcacaaatggccgccaccgccgcagcaaaaaaccgccaacaaagggcggccacgaaaggacgccgccaccgacgccccaaacattggccgaccaaacggacgacagcaaagcgacaaaacagacgaaaaagcgatggacaatgaacgaatgccgaaggctgaaggtttgttgtgggagaagtgaaacgcccgcaaaagaggagggagctgccaaaaagcttttaaaatacaaaaaaatgggttttactattgcctacttaacaatcaatttgattgtgttttttcagcttgctctcaaaatctgcaacccatcgaccgactcggaatgggaggccatcagcaggtcagcagaaccaaatttcataaaatagggatcgcatttgtaatatcaatggaatttctaagaattggtaatttaaaaatgaatgccgtanatgtttatggagaatcaaaagaatgtaaatttcgttttgttgttcacaggtccatcggcgggctgcgcaccgcgggagaatgccgtgccaaggcgatgaaaacagttcggttgggagcagccgtcgttggtctcgtcacagtcgcaaaatgccaccacctcaaaatcatc

SEQ ID NO: 43518 - DNA, 956 bp, Heterodera glycines
atgatgatatatgtttcacgatttagcctttattttcggcaactaaggtcatttaaagtcaccaaaaaagtcttaacttaaatttacagtcctaataatcatgtttttagcaaaatgtctgacaaatcgttgtatctcaacgcgcaattcaacgtggactcgaacgtggcgttgcctgtggctgacaatacgaacccggctgggcctgccaatccgaatccggctgggcctgccaatccgaatccggctgggcctgccaatccgaatccggctgggcctgccaatccgaatccggctgggcctgccaatccgaatccggctgggcctgccaatccgaatccggctggggctctcaatctgaacggtgccgcgttcgatgatacgctgagcctttatggggaagaacgccttgatcgccattaggcgagtccccgtgaataaaaaggagattcatcttttgcttattttaggtgtggttctctacaaagaaagaggagagtggctcgaagtttatgctttcaatgcaagaccaatgaatgttaaggaactcaacccgtgttagctctgtctcatattttgcgtccgttaaatgaatgtacgaaaatgtattaatagtaatctgtcatattatattgtgtttatggtatttatatgcaatggagattacttttttgtatttgtttcggctatcttttgttgacactcataaaagccatatttccattaagaccattgtaatattatatattttgtttaaaaaagcaataaaagtggaatggacgtatgggcggacattgcgaaagcggattttatggatgaacgattttcgagggttattacggctaataaggcgtacaacctcttccaggtctgttctgaataattgctacacggttgacatttgtcaaaacaagaattccatttgctgacttgatgaacgttcgttccgggctcag

SEQ ID NO: 43519 - DNA, 782 bp, Heterodera glycines
  unsure (1)..(782): unsure at all n locations
caaaaatgccaaaatatgtacaacttatgcgccaaaaacacgaaatatgtgccatatgtttttatgagccaaaatgacaaaaaatgtgtatttaggacaatatgagaaaatctacatcaaaaatcgctcgcagaaaatgttatttttgggcttctctcgacataactaagccacataacaaaatatgacaaaacatgaaaatcccatccctaataataataatagataaaccgaaaaaaaaaatgaaaatggaaaggacaaaaacaaagtaaaaatggcgagcgacggacagaacgacaacggatgcaaaatgatccaagctgatcagcaaaacaacaacaaaataacagtaacacaaaatgtgatggtatgtgtgtggctggggaggtgaggggagacggacgaaataattaggacccattccaataattcataaattgaatttgggatacggttctcaaagaattgtgccaaaagcagtttcggcacgcactttgtcatgaactttctcttatttttttttgccgtcaaattgcggtatttcattaatgttttcgcatttcaaaactcgaattttaaattcacattccgttaccgaagttgaaatgtgcttttcgactggccattcatcaaatgccgaaatgataggaagtcgatttttctgtcggaatcgggaacacggacggttcgncccgtggtttttcgttgcgaccattcgccgcccgtagaaaaatgtattcttttggccgctataatatttcacaaaaaattttgattcattt

SEQ ID NO: 43520 - DNA, 1346 bp, Heterodera glycines
tgcatgaaaattcagcaacactgccgaatttgtgctcacaccccggaggtgagagcaaatgacctccactgaaggtcgttagaacgtcagaaccattcgaattgccccgacatttggggacccgacttttagggacccgacatttggggattttaataaaacaaaaaaattattaaaaaatttaattttatgttcaaaatcagacaaatttacgtctgctttagccagttaattctaatgcaagaaaaaatataataatattttttaaaacgccttttccaagggccaatgggaacagacgttcttcaaggacattcaaaaagttccagacggttttgctgtctaattgcgtacaacaaatgccgaaatcatcttttctctttcttatctttcgagtgactttgtgcggtgctttaaattaatttttttaacaaattaattgttatgtgactcacttgcaaagcaaatctcagtccggaaacagagttaggtatttaaaaaatattattttgtcttttcttgcaatggaattaactctggctaaagaagacgtaaatttgtctaatttttggcataaaattaaacttttaaatatttttttttgttttattaaaatccccaaatgtcgggttacctaagagttgggtccccaaaagtcgggtctccaaaagcgcattttttaaactttttcaataaatgttaactagttttgtttactgcaatcatttatatgtttttatatttgaatgttaccttttaactggttatttttttgtaatgccctgctaatgattcatagaataaataccttaacattttttgtacatccaggattggagttaattccataattttttgagcaactgaattcacttccgatttctaaaatttttggaaaacttaggggcttcagaaaattggagtttcattgaaaattttcaacttcgcagaagatgaattttggcagttttgaatccatattttggccatttttgagcttgctttttagtcaatattttagggcttttttagtaattgatgttttttcgttcacaaatttccagtcatagaaatgatgcaaaattgtaagtgattgagcgctattttaactttttcactttaaaactgtatcaaaacgcaagtactcccatattcttttttttacccatttctttctagcttttaaggtcgcttataaccatttttaaccaattttaaacttgggaactatgagaaatattttcccatatccataaatcttattcattttgggtaaacaatattcataatttgaaaaagtggcaactcaagaaatacataattaaaagaattttagggtcgaacat

SEQ ID NO: 43521 - DNA, 943 bp, Heterodera glycines
gtcccattgctaaaaaattgaataagttgctaacgacaatttcttacatattttgtctccagtgattaaatgaggcccatttacttgtgaatgttaaattagaaaaaagaattattactggaacgtcaaaaccgaaaatattatacagtatgcctaaagaattttcattttgtgcaagttcaataaattttcttataattataataatttactggtattttattttttaattatattttttaaatcagtaaaataacccatttcctgtgaatgttaaatagggttgcacccccaacccccgccatttttgaccattttttggggttatacctgacccgaacccctacgcttccaaccccgacgaatcccgaccctgacacttaaccccgactcgggttggggtaaaatatagacccataagaatgacattttgtgtaagaaaagggaaaaaattaataaattttaaattttttaaccaacttgacaatttttattataagctttaaaaacaaaaattaaatatttaattttcaaaattttacagtgcagcgaattgagacacatcactgaattttgccttgttgttttcttgccgggttgaacatttggggttaagagatcagtgaatgctttttcgttgacaacaacaaattcgtcaaatatgtccatagcaatagtaattctaataactagcgggtgtgtgaaccgtcgggtctggtcatgggataaagcgcttcgcgcttcttgagcttcgctacctaggtccgatcatgaattatagggagagattgtcccaaaggtttaccacgggtggattaggtacaaccacgggggaatattgtttaaatttggtgatttttaggccgcttcgcggcctcgaacgggcgcttggagcccgttttcctattttgttgagctctgaagggcgcttcgcgcccgtttc

SEQ ID NO: 43522 - DNA, 802 bp, Heterodera glycines
ttataatagtgattgaaaggtttctcaggttaaaaattcgagttcaaactttagattttcatgatcggatcaattttttgaaaatccgatgatcgatcggatcgatcagtttgtgtttaaatgaccaattgttaagtgttctgaatcggacgtgctgccacacgacgacattgggcgacataaccgtggagaagggcaccgccgtggtgtgcgatttgctttcgctgcaccacgacaaagccgtgtggggagaggacgcggacgaatttcgaccagaaaggcacaaaaaaaaacccaacaaaataatcataataatgggccaaatggaattgaaatggcaaatttgtgcacctttgttcaaacagggggacacattaggcattttggttttggagaataagatttttgcaattttttaatcaaattcactgagactgaagccaggcaaaagccattaaaattggaagtcgtttaaatccaaaaattgtaatccaattgaaactgttttcaggtggctcgaagcagggcatcaattgccgccgttttacgcgttcggcggcggtccgcgcatttgcattggcatgcgattcgcaatgattgaggagaaattggcattggtccgaattttgcgcaaatattccattgtccaaactgcggacactgaggtgatcaaatggacaatcaaagcggtggtacaatcatttcaaatcgcttacagaaagagttggcattctccggacaatcggtgataacgccaaaatcggtcactgttgggcttaaactgagggacgaagaacggcac

SEQ ID NO: 43523 - DNA, 1115 bp, Heterodera glycines
  unsure (1)..(1115): unsure at all n locations
acgacaatgaactttttgacgaaaatacggcactgattgagacgcttgaaaaaatttctgatgagaaatttagagaaatgaacgctgaacagaagtggatgaagctttttgaggcaaaattgcccaatcttcttttgcttgtcagcaaaattctttcaattcccgtgtccaatgcatgtgtggagcgcgttttctctctttgttcagcgcaatggactgatgtacgcaattcattgaaaatcgaaactgtgaaaagtctggcacaatggagggggaggaggagagcaccgacgggaaagaagaccttctttccctcccttcggacggagaggaggtggtgccggaaacgccgccgccgcccgccgcaatgtcgcgaaaccgcgacgaagagttggggtgaaggatcgggccagttgtcctttacccggggctcgggcgggcactacaatgcccgtaaaatcgatgaggaggaggagaaccgatgggccaccccaggcgcatggtttactgcacccccacgagtctcgggcccgaagaagaagccgtggtaccattgatgatcgggaacattcccgttggtcggtcggtcggagcagaagatcggagagatgacgaaacccccgccaatctggcttttttccttccttttcgtccccttcttttttctccctattatttaaatcatcattttccatttcatttctcattatccaatttgtctaccatttcacatctgcattttctccatcttttcttcgccccatttgcatttttcacattcattcacattttcaaattccttttgttcggcccgattggacatccctttctcaaaatgtttaccattatttttttgcccgccatcccctcttttcatccatttttctgtactctgattcccccaacatattcagcgatgcctttttccctttgtctctcaaaaaatacccacttttctccttattcacctatttttncatactttcctcctaaactatttaatcacaacaccccctcccttttttttcttctcctctttttctacntccactttttanttaatccatccccaattttcccttctnttnacctatttactcttatcnccatttttt

SEQ ID NO: 43524 - DNA, 630 bp, Heterodera glycines
gttttcggggcagtccccctgaaccgatgcgcccagatttatggggagaccgaatccttccggaatagcttcactatagcctgtactttaattctgcgttggatttttgctccccataattgtttgagtaccccaaacggacacttgaaaaaatcgatttatttttgttttcggggcagaccccccgaaccgatgcgcccagatttatggggagaccgaatccttcgggaatagcttccctatagcctgtactttaattctgcgttggatttttgctccccataattgtttgagtaccccaaacggacacttgaaaaaatcgatttttttgttttcggggcagtccccccgaaccgatgcgcccagatttatggggagaccgaatccttcgggaatagcttccctatatgcctgaactttaattctgcgatggatttttgctccccataattgtttgagtaccccaaacggacacttgaaaaaatcgatttttttgttttcggggcagtccccccgagccgatgcgcccagatttatggggagaccgaatccttccggaatagcttccctatagcctgtactttaattctgcgttggatttttgctccccataattgtttgagtacccca

SEQ ID NO: 43525 - DNA, 733 bp, Heterodera glycines
attgctgaaaacctaaaaaagggccaaaatatctagtcctcaacatagttccaaaattaaaatcaaattgatcaaaaataccccgaattttgcaaaaaaaaaatttaattaaaatatataaaaatcggatccttgataatttcgatggaatttttggaaatcggcgttaattttaatttgcattttattttaaaattttattttccccaagatgctcaaacaataattgttcccgatttggttatggaaatggcaaaaatgcttcagaactgggactggaattatgtccatttcaatattacaaaaatgacggaatggcatttgttggaattggcacttctcgaaaaagggcaaaaccaaaaatgggaaaaaattgaacaattaaaagaaaaatggaaagaagcatttgatcatcatttaataaatcgagaagaaaaaagtcgaatctttaaacaaatagtggagaagctcaaagtgatggtgacattttcgattgattgttcaacgacattatacgaaagtttaaaaatggcaaaaattgttagcacaagtcgaattttggtgcgcccatcggaccccaaaattttactttcagttttattgcttttgaccgatcgaaatgagcaatttacggaagaaacgcaaatttcggtggaagaaaattattgtattttgacacattttgtgaaaaatttattggacaaagcaaaagcagcggaatatttgccaaaaa

SEQ ID NO: 43526 - DNA, 435 bp, Heterodera glycines
caaccccgaccccgccccgaccccgatatttttgaccattttcggggttaaccccgaccccgacgctttcaaccccgccccgacccttaaccccgactcggggtcggggttaaatatacacccctaagaatggcattttgtgagagaaaagacaaaaaattatacaaaatttgaatttttttaatagtttgccaatttttattaaataaagtaatttgcattttgttaacctatatgtattgtgatgtagtggttagttcttgaacactaacactaccttggtcataagttcgaacacgtttgactgtttcttttttaatttattttcatttgattaataggatttttttaaccaaaaatacccatgaaaatcaatcatccttggcataatttattgacattgaaaatcaatcatccttggcataatttattgac

SEQ ID NO: 43527 - DNA, 979 bp, Heterodera glycines
  unsure (1)..(979): unsure at all n locations
tgattggagcacgtacaaagtggtcttttgttgaggtatcggcgactttttagcttctttcttctccacatcgacattcatggccttttcaccttcccttctgaaagcgtccaataggccaaaggcatccaacatattcccaaaagattgagtgatccttttgtgcgacttcgtccagcacagtcaaatcggcacccgagtcaagcacaaattgatcggaatgtcattcacccaaatcgtgacttccatcagtcgtgttgatccatttaggatattcaccatgaggccaccaattcgcagggcattcatcttcttgcctagctttggtcccttttgctttgtcagccattcatggtgtgcggcgcacatactctgcacatgtccaactttttagcattttcgacaaactgtcttcaaatgcggacaatgcgatggagtgtgctctctgccacaacgccaacatgattgctgcttatagcccttttctccaaaattgtccttcttcggttgctgcctgcgctttacagccaaaatgatggagttcgatggtctctccatcgctttcgcttccgaaatggtcgacaaacatttgtaagtcgttcacaacatttccatatgttgctctgtcaccatcggccgctaactttgacagtatgcgctttcgcaattcagcatccttcggcgatttgagcgccacgaggagcatcaagcagttaaactgctcttcgttgagctttttaaactcaaaatcgcttaacagccttttgtggcggttgatgaagccgcgaaattcctcctcgtcttgcttttcagcccgtaagcactcatatctgccgatccacactgatttttgcttcgcgaataagcttaacagcatttccgaagtcttagcaaagtcaaactctgttggctttttcggcaaaaagtgtttgctatactcggcgtaggccgtctcactcagctntgtcagcaagagctt

SEQ ID NO: 43528 - DNA, 1418 bp, Heterodera glycines
  unsure (1)..(1418): unsure at all n locations
attaaaaaattttaatatttatttaaaaatttcncgattcttctatttccaatgttttttggtcggaaacaaactttttttttgatggcttttatttataacgacataactccttcgaaggttgcaatacatagacttatgggatttttaaaaacatcctatttaaaggaaaaatatttcaatttggatgtcaagtttaggcaaatttttttttgtgtgttctgtaaaatcgaaagagtcgagtgtcatcttatctatgttagtaccgattttttcatttccgaaaaaaccctagcagatttaaaaaattttttaaaattgctttactcattttttagtttcgctaaaagcgaattgaataaaatatattttgcattaaagattagtagaccaaacttacacattgttaagctaaatttagcaaatttataatacaagatggcatctagaattttcaaaaaaaaaaaaattcatttagccaaatttttgggaattttgagaaatcatgcaaaattaaaatataaaaaaacaactttaatttgctgacaaaagaagctgatgaagacgttctcaaaaagcgtgcacatgattttttgagtagcttcatctcccgacttatccgcgaaaatgccaacaaaaaatggtctttccaattacctaattggttccggtttgaaattaaattttaagcttgtgagttgtgatcatacggggattaacagcggcttaaaaaaccccaaaaaataattttaaaaattttttacaggcaagtggatttgaacccacgcgcccaaaaccatttttaaccatccgagcaattcgtctcccttccttacgttaagtcgagaatgggcccgcagcaccaaaatttccgatttttgaggccctgtaacttttgaactaggcgcttgacaccgctaaaattaaaatttacaatagaagtcgatcctgctctatccaatgggatataacacatgtgcattttcagacttacagctcggaatgttcccttgtgaagtgaaagacgagtggactgttcggtggtctatcgctttgaaaaaatgttcgtagccaccaaaaattgaccaccttttacccatagaagtgtcaacgccgaagctctctctataaatctctgccaaacttcgccaacgctcaagaccgagaaaacccctatcaaaaatagaccatgtcgtgcgcgactcagcgctaccgttgcgcgctgactatctgtcaaaaactcggaattctcagagagatttccctcacgataactagacctagttgtcactacaaccgtgatgtcagcctcctgagcctgatattcgtcctcacttaccactaaaatgttaagatctaaaagatctaagtcttcaaactcactcttaatacattctttctgtagcaaatacagacaa

SEQ ID NO: 43529 - DNA, 939 bp, Heterodera glycines
ttaaatcggttccagtctgcataccgaccgaagcccttatttaaccgtccccgaatttctcgaaatggctcagtcccgggcagcgacgggcggtgtgtacaaagggcagggacgtattcagagcgagttgatgactcgcccctacaaggaattcctcgttcacggacaataattgcaatgtccgatcccaatcacggcaaattttcaccggtttaccaacccctttcggggaaggacaagcacgctgattttgccagtgtagcgcgcgtgcagccccggacatctaagggcatcacagacctgttattgctcaatttcgtgcggctgaacaccgaaaatccctctaagaagttgtgcccacagaagcaatgagccaactatttagtaggctagagtctcgctcgttatcggaataaaccagacaaatcgctccacgaactaagaacggccatgcaccaccatccaccgaatcatgaaaaagctatcaatctgtcaatccttacggtgtccgggccgggtgagtttccccgtgttgagtcaaattaagccgcaggctccactcctggtggtgcccttccgtcaattcctttaagtttcagctttgcaaccatacttcccccggaaccggaagactttcgtttccgggaagctccccaccagggcgaataaatccaccggcggatcgctagttggcatcgtttacggtcagaactagggcggtatctgatcgccttcgaacctctgactttcgttcttgattaatgaagacattcttgccaaatgctttcgctgtagtccgtcttgctacggtccaagaatttcacctctcacgtagcaatacgaatggccccgtttgtctctgttaacattatctcggtcagcaaaccaataaatcggaccgaatcctctctattattcatgcacgaacttcaagcgaaa

SEQ ID NO: 43530 - DNA, 933 bp, Heterodera glycines
aaagacaaagaaaagcactgctatgatgctactccagtactctgaatttaaatgttctataatttttaaagcttcactattttattttttgcataattaattcataaatatttttttcagaaagggttctgaaacgcaccaaattttatttacatgttagtttaggcactcagatgctttcactatcaaaaaagggagatgaataaaaaatctaaaaattttaattgctttttaaacaggccaaaaagtttaggcttaacttttttttcagaaactgatcagaagcgaaccagattttgcgagagcatcaaaaagacaaggaaaagcactgctatgatgctaacaccagtaattctgaatttaaaattttttattaatttttaaagcttcactattttatttttttagcaaaattaattcataaatattttttcagaaactgctctgaaacgcatcaaatgttaattaaaagttaaataaggcactcagatgctttttatatcaaaaagggagatgaataaaatttttaaaaatttttaattgctttttaaatatgcgaaaaagtttaggcttatattttaaaaagtttcatcgaacctagcgcactaaaatcgatataatctctccaaattttgcaggccttctccattgtaaaggactaacttaacctgaaaaaatgccaacgcttgttgtttttaaaatttttcgaaattctgactttttcattaattatttattttttgcaaaattaattcataagtattttttcagaaagtgctctgaaacacacaaaactttatttacaggttagtttaggcactctgatgctttttctatcaaaaagggagatgaataaaatttttaattcctttttaaacaggccaaaaagtttaggcttaactttaaagtcagaaactgatcagaagcgcacca

SEQ ID NO: 43531 - DNA, 1236 bp, Heterodera glycines
  unsure (1)..(1236): unsure at all n locations
ttcttgataaactttttgttaatttttaaaaaagattctttcttttacaaaaaaaaaaaatcagggacaaaaaattttttctttgaaatttaagccttagatttttggtaccttaatgaaattctcttatttgtcaaaaaaaaaaattcaattctttgaaaatttcccggttatttaccacctcctctgtcattcggctctctgctgtgattagcttcgaaatgtccagacgaatataagcctaaactcatagacaattaaaaatttcattaaaatgttataattattctcaacaatttgcagaatatggtattgattgtcatttgaagcttttcttccacaaatattttattcatacaattaaaataagatccattcaaagagaaaatagtggaatacaaaaaatggctaaaaatgaaagaaacataaaagagtaaacagacaaaagagtccttttggccgaattgtcgcggctaagttcaagactttccttgtgcctgcgagcgtcgtaacgataaggctaaaatttttgcatatgtagaaaaaattttagattggtagaaaacatacaaaaaataaatatatatatatttttttattaggctaaaaaactcctaagaaattaactaatttgaaggaatgagggaaacaaattcttaatttgacgaataaaaaagacgtagcagcacattcatcaaagtgaataaaaaaaaatgagacaaaagagacacttataaattccataagagagaaaagaaacagcagatcatcaacagacagttaaagagtttggagcataaatttaagaaatttttgttgtcgacggcacattcaattgttcaccgagtaaagagaccatctcacgaagtttggaacattcgcgaccactaaaaaattaattaaaaaaaaacaaaaatataaatttaaaaaaaaaccgatgcggactcaaaaatcacgaaatgactataaaatttcgttaatatcaaaaaatataatattttttgccataaagattttttgaaactgcgatttttttttgttgttaaaaattttaaaggctaacaattagcaacaaaaaaccacttttttgagagcataaacaactgggccggaatggcatttgccgttgttattgaagagccatgcgaagaaatgcacgcacacggngccgagatgaagggacactgctgctgatganagtggtgttncnnggtgtgatgatgatgattaggagca

SEQ ID NO: 43532 - DNA, 1084 bp, Heterodera glycines
  unsure (1)..(1084): unsure at all n locations
atattgaatgggatacgaaaattttatacaataaataatccccacctgccacaaaaaatgaagtaaaaatttttgaaattccccccaagatatttttttgagtttgttaaanaaanngatttngaaaggtaagatttttnatttaantaagttgttcaattttaaaaaatatttnnatgggttaggnattngatttttgtggatgattagagntnttttgagagggattnaggaaattttattatgtnnngaatttntggnttatttaatttagaatttgggnnnagaaaaattntnatganttntnttttttttggtttgttaaagaaagngatttngaaatagtttaaattaagatttttaattanattttttagttgantgattnataaatgaaaagnataaaaattttggagggagtanaaatattaaagnataaaanaattaaaattnnagtaattagtatgaaaaatgttagtttgaaanttgagtaaaaattggaaaatnataataaaaaaagntnttaattttaggaaattagaaagtgttaatnaaatttaaaaatataaatttaatattnattgagtaatttaatgaaaattaaagaaatatagatattntaaaattaaaattaaattaataaaattacaatggtaaaattaaatgaaaaataaaaactataattatatgnnaaatatttttaaatttcagaagatattaaagaatgatattttcaattaatgaaattcgaaaaaaataaaacgaaattacataattatttttgaatatgatagatgaaaaagcacataagagttaataattttagatataaattaatttatttttaattatatgaaatctttaatagagctctaataaatgtgttttataatagactacaaaattcagtcaccggtgctgcttttgctgtggtggttgtggaatggcaagggagtaaaaaatagggaaaaataaataacttagcaaaattaaattgaaaccaattgaaaaaaaataaatgcagttttatttatactaattanattattacaactgctaaataaaaattattctcattatttat

SEQ ID NO: 43533 - DNA, 572 bp, Heterodera glycines
ttttaatgactttaattaattaataaaaaaatgaaaatatctcagtcaaaaaatttttatgtttataataataaattttgttttctctttcgttttcgttttccttttctttttcaacatctcttctttctttctttctttctttcattccgtttaaatttcggcccaacaaataattctttggcaatttttaaattttctcatttcttcagctcattcctctcgtctctttctctgttttaattaactctcgagatttattaaatttaaaaacaaaagcaattaaatttaaatcaaatcaaatttcccccaattcattccctcccccccccctccttctcttctcttttcttggctgccaattcactttttaatcccgtccgttgtcagcacatgatcattcaccttcaccttccttccatcaatccgctcaatgtcacttccgctgaccttcatccgccctctctcccccccctcaccccccctctctctctctctctctctctctctctctccctctttctctgcccataattttaccacctttccctcgtacttccccccctctcccc

SEQ ID NO: 43534 - DNA, 845 bp, Heterodera glycines
taactagccggtgcgtgaaccgttggcattttagctgagaaaaagcgcttcgcgcttcttgagcttcgctacctaggctgtgaagcgattcaaattgattgaatttgttggagagattttttgaatttctaaaaaattattaggggcttttagtccacatcgaggctcaaagtgattagaagaggtaaacagtgattaaaagaggtacaactgtgattagaagaggtacaacagtgattagaagaggtacaactgtgattagaagaggtacaacggtgattaaaagaggtacaacagtgattagaagaggtacagcagtgattagaagaggtacaacagtgattagaagaggtacaacggtgattagaagaggtacaacagtgattagaagaggtacagcagtgattagaagaggtacaacagtgattagaagaggtacaacagtgattagaagaggtacaactgtgattagaagaggtacaacggtgattaaaagaggtacaacagtgattagaagaggtacaacggtgattaaaagaggtacaacagtgattagaagaagtacaacagtgattagaagaggtacagcagtgattagaagaggtacaacagtgatcagaagaggtacaaaagtgattagaagaggtacaacagtgatagaagaggtacaacagtgattagaagaggtacaactgtgattagaagaggtacaacggtgattaaaagaggtacaacagtgattagaagaggtacagcagtgattagaagaggaacaacagtgattagaagaggtacaacggtgattagaagaggtacaacagtgattagaagaggtacagcagtga

SEQ ID NO: 43535 - DNA, 684 bp, Heterodera glycines
  unsure (1)..(684): unsure at all n locations
cccccccccccctccagaccatttcgcaaaaattttggttgaccccccccccccctttttaatgtatggaccggaaatttcggcatacggaaattttagcatttttcggcaccaatcattgcattttttcagtagttgcttcgtgctccggtgccgctgcttcatcatcaacggttggctccatggtggtgtcccatttacaacaacagcaacaacaacatcatgctcaagcagttcagcaacaacagcaatacgttcaacatcatcagcaccatgggacaaatgcggatatgacggctactgctgttgttgttcagtcaccaccaccaccgccttattcggcaggtgttgtttctgttccgtcgcatcaattgccttccgggatgagcggcactgctgcgcatgccgtggccggcggtgccgtgccgattgcgtcaaacgccaccgcagcaatggttcagcaaacgcagcaggtattttctgaaatcaaaatttaacggcccggcctacctgctcgttcgagaggaataggaggcataaacaaactcctcctgaatggctgtgattttgagataaaattggatgtatctgggattttgggaccaatttttattcgatttaggaaattttaatgaaaatttattactaacgtttaaaatcgaacatacatttntttagggggcg

SEQ ID NO: 43536 - DNA, 1323 bp, Heterodera glycines
taaacctaataatccaataagagaaaaaggggacgttaaagcctatttagttaatataagatcaatttacaacaaaattgatgaaatatctttaaatttagtaaataataacatagaaatttgtctgttaactgaaacgtggacaaaggagggaaacccaatcctctttagtccatggataatcgaaaattataactttattttttgtcatagaaaatctcaaaaattaacacgtgggggtggttgcggtgttttaattaagaactaaattgagttttttgttaaattttctgaaacaaaatataattgcgaaattttggtttttcaattacaaaaactaaaatcaattagatttgtgcttgtttatcgaccacccaagacaaaatatagacaaaccaaggaactttttaaatttttagaaacattctatagccataattgtgttgtgttgggtgattttaattttccgaataaagacctggtatggaatgaagggcagcccatttctatgagtaaatttggtgaaattttttgccacttttttagtaagcttacttttttcaatgccacgagtggacccaccaggggaaattcgtggttagacttagttttgccggcaaatgatcaaattgtaaagcaatgtactattgaagatggtgttttttcatcggatcatttagcgcaaattttcacattgtctattccaaaaacactacaaaaaacaaacttcttttacaatcgacggttttttccgtcgaatgtttctctttttaatattatggtttcttctagaattagcgctttatctaacgagcattttagtgtgaacgaaaaatacaacgcctttaataaacattgctagaaaccttaaacgagtgtattccaatgaaaaaaattaccaaaaaagatttgacccctaaatatccaacgcatttattggcctccatcaaagagaaagccagactgtataggcaatgtaaaactgacccaacaaaaaaagcactttatgatagcattagtttatacataaaaatacaaacaaataaatttcacttgcaaattgagaaaaaggctatttcaaagggaagaaattccatttttaaatacctacaaaaatacgatgttaatccctttgaaataccgaatttagtctttgaaaaaaaatgctatcatgatggtgatgaaaaatgtgaattatttgccaacttatttgcaaattcgtttaacaattctgatgttgacccaggctacctaaacttgggcaatacttttgttaatcaatgctttatatcagatatagactttaacatcatcgagacacaa

SEQ ID NO: 43537 - DNA, 851 bp, Heterodera glycines
attattttgtaaaaagtcttgtttttccccaataaacttttcataccccatttttcgcaccgtgaatgttatttttattgaattctgaaccggtttgagtagattagagtacaaaaaattgaaaatttcgaaatcatgtttcccactcccttctaccaggggtattattttgtaaagtctttttttccccaataaacttttcataccccatttttcgcagcgtgaatgttatttttattgaattctgaaccggtttgagtagattagactacaaaaaattgaaaatttcgaaatcatgtttcccactcccttctcccaggggtattattttgtaaaaagtctttttttccccaataaacttttcataccccatttttcgcaccgtgaatgttatttttattgaattctgaaccggtttgagtagattagagtacaaaaaattgaaaatttcgaaatcatgtttcccactcccttctcccaggggtattattttgtaaaaagtctttttttccccaataaacttttcataccccatttttcgcaccgtgaatgttatttttattgaattctgaaccggtttgagtagattagagtacaaaaaattgaaaatttcgaaatcatgtttcccactcccttctcccaggggtattattttgtaaaaagtctttttttcccaataaacttttcataccccatttttcgcaccgtgaatgttatttttattgaattctgaaccggtttgagtagattagaggacaaaaaaattgaaaatttcgaaatcatgtttcccactccccttctcccaggggtattattttgtaaaaagtcttttttttccccaataaactttt

SEQ ID NO: 43538 - DNA, 1216 bp, Heterodera glycines
  unsure (1)..(1216): unsure at all n locations
cgtttatcaactccatacttccgcaacacttatacagtttatttttgagggggtaatgagctgaaattgtaagaattatacaattcttgacaaaccaaaataataaatggaaaattattggcgcttatcgactcgatccttctgcgacgcctatacaatttatatttccatgataatgagctgaaattttgagaatttcaaagtgataatgaaatgtaaatagagaatctcacaatttcagctacttaatctctaaataaatactgcagcaatattgtagaaggatcgggttaataatattctctgatttattattttcgtgaccatccttgtgaaattctcaaaatttcagctaattatcttctaaatataaactctaactgcgttgcggaaatattgagttgatagcgccaataatctccgacttattattttcacgaccatctttgtgaaattttcacattttcagctcattttcctccaaatgtatctgtattaatttgtttaagtaaattgtaaatcggagattattagcgtttatcaactccatacttccgcaacacttatacagtttattttgagggggtaatgagctgaaattgtaagaattatacaagctggccaaaccaaaataataaatggaaaattattggcgcttatcgactcgatccttctgcgacgcctatacaatttatatttccatgataatgagctgaaattttgagaatttcaaagtgctaatgaaatgtaaatagagaatctcacaatttcagctacttaatctctaaataaatactgcagcaatattgtagaaggatcgggttaataatattctctgatttattattttcacgaccatccttgtgaaattctcaaaatttcagctaattatcttctaaatataaactctaactgcgttgcggaaatattgagttgatagcgccaataatctccgacttattattttcacgaccatctttgtgaaattttcacatttcagctcattttcctccaaatgtatctgtaaaaatttgcttaagtaaatgtaaatcggagattattagcgtttatcaactccatacttccgcaacacttatacagtttattttaagggggtaatgagctgnaattgtaagaanttatacagctggccaaaccaaataataaatgggaaattattgncgcttatcgactcgatccttctgcgacgcctata

SEQ ID NO: 43539 - DNA, 746 bp, Heterodera glycines
ttaattctgcgttggatttttgctccccataaatgtttcgtttaccccaaacggacacttgaaaaaatcgatttttttgtttcataaatatttttttcagaaagtgctctaaagcgcaccaaattttatttacaacttaattttagcactctgatgctttagtatcaaaaaggaagatggagaaaaaattttttaaaaaatttttccttatattttggttatatcgttttgcttttggtggggtgcttggaacagtggaatcatgcgcacccgtccgatctggcaagttaagcaacgattgctgactagccaaaaggttcggtgccgtgatgaaacgaaccagcactgcttaccccgcggcacccggcacggtcccccgaaggaatggatttaattaaattctctccttcggggatttttttccattaggtcgtccgttagcgttcgattgctctagtcaatttttcaaaatttttgttgaaatatttgtcgtgctctgaagggcgtaaaggggggggggggggcgaaggcccaccacgaggccgcgaagaggccgagtgagtaccttcggtgcaggaaaattattacattttaaaaattttttaattgctttttaaatatggcaaaaaatgtatgcttaacttttttagtgaaaattcgatcactcatattgtttgctaattgagcagaagcgtagcaaagtttgcagggatactccccggtaaaggactaacttacactgaaat

SEQ ID NO: 43540 - DNA, 991 bp, Heterodera glycines
aaatgtggtgattaattatgcaatatttacatctttcattgcttaattatgctatttttctacccaaaatcgacaacttccaattgttaattttattcaaaagtaagttttacaatgtgtgaccaaaattcaaaacatcaaaattagagttaacaattccttttcctacatatggcctataacatttctgaaggggtcccgacaccactttccctccatctttaatgcttggtctcaggaagttgggatatgtgacgatgattggttcatagtcacccgtcgcagtgaagttcagcacctgctgcttgaatcgtagcgcagtccttggttgttgatgacgtcgtagttcagcgtcatccctcgcaccttcagcacatattcaaactccgcatctgcaggtgcgtacagcctcctcagtttcaaaccatactaaaacaaaagctttaatttacctttgaaaagaataacacattacctgatatacacccccactacagcactccacaatttcatgatcagaaatactcataattatttttgtgcattttgattgcctagatgtaataccaagcatttttttgctgcgatttttatttatttatttatttgtcaataaagaaaaagtccacaaaagggaaaaatccgcttacattgaggacaaaacattaattaaaatgtcctcaagaaagcgcataaacaattaaaaacgagatcgccgccaaaaaataaaatataatgtgagatcaataaaaaataaaaataatgaccaaatcactttttgtttaatgaattaataattcgacttttatttttccggtcaatcttacagaaatgaaatagttttaattttatttttaaattgatttaatgagtttattatttcgataaggtttttatcgagttggttccaaatttttgttacccgccccgcaaaaggtataaattttaaacggtaatttatatttcgagttaagtctataaaagggaatgt

SEQ ID NO: 43541 - DNA, 928 bp, Heterodera glycines
  unsure (1)..(928): unsure at all n locations
gattaaagctatccattgcctgccggttctcggcacagcaangcactaatagggtgttgactcacttcaaaaaataattcattacccaaaagttttttacaaccacttattgccaatctaatttcttgcagatntaaagctatccattgcctgccggttctcggcacagcaaagcactaatagggtgtttgactcacttcaaaaaataattcattacccaaaagttttttacaaccacatattgccaatctaatttcttgcagattgaaagccatccattgcctgccggttctcggcacagcaaagcactaatagggtgtttgactcacttcaaaaaataattcattacccaaaagttttttacaaccacttattgccaatctaatttcttgcagatttaaagctatccattgcctgccggttctcggcacagcaaagcactaatagggtgtttgattcacttcaaaaaataattccatacacaagttttttacaaccacatattgccaatctaatttcttgcagattgaaagccatccattgcctgccggttctcggcacagcaaagcactaatacggtgtttgactaacttcaaaaaataattcattacccaaaagttttttacaaccacttattgccaatataatttcttgcagatttaaagctatccattgcctgccggttctcggcacagcaaagcactaatagggtgtttgactcacttcaaaaaataattcattacccaaaagttttttacaaccacttattgccaatctaatttcttgcagatttaaagctatcaattgcctgccggttctcggcacagcaaagcactaatacggtgtttgactcacttcaaaaaataattccatacccaaaagttttttacaaccaccatattgccaatctaatttcttgcagattgaa

SEQ ID NO: 43542 - DNA, 667 bp, Heterodera glycines
tgttttacatattttttttgcggcttagttctggcccatcctagcccaaaaatagcattttctccgaacaatttttgatttagagcgacttataaaaacataaaaacacatattttggcgttttcgcacataaaaacatatcgcacatatttcggggtttggcaaatattttgcacatattttggcatttttgaaaaaaatatctaagaaaaacacaaaaaatgcacccctaaaaatcaactttcttgccatttttagaggctttttcaaaattttctttatttatttcgtgtaccgaaaatcgaattcttcattaattcgttactggatatcgaagtttcttgctggcacttactcaactgatggaaaaattatctttaaaaacaatttatcaaaaaaggactaattttatccccaaacacctccaaatgttttttatttgcaattgtgcgggcaaaaatgataaagaatgagttttttggaatttttatgcaaaaataccattggtttttccaatttttagcacatattttcgcacatattttggcattttttaacacatatttaggcctttttttggttagcacatattttgggtttttttagcacatattttattacatatttcaggatttttagcacataaaaatcccagccctactcatta

SEQ ID NO: 43543 - DNA, 1208 bp, Heterodera glycines
cacaaatctctcccggcggattattgtcgtattccctctttactcctcctctcggcgccgctccgtctcctccggcgccgtttccgccggaatcggtgccggcggcggtggtctgacccgctcagttagcacttgccgtgccaatttcagagcttaactttaggttatttccctctgatccgtcccaatttactttcaatcacttcgcccaaagcctcgcttaatcctgccatttttttcacttcactttcctccaaattaagctcctccatccgctttttgaactcctcttcaattccctgctcgtccattttcggcttgcccagcatttcttcccaatcgctgctcaacagaatttccgtggcctttgccaccgcattttgcacttgcgtcgcttctttggcacttatcagacgctttttgtccgctaccagaaaatagtttctaggttcacaacaagctaattagttgattaattgactaattatataagaagtttatttggatcaggggatcaatacaccaattatcggctgaacataccgtgataaacctgtcaaatgaacaaattgtacacctttttattttctgcccgtattttcacgttgttttgccatttccgatcgcattttgagccctttgtaatccaccaatgaagccgcatccgttttgatctcctcaattttgcgaatatattccgagtcaaatccttcaaagtccgaaggggtgccgaataagttcagatcagcttttccgtccaattccgccagcttttcccacagcgttttcggctttccgttgatcagtgacgtttttctttgcacaattatgtcaaaatcattgtttaattctgaaaagcacagcccaattggcattttgctttcccagctgacttttgatggcttcttccattctcttcctcagcccaaaatgtctttttaaatggtcgttcctggtaattcgttcggccctttcgaggtattgtcggtccaaatcgagtatattttgcggttccatcctcaacccgaaagtgtccaaatcgtacaccgtttgttccaccaatgccattgctttgatgccattttccaccaatttgtattcggccatgtctttgctcagctcaacataggccatgttaatccctgaatagtttagccattcaatgcacaagaggacaaatgatcattcacttctcagtgtgattagtc

SEQ ID NO: 43544 - DNA, 1529 bp, Heterodera glycines
tttttgggccatttcagcgccggccgaaatacctcgccggggtttgaccggaggaggtcggtgtaagcggcttttttgtacagctcgacgagctctatccaaccatgtttttggatttctgaaattttcagaaaattttcgagctaggccccctcaaaaattttccgtttttgaattttatgattttttacagatttttccggggaaaacggagaccactttcaagcaaccgtttttcatgctctatcgattggtgtcattttcagaaaaatttttcaaaaattttttggaaatagaaaaattttggttgctaggcctcaatttcagttctggcgcaataactcgtcaggagttgattttatcaaagaatcgtctaagagcttttttgtagagaattttaagcccaatctaatgtgctttatctcatgtttttaccatgagtttaaaaaaagttataaaattaattgtgattttgaaactcaaaaccataggggggaccccatggttttgcatttcatgaaaaatttttttactcctaaattagccaaaatgcatttttatggcataatttgaggtgctgaatacgtatatacgctttatattgcgttttggattttttggaaggtgattaaaattttttgaaaaatcgtcaaaatttgagccccggaaaatccagtgaaatttcgaaaattcataactctcttcgtttttgatcaaatttagtgaaataaagtttgaaaaatagagaaaaatcaggagaattttatgagatttatttggaatttctatcttccaaaataaaaaagttgttccagaatttctggaaaaattcgatttttcagaataaaattcagaactcggttctgaaaaagtattttataaaaatgatatactcaaaaaatccgcaattttttgctctattttataaattttaatttagctttttatcacttttttgaaaaaagttatagaaataaaagtgatttttgcattcgggaccaaaggggtgtgaccatgatttttgagtggaaaaattttttctccaaaaatcctccaaaaacatgtctttaggggttatttgggccgctgatcacgaatatgtaatcagattttactttagacatggttaagacctcagaatccccgtgttattggggattctgaggggtgggagcgccgtcctgaggccgcgaagcggccgaatatccccaaaaaaattaaaagacgggcgcgaagcgcccgtcttgaggccgcgaagcggccgaatgtcccctaaaaaatttaaaaaagggcgcgaagcgcccgtcctgaggccgcgaagcggccgaatgttctcaacaaaattaaaaacgggcgcgaagcgcaagtcctgaggccgcgaagcggccgaatgttccccacaaaattaaaaaacgggcgcgaagcgcccgtcctgaggccgcgaagcggacgaatgttctcaacaaaattaaaaacgggcgcgaagcgaccgtcctgaggccgccaagcgtccgaatgtgccctaaaaa

SEQ ID NO: 43545 - DNA, 1120 bp, Heterodera glycines
agtctcctattatattatttgttttactcaactttcgcagtcggtggggggggggggggcgaaggcccaccacgaggccgcgaagaggccgagtgagtaccttcggtgcaggaaaattattaaattttaaaaattttttaattgctttttaaatatgccaaaaaatgtaggcttaacttttttagtgaaaattcgatcactcatattttttgctaattgagcagaagcgtaccaaactttgcagggatactccccggtaaaggactaacttacactgaaatgagcgccgagctagctggctcaaaaaaattttcgaaaatctgagtctttcgtttttatttattttttgcaaaattaattcttaaatattttttcagaaagggttctgaaacgcaccagatttttatttacatgttagtttaggcactctgattgctttttctatcaaaaagggagatgaataaaattttttaaaaaatttttaattcctttttaaacaggccaaaaagtttaggcttaacttttttttcagaaactgatcagaagcgcaccaaactttgcagggatactgaaaggaagagaaataacctattttaaatattatctagtcagttcatttaaataatttttatccaaaaatttaattctgcgttggagttttgctccccataattgtttgagtaccccaaacggacacttgaaaaaatcgatttttttgttttcggggcagtccccccgaaccgatgcgcccagatttatggggagaccgaatccttccggaatagcttccctatagcctgtactttaattctgcgttggatttttgctccccataattgtttgagtaccccaaacggacacttgaaaaaatcgatttatttttgttttcggggcagtccccccgaaccgatgcgcccagatttatggggagaccgaatccttcgggaatagcttccctatagcctgtactttaattctgcgttggatttttgctccccataattgtttgagtaccccaaacgaacacttgaaaaaatcgatttatttttgttttcggggcagtccccccgaaccgatgcgccacagatttatggggagaccgaatccttcgggaatagct

SEQ ID NO: 43546 - DNA, 420 bp, Heterodera glycines
aaatgagcttgggaagaccccacattccacattatcaaggcgttggatctcgaaaattaactaataataataatgattataacaaattgccaaatttcatcactatacatcacaaatcgttacatagaataaactagagtgccacgggaccgggacctggaagcggacaactgagtaccaaggtcccggttttgaccgggaccgggactagtcccggttttttcccggttttcccagcctaaaattcccggtttttcaaaccgaaaaggtaacggtatagtgtatgcgataaaaatccggcaacgagccttacaaatctttcaaaaaaattgaatgcaattaaaataattaaattagatttattgaaattttttaacttatttattattagctttttaataatttatcacattctttttt

SEQ ID NO: 43547 - DNA, 1459 bp, Heterodera glycines
aaatattctacgacaacaaattggtcacttatcagttgacgaaaaacattcacttgcgccaaataataaaccaacaaaatggtaagaaaacgaacagacatttccgtccctaataataatgtacgaatttcggctgatctctcctctggtcctttgtcctcaaaacaaaaatttctgatcgatggtccgcttgtgctcatcgatacggtgagctatcgcagagacatttcgggatatttcgaaattggaaagcccacttttcgcactgagttgaagcattttcgcataatttgtaaattctcagcaattttataaagtagaatcattcccgattaaggacaaaggcatttctgacagtaaatggcagaaagtctacagcttgttcaagttgtggtatcccctctctttccgcgagggtcagaatgagcacacgcactccttccacaacattggttggtttcccattcttttcaatttaactttttgcttaaggcgaggctttctgtgccgtccttcacctccacgcgttgaatttattcggcggtttggatttgtcgaaaatcggttgtattacgccgtactcggcacaggcggaaaagattcaaaagttaatggccatgggaagggacgagggaccacgcttcgaagtcagctctgtcgacgccttccaagggcagcagcgagaagccattgtgatgtcattggtgcgcaacaacaaaatgcgcgacatcggtttcctgagagaacaccgtcggacaaatgtgagccattctgacgggtaaacccaaccaacggctttcaaaaaaggtggcaattactcgcgccaaacgccaattccttttgatcgcctcttcacgaatgttgaatgtggaccggcttcttagagaactgtacggtgtaatcagaaaggatggcctggtggtggggcccgacgctttgctgccaattgctcatgaaatttggcagtgtcatttggaaaggaagtcgtcgaatgctttatctatcgcttcttagtaattttttaatttcatgcattgtttatatatagtttgctcaataaacaaaatgccaaaacagtgtttgtgcttctccatttgatctgttccttatcctctgcacagactgaactccgtttcatagtcgtagacgaactgctcggcgatggtgcgatcggcgccgcttattttgatctttcctttgagttcgtcgacgtgggtggcgattgggtggcccaatcgcttttcacaatacgcgcgaaggtccctctcgcacgccttttgaaggggggggggggggacattggaccaggggaagtaacaaattgcaagacaaatctcacaaatacgtcgccgtcgatgcccgtcagaatgaccaattccacatattcgaagtccattgtctttgggttcagttcgtcgcgtcgccgttccaaaaaaatgctaggcaaatggttggcctt

SEQ ID NO: 43548 - DNA, 949 bp, Heterodera glycines
  unsure (1)..(949): unsure at all n locations
ttattaaaaagttgcaacatgaacactaccaaaaagtcagaatttttgcatattttaatttataacttttttatatgtcggtacatctttgtgattttggacagccgatagagcttgttaagagctttcgaatgataccaacattgttggatttggtcaacaaagaaaaaagttatgatgctctaaacttggctcagacgcaactggcccgtttcgacccccagcccctctctctctctctttctcctctctctctctctctctctctttcttctctctctttctctcccctttttttaaactttgaacaaacttatggccaaaagtacacaaggaaccaggtttccaaacatttttagtcataaattttgaaacttaacgaaatttttttaaactttgcaggctagtagaaaacacctagggctatcgaatgaagcgataaataaaaaatatacagtttatatttcaaattttttcatgagaaaaagtgagtgaactcatgaactcggcacggaacagattcttactatttaaaatgctaagcatattatactgatcagtagggagtaaaattatatggaaatccatatttttttcctggactctgggaggcctgaaacgtacgaaaagcatgtttttagcttggtttgaagcttctaggatggatttctatatccatattttccatatttttccatatttcgcgatttattccatatttccatatttgtccatttccatatttgtccatattttgtcatttttatccatattttatgtccatattttggcattttttcaaaaaacctctattagaactgcccccaacagataaattggctttttgaccccgaaaaccggaaaatttttcaaaaaatcagtttttagcaaaatttttttgaaaacttgaatggattgaaattttattaaaaattngtaaatttatatc

SEQ ID NO: 43549 - DNA, 1286 bp, Heterodera glycines
tgcgtttcagaaccctttctgaaaaaatatttaagactttattttgcaaaaaataaataaaaacgaaagactcagattttcgaaaatttttttgagccagctagctcggcgctcatttcagtgtaagttagtcctttaccggggagtatccctgcaaagtttggtacgcttctgctcaattagcaaaaaatatgagtgatcgaattttcactaaaaaagttaagcctacattttttggcatatttaaaaagcaactaaaaaatttttaaaatttaataattttcctgcaccgaaggtactcactcggcctcttcgcaccctcgcggtgggccttcgccccccccgagctttttatcagtctagaacggtgggggatcaaatgcaaaaaataatttaaaaaaaataatactggtgtggtaagtgtgaagaactgtgttcttccaggcaaaaaattctaagaaaatttataagcatttgaagggttctcagcagtttccctgcaaaatttggtgagctttcgatcagtctagaacgttggggatcaaatgcaaaaaataattaaaaaaaaataatactggtgtggtaagtgtgaagaactgtgttcctccaggcaaaaaattctaagaaaatttataagcatttgaagggttctcagcagtttccctgcaaaatttggtgagctttcgatcagtctagaacgttggggatcaaatgcaaaaaataattaaaaaaaaataatactggtgtggtaagtgtgaagaactgtgttcttccaggcaaaaaattctaagaaaatttataagcatttgaagggttctcagcagtttccctgcaaaatttggtgagctttcgatcagtctagaacgttggggatcaaatgcaaaaaataatttaaaaaaaataatactggtgtggtaagtgtgaagaactgtgttcttccaggcaaaaaattctaagaaaatttataagcatttgaagggttctcagcagtttccctgcaaaatttggtgagctttcgatcagtctagaacgttggggatcaaatgcaaaaaataattaaaaaaaaataatactggtgtggtaagtgtgaagaactgtgttcttccaggcaaaaaattctaagaaaatatataagcatttgaagggttctcagcagtttccctgcaaaatttggtgagctttcgatcagtctagaacgttgggtgatcaaatgcaaaaataatatataaaaataatactggtgtggtaagtgtgaagaactgtgttcctcccaggcaaaaattcta

SEQ ID NO: 43550 - DNA, 910 bp, Heterodera glycines
agaaatttttcagggacaaaaaacttatttgaaaaaacccactggaaatctatgtttttttttgaaactatgggggtgaaggacgtagtgctcctcaaaaatccaatgccttccgaactagaaccagaaaaggtggacagggattccaaggctaatcccggttgtcgggaggaccccgtgcaactctattctaaggatttcctctcgtcattcatccacagagcgcaaaaatgttttttcttttcaccgcagaattgccggaaatggaacgcaacaccgacaaaaccaccggcgcaaaaaccatcgccaagaagtgcagcgggaaagcatcagccctggctatgtgtgcttgtccgactcgtggttcatctctacagtggtctccatgtccatggttagcggttgcataatcaaaaacttttttgtcgatttctaaaatttaaattatcgcccgtctgggatttggagaaggaaaacgcggggatttttgaaatggaccaagggacctgattttaggggcattaaaactgaattttctaaaaataaaaattcccatcccaaaaggtctgtctgatgttgtccgcgctgatcgtcatttggggctgccattcgttgcggaaaagcaacgcgccgccggaggctaatggggccaaatgccaaaaatgctaattgagggaatgccaaattaacaaagtgtaccaatgccaaacaaagacactgtttcaaaatgattccaaatttatttttttatatttttgtccatcaactttattttctttacaatttttaatatgtattaaatggaaacggaaaaagagaagtgatttggccaatctcctacatatattttgaaatgaactaaactttaaaagtgccaatcaaatcagaggaatgtaatggaaaaaataaa

SEQ ID NO: 43551 - DNA, 1060 bp, Heterodera glycines
  unsure (1)..(1060): unsure at all n locations
agtgatcagaagaggtacaactgtgatcagaagaggtacaacagtgattagaagaggtacaacagagatcagaagaggtacaacagtgattagaagaggtacaactgtgattagaagaggtacaaaagtgattagaagaggtacaacagtgattagaagaggtacaactgtgattagaagaggtacaaaagtgattagaagaggtacaacagtgattagaagaggtacaacagtgattagaagaggtacaaaagtgattagaagaggtacaaaattgttagaagaggtacaacagtgattagaagaggtacaaaagtgattagaagaggtacaacagtgattagaagagtgatcagaagaggtacaactgtgatcagaagaggtacaaaattgttagaagaggtacaaaagtgattagaagagtgatcagaagaggtacaactgtgatcagaagaggtacaaaattgttagaagaggtacaaaagtgattagaagaggtacaactgtgattgattagaagaggtacaaaaattgaatgcaatttattataaattttaaaaaataaattagtcattccttttattaattaaaaagagaattttgaaatgtacaagaattgaatatttaaattaatatgaaattaatttttataaattcaattaaaaaaaatatgaaattctttattaaaagataattattattttttacataaattcttttattattaatttacaacaaatctttaaatataaattgatacaacagtgattagtaaattcattaaattaaaatgaaaatatttttaacaaatttaattaaaaaaatacatgaaattctatcaattaaaaaaataattaatttaaacttataaaatttatttatcaaaaaaaattaaattaaatataattttttatttattaactcaacaaaatattttaaattaattaaaatcattgaaaataacgtaaaaatgcacaaaaaaataatgttacnccgtccggattcgaacctgcccctagggaaatcaaaatgatgactcagaatccccaacacacaggga

SEQ ID NO: 43552 - DNA, 1266 bp, Heterodera glycines
ataactatttttatgcttaaaaacttgcgaatttgaagtggaaaatttgctgttaatacatttaattctgcttaaggcttacttaaaaaaattgcaacggagcaaaaaaagaaaacatttgtcatttgtggggtatttttcacgtcctttttttaaatttttattcttaattattttttccacaataaaatttatattggaagaggttttgaattaggcaaaagtcattttttgaaaaaattgaaacttaaattgaaaggaatttttttttaacaaaatgagcccaaaaagcattaattaaggtaaaaaacggacataataatacatttttattaagttgaataataccaaatcaaattggattaaggatgaagaaatattagaaatgattttttttaaacagtaacattgcttataaatgaatggcatttgccgcacaaaacaaaggggggaaaagcggcaaatttaaaggggacaaaaaagaaaatgaaagaaatgaataaatgatacggataaactaaacttttcagtggacaaagatgagaagattttgcttagaatgggacggcaaaaccaatggaaatattaattatacaaaaattaatttaatatttatttaaataatatttatttttaagagattgacggcaaaaaaatggaaaataattacaataaaaaattttaatttaaaaataattagcaaatttattttttagcaaagaaaattaaaaagcataaagaaaatgggggtggacctttgtgttgccaaaaatgaaagcgttccgcgcaattaatcaaataaaaaggggtgaccgcgattggccttgggcacccattccaatttgggggacttaaattcagatttaatccatcagataagcgaaaaaacggaaaatggaacgaaaatatggaaaagttgcattttaattaatgaatataaattaaaaaatgaaacaaagcaaaaaaacggattctcaaattgacgccaattaacataaaaaacgaaagttggggaaaagcaaaaaagcattttcccagaaatgataaacattttctaacggttaaacaaacaatggaaaaggaaaaaagaagaacgaatgaacaactgatgatgaatgttcccacaattagtggagaggtcatttatgtaaattaaaaatgtacaaataataaagaataaaacatttttttaaatttattgagaaatgccaaagggttgaaaagtcagttaaaaagtgatcaattacttgggattaacattaccta

SEQ ID NO: 43553 - DNA, 1646 bp, Heterodera glycines
  unsure (1)..(1646): unsure at all n locations
tctctgtcttggcaaagtggccgatgtttatctgatcgacgagcccagcgcgtacttggactccgagcagcgcttacatgcagccaaagtcatcaaacggtgtttttcttttgaatttccatcatttttatttttttgaacttttttctctctatttaagcttcatcctgcacagcaaaaagagtggcttcattgttgagcacgattttatcatgtccacttatttggcggaccgcgtcatcgtttttgacgggtgggaaaagcacagagagatcaattaaattattactactatttaattataattaaattaaatattactattttaattgtccttttttcagacaacccgccataaaagccactgcaaatgcgtaggaatcattttaatatatttttttattgcatttttttcaatttttcttagccctcaaccgctggtgaacggaatgaaccgttttctgagccaactgaacatcactttccgaagggacaacgaaagtcatcggccgagaataaacaaattgaattcgcaggtgcacaaattaattgagactaattaatttggttttatttgtccttttcagctcgacgtggaccaaaagacgagtcaaaattacttttatttggacaattgaattaccattttctctgttgttcttgtttttttggttgctgttcaattgcgccgttttgttgataatattaccatatttttaacttcttaaaagtgcataaatgtgaatggatttggcttacaattcgcgtgccaaatacattttcatgaaaaaagtgattaaaatttatccgaaactccaccaaatctttccatttctccgcctcttttttatccaaattttttaaaatttgtcactttcgcctgcgatggtttcgtctgttttctctgtgcccactcttttccgtcctttttatcttcctctactctatcttctctctttccttctctgctgctctctctctcttccccactttttcccctccccgtcacttttctctccgtccgtttcttttgtccatctgcagaaattgcacaaatatttaaatttacagaatttttggcgggtcttctttcatttttggtggactttttggcttcttaattcgatgcaccccaaaacgtcgtcggaagactttttggaccataactttgttcattgtcaatcaaattaagcattgttggtgttgttcgatagctctgtgtgtttattattaatttgctaattttcaaaaattttcattaagtttcaaaaaagttaaaagacaaatttttaatattacagttaaattttattttttaaaaaaaaatttcaaaaaaaaagatttttaagagtaaatcggtattttttttgaggaattttggaaaatccaccaagattctgtcatattttgtgaaaattgccaacaatcattttataatgttctaaaaattataaaatgtgcaacaataaatggcaaatcagaatctcaattaaaaaaacttttgtacttcatttgnggaataaaaaccccaaagaaatatataanattgatggaaatataatnaaatgttgtggatacaattaaggatttaggcataaatattgataatanattgcaattttccaatcatgtcacacaaataataa

SEQ ID NO: 43554 - DNA, 1463 bp, Heterodera glycines
ttttgccagtgtagcgcgcgtgcagccccggacatctaagggcatcacagacctgttattgctcaatttcgtgcggctgaacaccgaaaatccctctaagaagttgtgcccacagaagcaatgagccaactatttagtaggctagagtctcgctcgttatcggaataaaccagacaaatcgctccacgaactaagaacggccatgcaccaccatccaccgaatcatgaaaaagctatcaatctgtcaatccttacggtgtccgggccgggtgagtttccccgtgttgagtcaaattaagccgcaggctccactcctggtggtgcccttccgtcaattcctttaagtttcagctttgcaaccatacttcccccggaaccggaagactttcgtttccgggaagctccccaccagggcgaataaatccgccggcggatcgctagttggcatcgtttacggtcagaactagggcggtatctgatcgccttcgaacctctgactttcgttcttgattaatgaagacattcttgccaaatgctttcgctgtagtccgtcttgctacggtccaagaatttcacctctcacgtagcaatacgaatggccccgtttgtctctgttaaccattatctcggtcagcaaaaccaataaaatcggaccgaaatcctcttctattattccatgcacgaacattcaagcgaaacgcctgtttgaagcactctgatttgttcaaagtaaactcgccagcccaccgacgccgaccggtaaaggtcaacgccggggagagaccggcagaaaagccaaccaaaccagtaacacacaaagtgtgcaccggacgggctagcacagattcaacttcgagctttttaaccgcagcaataatttttatgcattttgagagctggaattaccgcggctactggcaccagacttgtcctgtcatggatactcgttaaagggtctcaattgtacgcattccgatgaccggcctcataagagatcggtctcgttatttctcgtcaatacctcctcgcgttgagagggggtaatttgcgcgcctgctgccatccttagacgtagtgaacatttctcaggccccttctccggagtcgaacccttatcctccgttacccgtcatcgccatggtagtcagatacactaccatcgaaagttgataagacagacacttgaaagacacgtctccggtacaagaccgtgcgatcagcttagttgttctgagtcaacactggacgcccggagggcgcttggttttgtggcgaacaaatgcactccgctctggggagattggagctttggtgcatgtattagctctagaattaccacagttatccaagtaagaagtcaaggtcaagtaaattatagctggtgtaatgagccgtacgcagtttccctgtctggcaggttaaacttacacatgcatggcgtaatctttgaaatgaacacatca

SEQ ID NO: 43555 - DNA, 1232 bp, Heterodera glycines
tgttttaaattttgtacattaatttgacataattttcaataaacaaatggtccatttttgacagcatatgagccacatcagtcccgtacgatttcttgaactcaacagctaagcgcagtctctttaacaaacttgaatatattgtattaattaaatgatcaaatttgtgctcattaggtatgtgatttttaggcaaatgccaaagatttttgggcatttttgcgtcgtgataatcacgaaaaacgagtttaagcagtttgaagcttatagggtgctttttataatgctttttactcgtttaggaattttttgtgaatgccaggcgcctatttttgtgcctattttgtcatttttaacatattttccagactttccgaaaacaaattctttaacaaaacgaaataaaaaataaataaagcctagaaaacagacccaaaaaaattcactcaagaactgaaaaaatttctcattaggtcaccagtaaaacttccaaatttagtggtataaaattaccaataatatttaagataggatgcttctttgaaatatagcctaacaaacagcaaatatttttttttcacttttcaggcagatcccgataagctcaaaaaaacaaattaggataaaaagattagccctaaggatcacagattgactcacttggcagtagataatattcccaatcaaattatcgatcgaaaatcaatcgataatttgattgggaatattatctactcttggctgttgctgactgagcaaatgatggctgtaatctctttctaaattaatattaaaaattttcattttctacattataaaattaatataaaaaaattcattttctaaaaaaaaattacttaaaaactttattttctttttttaataccatcttgttattcataatggccgggtataatttttccacttccttttctgcgttgaatccgggcttttccacgattgttggcccatgaaatgccaaacatgttgcgacaagaagaacaacagcgatcagaagctgagtgatcgacagaattttatagctcattgacctttttattaattaaaaaaaattaaattttaatgcaaattaaatttaagaaaaaagaaaagaaaatgaatgcccttttttagaaatatgtgactatttaaatgattgatttgaatcatgctttttcgtcgaattgttgaaaagctcgtcattgtgagcatgaaaatgccctttctaaaat

SEQ ID NO: 43556 - DNA, 1542 bp, Heterodera glycines
  unsure (1)..(1542): unsure at all n locations
ttgtattaaaataaccttatgtataccatttcttcgaataaacctaataccgtatttccattncctgaaatagagccgccgggggctttatttttcaactaccttcaaaagggtgattaagagggggggggggcactaattcaggagggtgaggggctgtataattaggaaatacggcaaagttggcattagagatcggcacgggatggaatttcgcacggcttttacattgtttttaatgatctctaattggcatcatttaatagccctcagtattatttctcctttaattgcacaacatttttttttaattgttcacttcatcaatgccggcggtggtgaaggcggttgtcgttttgcggcatataataaatgtgctgactcatccctaaaattcaaaacaattcaagcagtgtaaatatattttatctttttatccgtttcaatccgattaatttttgttggggtttggtcagcaatggtaaaaaaaaatatatggcatcttaaacttggctgagagatcgaggaattgacccatgccacggcacgaaactcagtgggatttttctcgaccctgataaacatgttaaatttctggcttttgatgccacaaaatgcccaaaaaggcattaaatgccaaaaaatatgtatatccaatttatatgccaacaacaatttacctgacagggggcacgcgagtttggtaaatgcacaggtagaggccgagcagtgcacagaacactgatgggatgacgaacgcgcacagcacaaaccacattttttattttatgaagaattttaaatttgattaaaaaatataaatttaaaagaatttaaaaatattttattggctcaaaattttatgttgctcaatgatcatgagcaaaagttaataattggattcatttagattaagaaaaaaattaattggttaatattacagaaaatggagcagcaggtgttttacataattcttaaaatgattttcagttaattgtttgatacaaaaaaataaaaaattcaaaaaccaattaaaaacaggtgagaattcttttaattgggtttgctttataaatatatatttctaataatattaaaaattaaaaaaaaaatattttaatatcacaaaaaattcccgtgttttttccgagtataaattccaatgttcgtcctcataaaactgaatttgtttcactcatcattttaagcgaggcttttcccgctaaatttcatttggccaaatgacaaaaaatgtccattttaaaagtgactcgatttagaaaaaaaatgtgcgttaaattttattaccaaaaaagggaaaattgaattgaacgaaagaacaatttaaattgggcataaaatttaaaattaaatttttttttgaaaattcagtctttcaacagttcaacttttgcaacgcgttacagcaccggtggtcgctgtttttcaacgattccatcaacgacaagcaaattggcttaatggaaaggaaacaaaatttattatttatttttanaaaaatagaattanattttanataat

SEQ ID NO: 43557 - DNA, 1026 bp, Heterodera glycines
aagggaggggggagaggtgagggagggcagatgtcctgccagggtgttgagttcggcatcaatgacggagttatctcgtatatataaagacagctcgtaaattatttaggttagatttaggcaggcttgttcgtcctagctcttaggcttaagcttaagggctatattttgtaaaatgcgagttgccttttgtacgagttgccctggaccaccccccccccccgctctctctctcgcctctctctctcgcctctctctctcgctctctctctctctccccctctctctccccctctctctctctacattctctagttccccttttgctttttactttttcccttctaatttcgtcccgtcgtcattttcaggaaattctcgactcctgctcgctgatagaaaacccttccgaagcgaaaaagtgccgtgatggagtgaccgatgccaaagtggcgagactgaggaaggaaggaacggaggaaatgtgcgtggcggagggattttgcggaaagggcgagatgaaagagttggagaagaagatggagcggatggagaagagaatcgacgacacgaagcaaaagttcgagaagggcctgagcattattccgccggttgactcgaacccggtagactcagacacagggatcaaaatggataacaagtgaaatagcttgaaaatgagccctcaagcacacaatttcgatttttgaagccctgtacctctagaagaaagcaaaatgctactctaaacttaaaaattcacactagaagtcgaccctgctctatccaatgatatgtcatttatacgcattttcctagttacagctcggaatgttcccttgtaagtataattccaacgaaacattcacaattcgaaatatttccttgtgaacagcgccagcataataaaaaattagcggtaactgactttggagaaaatgaaattgtgaaatattcgaacgcagtcgacgtaattctgaaaagtgatggcccattttaagacggatgactgtgatttttatttgg

SEQ ID NO: 43558 - DNA, 773 bp, Heterodera glycines
ttgctcggatccatcaattccttaattgtccataattgtgatcaattaagggaaagtttaattgtcactcacagcaaacgaaatgaaacaatatccccagctgttctgtttactgtcaaaaacatggtcatcgaatactcttctgaaatccgccacatcgctcttttgagagacaattcgaaaaattgccgaacatttgcaactccaattttctgctcaatgtaaaattaatcaattgttgttaatctatatttaattgcaccttcttttggagcatcacaccaaaggtaaaagcccaagcatttctcattgccagtgctttcattgttcttttctatttttgtccatattttccatggcaatcctttgatgtgcacagttttgcttttacgttcactcaaaaagatttctcgagaaaattccgacactttttcaatttccatcgaaattgtcccagtcgatttgcgttgatccaaagtgaatttttcgacttttggttcatcatcagttatgacatcaatggccaatgtcactttgtctttgcttttatcataaaatccattattcgggtccattaattccttaattgcccataattgatcaattaagaaaacagattaattgaactcaccgcaaacgaaatgaaattttgaatccccagccgttcaatttgttgttaaaaacgcggtcacaaagtgtgccagtggaattctcagcccctttattttgcgagacaattcgaaaatttgccgaacgaacgcagcattgccatt

SEQ ID NO: 43559 - DNA, 1357 bp, Heterodera glycines
gatgcccttgcaaaatctggtgcgcttctgatcagtttaataaaaaaaagttaagcctaaactttttggcatgtttaaaaagaccgaggttcgatgaagttttggtaagccaaaaaaaaatccaaacatttaaaaatctataaaaaatttaaaaatgagaattcatgcgagattttctggaaataagcttaatagggcctagttaagctgtaaaaaaaatttggggcgatttgaaagagaatagaaagaaccaggttcgatgaagttttggtaagccaaaaaaaatccaaacatttaaaaatctataaaaaatttaaaaatgagaattcatgcgagattttctggaaataagcttaatagggcctagttaagctgtaaaaaaaatttggggcgatttgaaagagaatagaaagaaccaggttcgatgaagttttggtaagccaaaaaaaatccaaacatttaaaaatctattaaaaaaataaaatagtgaagttttaaaaattaataaaaatttttaaataaagagttactggcgttagcatcatagcggtgcttttccttgtctttttgatgcccttgcaaaatctggtgcgcttctgatcaggttatataaaaaaagttaagcctaaactttttggcatatttaaaaagcaattaaaaattttttaaatttttattcatctccttttttgatagtgaaagcatctgagagcctaaaataacttgtaaataaaatttggttcgtttcaaagcagtttctgaaaaaatatttatgaattaattttgctaaaaaaataaaatagtgaagctttaaaaattaataaaaaaaatttaaactacgaattactggagttagcatcatagcggtgcttttccttgtctttttgatgccctcgataaatctggtgcgcttctgctcagtttataaaaaaaagttgagcctaaaatttttcgcatatttaaaaagcaattaaaaatttttttaatttttattcatctccttttttgatagtgaaagcatctgagagcctaaaataacttgtaaataaaatttggttcgtttcaaagcagtttctgaaaaatatttatgaattaattttgctaaaaaaataaaatagtgaatctttaaaaattaataaaaaaaattttaaactacgaattactggagttagcatcatagcggtgcttttccttgtctttttgatgccctctataaaattggtgcgcttctgctcagtttataaaaaaaagttgagcctaaaatttttcgcatatttaaaaagcaattaaaaattttttaaatttttattcatctaaatgtttgatagtgaaagcatctgagtgcctaaaataactt

SEQ ID NO: 43560 - DNA, 1021 bp, Heterodera glycines
agtttgattgtgaaaattttggaaaaacgccctatttctttttctgctcaacactctagacaattccaaccccatttacggaatgatagcgccaaccctaattttccggaatttctttctgggcgagtttgattgtgaaaatttgggaaaaacgcctatctctttttctgctcaacactctagacaattccaaccccatttacggaataatagcgccaaccctaatttttccggaatttctttctgggcgagtttgattgtgaaaattttggaaaaacgcctatctctttttctgctcaacactctagacaattccaaccccatttacggaataatagcgccaaccctaatttttccggaatttctttctgggcgagtttgattgtgaaaattttggaaaaacgcctatctctttttctgctcaacactcaaaacaactccaaccccatttacggaataatagcgacaaccctaatttttccggaatttctttctgggcgagtttggctctgaaaattttgaaaaaacgcctatctctttttctgctcaacactctacacaattccaaccacattttcggaatagtagcgacgaccctaatttttctggaacactctagacaattccaaccccatttacggaatgatagcgccaaccctaatttttccggaatttctttctgggcgagtttgattgtgaaaattttggaaaaacgcctctctttttctgctcaacactctagacaattccaaccccatttacggaatgatagcgccaaccctaatttttccggaatttctttctgggcgagtttgattgtgaaaattttggaaaaacgcctatctctttttctgctcaacactctagacaattccaaccccatttacggaataatagcgccaaccctaatttttccggaatttctttctgggcgagtttgattgtgaaaattttggaaaaacgcctatctctttttctgcaaagcactctagacaattccaaccccatttacggaatgata

SEQ ID NO: 43561 - DNA, 1095 bp, Heterodera glycines
gctatttttttcggtaatacgtatttagggaccatcaatgatggctcgatgttcactgcctcaaaacaagtttttttataactttgtaagttcacagaggcgcttgtctaggagtttccttttacatcaaaaaattttccaccccctacccaacagattttttttttgaatgggtgggttttttggcagcgcctgacgccaaaatgataaattgcactttttgcgtgtaaaaaatccattaaaatttgtttggcttttttcgaccattttgtctaatttagaaaaaaaaaattttccttttcctttaccccctcccatcattgctttgtcctgtgcaaactcaccaatttgtactccggctcccatgtgtcctccgtttcgtcaaagccttcccagcggacccggtactcccagcgccgcttttggaaccgcttcccgcacaacatctccacgttgaacatgccgggcggtagcggggacgagtcccaggcgcggaaacggctctccgcttccgtctcacagaccgtttcgtcccacttctgattccaacccttaaaacaaacaattttcattattgcaaaaaactgcccaaaaatatcaaaaatgaaaagtttgcctttttcaaaaaaaaaaaaaaatttttttctccccgcccccaaaaaatgtgtgtaaatttgggggatttatcataaaattggcagccacttacaacgtagtgaattctgtaaaaggtcactccattgttgtgccatttgtacgtaatctttgcctcgtattcaatcgcttgatgaagacatcggatccgttcgccaatttcccactcacttcccttctttgtacactgaaaaattgaaaaaggttttttatttatttatttttgggcattaggcattacccaaaatgtaaccccaaaaaatttgggggaaaaaaaatcttgacaaaatacctaaatgttaaattttaaaaatgtaaaaactctcaatcattcagaaattccgactccaacgaatgggaaaaaatatatatttttcgaattattcaaccttcattaatgatagcacttttcgccaatcccatgccaaacaacaaatgcca

SEQ ID NO: 43562 - DNA, 775 bp, Heterodera glycines
gaatttacaaataaaaaggcccaccctttgatttttgtaaaaaaaaagggcaacaaattcgatacaaatgccaaaatgagcaacataaaaaaagtaatttacaagacgggtagtaaaatttattttttttttttgtacaaaaattgccgaagaaatgccacatcacaaaaaaaacacaggcaaatcccttagaagtgaatgattaagtcctggcaaaaatttgccacattttactcttttaaatttaatttggctccgcaattcttcaaaatttaacccacaaaaaaacttaaaatttattcattttatggtcaaaatttactgaagtgccttccttctccaaaaatttttgaaaaaatgtgccgtaaaaaatgccaaatatttattaattaaaaaatctaaatttggggtcaaaatcagaattccaaagccgttctggcgaattaaaaaaacggcagaactttgcatccgattttaaataaatcccataaaaccagtgccaaaattggctgccaataacagaaaatcacacccaaaattcgtgctggtcattgcccgcggcggctgtggcggtgtcattggcattgtcgccacttttcaccgccgtcggcgcggccccgggcgatgccaacgacgtgggggaggaggcggacgacgacgacggcaccgccgctgcggcagccggcgagaaaatcaaatggtgcccgatcagtgccaaagagcccttctgcggtggccgagggccctcgcacagaaacacgtcgtccacccgaca

SEQ ID NO: 43563 - DNA, 789 bp, Heterodera glycines
tttagccttatatataattcttgtcgtggaatttgataccagctccccgacttttttcccagatagtaggggaataaccctagataactcgttcaattggatagcatttcgagatcccaaaaattttcggaaaggaaaaccgaaattccatggcacaaaaattacgggaatctgatgttggaaattgggatttcgtgcagatattgatctttgaatatggacctccaaattgataaaaatgagtactctgggattattttctctaaaattttattttaaaaaacgacaattattgggtttttcaataagtaaaaataacattaaatgaaaaaggcatccgatcaaatttttaaaattcaaaaattaattacatatgtaaaacgtaagattttttcgaaaaaaatcctccaaaatcacacacaaaatttataattaactgacaaatgaaggaataaaaataaagtgaagaaaatgtatgtggattgtgctatttatatacaaagatgggcaatggtcaagaattggtgtctcgacgaaaaaaaatgttaaaaatttcggaggtattttttctaggcttaaaaaattcgctgatcacgaatctgaactcagattttgaaaatcactgatttttatctaagatttttcatcaactacttgattttttttcgatttttaaattatatttaaaaaaagtttagcaattaatttggggttaaaaaatattctgatcatgattctagatctgattatgcatgaatcttcatgttatctattatttttcatcaagtg

SEQ ID NO: 43564 - DNA, 1458 bp, Heterodera glycines
gtcccggtcgaaaaacttggtccaggtcccggtcgaaaaacttggtaccggtcccggtcgaaaaacttggtaccggtcccggtcgaaagacttggtcccggtcgaaaaacttggtcccggtcccggtcgaaaaacttggtcccggtcccggtcgaaaaacttggtaccggtcccggtcgaaagacttggtcccggtcgaaaaacttggtcccggtcccggtcgaaagacttggtcccggtcgaaaaacttggtaccgttcccggtcgaaaaacttggtaccggtcccggtcgaaaaacttggtcccggtcccgttcgaaaaacttggcccatgtcccggtcgaaaaacttggtaccggtcccggtcgaaaaacttgatcccggtcgaaaaacttggtgccggtccctgtcgaaaaacttggtaccgttcccggtcgaaaaacttgaaaaataatttttaatagaaccttaatgaacaacacaacacaaactgcagtttgcacccttaaactacaacaacattctattggtatatcttatatttttaccaaaaaagtcattcttaagggtgtaaatattttcgtctttttttcgtccaaatttcgcctgacgaacacaaaatgaaaaaacaaaattttgaaaaaccgaagacgaaacgaaaacaaaacgaaatttcgtccatccctggtgggatgagtgaaaatttattattaatttattatgccaataaaataggatcatttgctaaaatcacccgctaaaaattaaattttaatattgaaatttttctgatttggtctcgagtgtcggtctcgggttttcatttcgctctcaaatttcgagagctaatagggaaaatggctcttttttcaatttttaagccaaaaccagggatggcacggaatcccgatttccgacatttttggggtcgaagtccgattttcgaaaaaattttggacgtcggaattttttgtaaaaaaaaattcaaaaattttaaatttcccaaaaaagaagaccttttcatttctttccttcgttattcaacattaatttattccgcgctaattatctccaaatgcattaattatcattttttatcactcaattgtcctctttaataagggcatttctctttcggcacgcattttttcgtctttttgtctcgcagcaatcccggcacacagtcgcatgagcattcacatgccattttggtgcacacctccggtttccgattgtcacaactcggctcacatccgttacaactcaattggcctggctgctcattttcgggacactgaattaattggaaattgaaattaaaaattaaattattcaatttatatttataatttcactcactttgcaacttggtttataagcagcaataaatggcgcaacaattaaaaagaagaagaaaatattgttgaacattataattattataatcttgagaaataat

SEQ ID NO: 43565 - DNA, 1239 bp, Heterodera glycines
cccccccaaattcccccaaaaatgcgattgcgttttgcgcattccctcccaaaatttgcccactgcgctttttcttcgtccccgctgatcagcgtttgattatattcatttccaagttcccatcaacacacatttatgtaagcattccgacaaaacgaacacacacatttattatctgtcagatttgaaaaataaaaatttattttgttggccaaatcacaaatgactttaattagtgttgtgttttttcatttgtatttattttttcatttggtaattaattgcaaatcttcaagttttcttttctcttcacaaacattcaaatgacaaatgtcccatcagaagatcaaaggaaaattataataaataagaaaaatattaatattttcaagggttttccatttcggagttcacaacagtgaaaaaaaacaatgggaaaattaaaggacaattaagaggcgaaataaatacacggcaattaatggatgagtcagaacaaattgtgccaattttaacaccgatcatttgtcaacattggcgctgaatgacattcggtttcgtacagcgttttgttttgttcgcattcccccccccccccccctctcccaattcccccgtttcgtctccttttgccatttattacacctttcgcgtccattcctccaattttcgtcttcatcaccacaaattctcccaaaccgccataaccgccgctgccatttgtaccaattgcttctaattggccctcttaacattccctaattcatccgttaatgagttgttggtttttcttctctttcttccgttcttccatcatctttcctctgtcgctttgtccattttcccccttttctctccgttttaccattttcctcccccccctctccctctttctctcctcctcctcctccttttctccccgccccctctctttgccttcccaaattcactcatccgttcatttcttcccatattaggcaaactctgcttgctcctaaatgcgcattttgtgttgtcaatgttttggccatttcttttcttttttgctttcttatatttttcctttttatccgttcaaatgcttttaattttgtgcttaatctcttaaaatctctcctccttttatgctttttgttttcaattatcaattaagtccttcgcattctttgccttttcttctgctgcgaagtcacagtttgccttcttggcgttttgtctctctgctgcctttctgttttc

SEQ ID NO: 43566 - DNA, 997 bp, Heterodera glycines
ttagggtcgtcgctactattccgaaaatgtggttggaattcatgtgagtgttgagcagaaaaagagatagacgttttttcaaaattttcagagccaaactcgcccagaaagaaaatccagaaaaattagggtcgtcgctactattccgaaaatgtggttggaattcatgtgagtgttgagcagaaaaagagatagacgttttttcaaaattttcagagccaaactcgcccagaaagaaaatccagaaaaattagggtcgtcgctactattccgaaaatgtggttggaattcatgtgagtgttgagcagaaaaagagatagacgttttttcaaaattttcagagccaaactcgcccagaaagaaaatccagaaaaattagggtcgtcgctactattccgaaaatgtggttggaattcatgtgagtgttgagcagaaaaagagatagacgttttttcaaaattttcagagccaaactcgcccagaaagaaaatccagaaaaattagggtcgtcgctattattccgaaaatgtggttggagttcatttgagtgttgagcagaaaagagatagacgttttttcaaaattttcagagccaaactcgcccagaaagaaaatccagaaaaattagggtcgtcgctactattccgaaaatgtggttggaattcatgtgagtgttgagcagaaaaagagatagacgttttttcaaaattttcagagccaaactcgcccagaaagaaaatccagaaaaattagggtcgtcgctactattccgaaaatgtggttggaattcatgtgagtgttgagcagaaaaagagatggacgttttttcaaattttcagagccaaactcgcccagaaagaaaatccagaaaaattagggtcgtcgctactattccgaaaatgtggttggaattcatttgagtgttgagcagaaaagagatagacgttttttcaaaattttcagagccaaactcgcccagaaagaaatccagaaaaat

SEQ ID NO: 43567 - DNA, 763 bp, Heterodera glycines
tgttaaatcctcttcaaattttgcatattgaaagagaaaaattttctgcacctgtctatagtgaattcattattgtttatagtctaatacaaaaattataagaaaatccaaatttcgaacgctcatatcttttttctaaatcatcaaatcccttagcatttgcttagaaaaagcttcttctcaacgtgagctttcgaatgataataagattgtccaatttggttggcaaaaaccctcaaaaatgatccttgaatatcgtcattttttaagtttttctttctctgtaaagaaatagtatgccaaaatgagagaaatgtattcttctctgcactctctatttattggttcatgtctcgttttttgactcggtgtttcagtgctttctctcaacctttctcattttgtgtgttttcagtgttttgggtgctggtgcgggcatcgctgtgtttatggtccgtcgacgaagtgctgaagcagaaggaggagatgcacctgcggatccaatcgggactttcacatcgaaggcggacaaaactgatgaaatggacaacatcccagcgagcaaggacgacgacaccgctcctgccgccagcatgggggtaaaaagaagcggagaagtgatgataaaaatttatcactgcctttttagggaatgcaaatgagctacgccgccatgggagcgtcgacagcgcccgggaaatcgatggtatagagcgaaacggatgcattatgaagtgatgacacaacatatctacgatgacaa

SEQ ID NO: 43568 - DNA, 1194 bp, Heterodera glycines
  unsure (1)..(1194): unsure at all n locations
tcccaatccccacccccctaattcacatatgacataaccaaattgttccttgggggcggttccctttaatccaactttttttccttttcccccccttttccccccccgttcagtctctgtcccgactgcgaatcgggaagaggcggtccatccaattngtataatactcttgaataaatgattgttaacaacaccgcttaccaatttgggaatgataatggacccgcctggatcctcagtattcaagcacataaatgagacggtcaattgcggtgaacaaaagcaaaagtgaagcacaacaaaacgcaaaatatgaaggggtaaggagacgaatgaccaatttgtagggcattaagtaatgtccagaaatcacagagtaagtaaacaaaaaatgaccaaactgattgatcatctcaaaaaaagaaagaagggccaacaatttgttggacgaactgtccaaattcctaatgaaatcgcattttgtaacaatcaatcagttaattattaattaatgaatgaattaattaattctgaccgtgttcgaattgtgacgtaaacaacaaagaaattgattggaataccgcagcaaatgctgtgtaaatcgatgcaaaaacagtcaatgcccagcgatgacattcatttgtcaattcggcgtaagccttaaaatgctaattgacgaattgtttaacaataagcttaagccccgacccgcacggggtacagctcgggatcagggtcgtggagcgcaaaattgtcgagatcgaggacacaaattttattttaataaaaaattcctttggctagccgtcggaaaatttaaaaattttgggaatcactcaacgatgaagaagattatttttttttaaatgacatgaaaaattattaaagacagaaaattgggaggttttaccctacctgttaaaaattttgtttaaatctcattttttgaattttattgaaaaaattaataaataagcaaatttcaaacccgcagtggtttaatttgataaggcaacttctcaatagtgtaaaaatccagcgctcttgtcggggaatacattgtcgggaatggtcgaagaggtaggccggcgaataggtagggtgagctcggngtcgggctttgtggataggnttttaaatgttttattatgtattgaancgaatgaacatcatccatttcatactgtatcccat

SEQ ID NO: 43569 - DNA, 1076 bp, Heterodera glycines
  unsure (1)..(1076): unsure at all n locations
gcgtcgtcgttgatttgtntaatgcactgtttatgttgcttttttgtcttctcaaagtcctccgtttttgtctcgagacacttcacgaacctttcgtagaaaatatgctccataatccgaccaaagtcatgccaatttctgaataaaaggaatttattaatcaaatctaattgtaagctataaaaccgacatctggttcgagacgcccttcaaaatatccattttgctaaaagaaaaataatgatctgaagcaaaaaaataaataaatttaatggttcaaattatgatgtgatcataaggcagaaggaataagggtcaatatttatgaaaaaatggaaaattttccaatcaagtacttgcttttttgaaaatttttgatttataaaatttgttttcggtttcgtcatatagcataaatggcgaaatttttgcgcgcgaattcaaaattacactgataaatgccttttttgtattttttttttttttggtctgccaaaactcgcttcattcccaattaaaccgagcaaatttcaaatttaaaaaatgtttctgaaaaggagaatctccgagcctagcgacgaagatgaaaaacaacggacaaatcaaattcctatcgataacaattcatgtgttgacggtattccgctgaacatccaatgtaaaaaagaaatcaaataatttttcatcgttacgacaaaattagtcctttttagcattacgaaaaacttatgtggacagagaagagccatttttactggaaaaggacatgctttcctgtccatttgaccaattctctatttggttcggaaatgcgatcacgcaaaccgacctcaaatacgaagaagtgaatggctttgctttgtcaactgtctcgaggcttgtttatgttttctgtattaacttgaccacacccaatagtgatcaaatcatcacaaaagtacactttgaacagacggcaaaatatgctattttcatatctttaacaggaatttaacattttccaaagaaaacatattttataaaataattccctaaagttaaggaatggaaaggccagttcgagaatgctattgctc

SEQ ID NO: 43570 - DNA, 1082 bp, Heterodera glycines
ctgctccataagaggtcagaggcgactgtgctcattgacacgtagttgtccaattaaggtacttggactttccacagtaaaatgtggtgcaaattttggaactgtcccgcctcacggcggggcttaaaagcatttgtagcgcaataaaagttttttgttttgaatttttcacaatttatttaaaaaagccaaaaaatccggatccaattttaaaaacgaaaatagtgcacaaaaagaagccgcctcacggcggggcttaaaagcattgtacatcataattaaaagcgaaaataattttcgtatattttttcacaatttatttcaaaagacaacaaaaaattgataaaatgttgaaacgaaatagtgcacaaaaagggagggatggttagacgaaaagaggaatttttaggatgggacgcaccccatctgatattcacccttttctgctccataagaggtcagaggcgactgtgctcattgacgcgtagttgtccaattaaggtacttggactttccacagtaaaatgtggtgcaaattttggaactgtcccgcctcacggcggggcttaaaagcatttgtagcgcaataaaaaagttttttgttttgaatttttcacaatttatttaaaaaagccaaaaaatccggatccaattttaaaaacgaaaatagttcacaaaaaggagccgcctcacggcggggcttaaaagcattgtacatcataattaaaagcgaaaataattttcgtatattttttcacaatttatttcaaaagacaacaaaaaattgataaaatgttgaaacgaaatagtgcacaaaaagggagggatgcttagacgaaaagaggaatttttagaaaagaacgcaccccatctgatattcccatttttctgtttcacaactgggcaacggcgactggtgctcattgacacgtagttgtccaattaaggtacttggactttccacagtaaaatggggtgcaattttgggactgtcccgcctcacggcggggcttaaaagcatttgtaggcataaaaagttttttggttttgaatttttcccaatttatttaaaaaagccaaaa

SEQ ID NO: 43571 - DNA, 869 bp, Heterodera glycines
  unsure (1)..(869): unsure at all n locations
cgctgctcaactccgcgtccttctcgcgcgcgcgtcggcccagctcctcctggtgacgcttcagctccgcctccaagtcgcgcatgcggcgctccttctccgcccgctccaattcgtcccgtcgcaacagctcctccttctcgcgcagtttgcgctgctcctccaaaatttgcatctccttgctctgcaacacctgaacaaaaattattagagttttggacatttatttgccgacaaatcgagtcaaattttcaaaaattttccggtggcgcctgtctgaagcgacagatacaacgccaaacgaataccgatttttttctcatttatgtcagaaatactgaattattgatttatcttcctcgcccatcgtacgcttttccgtcccgaaaaattttaaaattttgatttagttccaaaattatagacaaatttgaaatctcaatgagtttttttaatacttttgactgaagcaaaagtccaagcatggtattttagttttaaaaatcactgatgaaataacttactgccattaacggtgctgaacccgccgcaccaccgtcgccaaccgcagcaaccgtcgccgaaccaccaccgttgtcgttggacggtggcgccactgatgagggagcggcgcccgtggtgccaccaacacttgcgccaccacccgctcctccaacggcaacttcctccaggcggagtggtggcccaaatgctctgcacgctctccaaattgggcgaaaggtgcgggtggntgggtggatggaattcgatcaaatcggacggactgattctgaacggacaaataaaaaagtgttgcagtttagtccaaccaaaacggctagtttaagtagattgccgacccacaatag

SEQ ID NO: 43572 - DNA, 698 bp, Heterodera glycines
gcaggtctaaaaaataattaaaaactcaaattcatctctgaaatttgatatgaatttggccacatgttttgattaattaattttctgtaattcttaaaattaattttaaatttaattaaaaacatttaatttttaaaaatgtttaccattaaaattattgtcaaaatgaatttttaaagaatatatttttactttcaaaaaacaaacttgtgaaattcatctctccgaaaagttgtggcgacgcacaaaaattattattaataaattaattgagtaacctcgcaaaaatataattttgcgatgtgtaacaaagacaaagagcaaaatttctttttgcttttttagaaattcccctttttgcctcgggcgattttcgaaaatatttttgcaataaaaatctgcaaaaatttgaatgtgcaattaactaattaattacccaattaattaattaccgacgacactaaggacaaatttaacgaagtgctgaaaatgaagcggtggcgccggtggtatcattctcaccccccaaatcactttattatcactatgtgattatgattgttttgttgtttatttatttttttatcgcaaaattttgcgcacgcctaaggcaaagaacgaaaagagagagagagaagagagagagaagagagagagaagagagagagaagagagagagagaagagagagagcagaga

SEQ ID NO: 43573 - DNA, 721 bp, Heterodera glycines
gcgaaaccaaccgcactcacactgtctcgaagacatctgccggcgtaaaaaataaaatgcttaatttgcatattaaactggagtttaagcccgccgcacgtcgttcttctcgcttctctctgcctcagttgtttggaacgaaaaagaaaggcggcaagggaaaaccgaaatagaaaagtggaacgggtcaaatgatggaagcaaaaagaacaaatttgatggaaaattgagatgtgttttttatccaatttttttttttgctcctatacataaagacttaactggtctttcatttgaacaattggaaatttagcccggaaattacttgacgtattcgcagtcccccccccccctctccttgttattgggggcataggtacgagaaattggtcctggcgcacccccctgcgccacatcgccctggcgcaccccttgttcatgtatgtttgtgagtgggatatatgtcaattggaagggctaaaattaagtgtacaaattaaattaagcggaatagacaaagctttccccttttcatagcttacaaaggaaggtccccgggtgtccgtgggatttccgaatggaatttggtgggtggatagagcacccatgggttcttaagaaaagtgtttttattttttgctgaatgagcccgagtgccgagttatgacgtgccaaacttttttagttgaataaataaattaaataattgtttgaatacctc

SEQ ID NO: 43574 - DNA, 1132 bp, Heterodera glycines
tccatattttatgtcatattttggcatttttcaaaaaaacctctattagaacggcccccagcagctaaattagcctttttgagcccaaaacccgaaaaatttttcaaaaaatcattttttcgccaaaatttctcgagaatattgaataaatttaaattttcttaaaaattaataaattatgtcaaaaataagcaaaaaagcgaaaatttcgcttttgttgttgattttgcgctaaaacaattaataaattttagcttttatgttttttttcttttaaaatgattgcacgtaattgccgaaaaaattcgagaccaatttccgaatgttgaccgactaattgcaaaacaaaagccgtctttgtcaaagcgccttaccgagtcaaaaaatttggaaatgtatctcatatgcaatttcaaccaataaatttgaagaaattttgcactcaattttgaaaaatttatgtccatattttgacatttttgccatttatgtccatatttcgcgatttttggtccatattttatggccatatttcgcgattttatatccatataattacactccctacttatctgtataattttgaattgctaaaatgagggtttatccattagggaagcaacttttagtgatttaactatttttttttgcgcaattgttttgaagaaaggagctcaaaaaacgcatttctgcattaaaaattttcgattatgttgtcactagaaatcactattttggcgtttcgtcaataaaatatttaaaattcactatagttttgttcaattttttgactgaaaattatgtcattattcgtcactatttcttcactattttgggatttttcgtcactaaaaattgcttccctacttatcattgtattctgaacagggctggccgtgatcacggctcacgggaatcacggggtttttagggtgccgtgatcacggctcacgggaatcacggggtttttagggtgccgtgatcacggatcacgggaatcacggggtttttagggtgccgtgatcacggatcacgggaatcacggggtttttagggtgccgtgatcacggatcacgggaatcacggggtttttagggtgccgtgatcacggatcacgggtcacggttttttt

SEQ ID NO: 43575 - DNA, 922 bp, Heterodera glycines
atcatttatttaataggcgggagcagatcttcacccctgccgtttccgggtacaccccaaaacatcgccggccgaaatgttgccgggtgataacgtcgccgcaaaaaaaaaaatttcaacttatttttagcttttttgaaaatctaagtgtcaataaaaactaaaattgctgaatttctagaaaaaaaaaacaaaaaaaacttgaaaattttttttatttcgaatttttctagattttttcgtattgggctaggtatttaaatttttgagaatttttcttggttttctaaaattaaacacaccgacctgtgatcatgacagtccgaattttggccctgtaaaacgcaaaaatttttttataaaaacatggaaaaagcactacccacctgttcaactgattgataacgcccgttgtttgcttctttagccgattttccatgacctttttgggtgagaatgggaggatgaaggttaattaaaattttatttttacaatgagtcccagcatggtcaactcgcactcggcctgctcccgcttgaccttctgcaccttcacatagttcatgttcagcgcgcgggaagcaacggcgatcagacgatagccactaaaaatatgcaaaaaaattgaaaaatgagttgtacttcgaattcttccaagaaaaccgaatttgttttaatattgagagagagtatgagggatgggaaatacgccccccccccaaccgtcaatgaatcggaaaagaggaaattaacgaaattttacaaaattgtaacttctcctcaccctcgcgcctcccagaaatatggggttcggggggttcactacgtttccccctccctgccacccataatttttttcttgaaatttcaaacaaaaaaattcagcaattttttggaaaaatctgttataatttaaaaaata

SEQ ID NO: 43576 - DNA, 1459 bp, Heterodera glycines
cctggaagtagtcggccaattcgagcagcatcaggacatttttggctaaaaattggaaatccatttttaaaaaaaattaaaaatcaacccctcaggggatatagtagaataaatacagtatcatgaattacggttgggcagaaaaggttcgttcattgtaagataagtgatggcctccaaaaattctttgaattggtccatgtccacgcccaattcgttcaaagtgatcattcgctgctgcttctccttcatctccacgctgagcatgcgactgatcaccggggaaacggacatcagccaatgggcggacacggccatctgatcgggatagattatcagtgatctgaccggaatttatcaacgatttgagatttatatgatctgatcaaaatcatttgtcagtgattatgcccccaccctataaagtcgagccctccccccttccgcacccattttctaattacaaatcctggacatttgcggacgaattttgtgatagatttgacagaacaggccttaaagcttaatgttttttcttcacctgtttgtcaccaatttccaccgtcaaatcgtcgtccggtaaactgttggaagacgccgggaacgcacttaaaaaaatggggaaaataacaaaaaatggaacattaaatcaattagtgatcgggaggacccatcccaaaaattcttcagtaaaaaacgcgtcagtcacatttagtttttcaaaaatatatggaaattcgaaattagagaaagttggcattgttttttgtcttccaattgttgcttaaaatttcttatcaagtaaaaaaaacactgcacattattagagcatttgttactgataaaaacgggaaccaaaaaatcagttgtttcgaccacttttaattattattaatcacatttacttttttgtctcccgctttttgagaattcggattacaaatgatgaagcattgtcgcatctacggtaattaagctcactgcccttgttaagcgtatgggtctaaaacattttattgattaattcacttttttgatcatttattatatttcttacttcaacgattcgttgtgccccattttcgccccaattccaacgaataatttgtgccaatcgctcctcatttggcttggaagcattgccaatgtccttgacttgtaatgtgggataatagctttctggcgtaatcatgaattcactaaaatatgtaagtgatgaatttaaattgaaataaaaaatcatcttggcttattatgctacatattaaatttggttgctttttaagtattatttttacattttaaaatttaaacaattaaatttacagtgcagcaaattgggtcacatcacgaaatttacagttacagctgccacagttattgcctatgaattcactgatcgttttttcgtcaacaacaataaattcgtcaaagattgccattgaatgtgctttaaatt

SEQ ID NO: 43577 - DNA, 1281 bp, Heterodera glycines
ccccccctcataacgaaatttctatgtctaacgttgttttctaattcaatttttatccaaacatttagtgccaatcaccttccaattttgcttctcattcttttcaaatcttccggttctaaatactgacaataaatggatcccgatcccgaggatttgggccaaataacaatcagtcacgaactaatcgatggcaaaaaagtaatttctggaagtgtgctgccatttttgggtcaaccgttgccacaacgacttgcaacatttgaaagcatcgaaataaagttgaaaggatttggaattttctaaaaagcatttaccaaatttttcagattcatcaatcggatgtcattcagttgttgcaaaattggaaatcaattttcgagtcgtgcccgctgaatttgtcgatccgtttcttgtctgatcgagtttggcgcctcattgagcgcgacattttcccattgatgtcaaaaaacattgaaaatttggatttgtccgacaacatcgttcgtatatgcccaaccatccttagccaatgcgccatacttcgcactgtcaattacactctcaactcgtcgatctatgacccgtctagttggcaaccagtgcaagactggttgatttcacctcgtgcagacaatggcacgccgttaagaattgtcaatttcttgtgcgaatcagaggccgtcaatttgcagtgcattcaagaacttaaaaaggtaaataaattaaatacattcttaattttcattttaaatggtttttgctaattgctttttcgaaatttataggccttccgtttggccacttcacgtgcctctttcattatggtattttttgatcaacatcgcctttcccccttttcgatcaacaacaaatgcactggagaggaattgacgcttattcgccatgacagagttttcaacaattttaaattggtccgtcatggccgtccaaattttttgccaaaagcaacgctcgatcgtgccgctgagtggcttatggaagatgaaatgcatcggattgtagttaatttgagagatgacgacgttggcgatgggtgagaatgaaaactcatttttagggatcaatttcaatttaatttttaggctgctcgattcatttccatccgccggtccaagtgatcgccactgatcagcagcaagcgcaagccatggatttgtgtgtgcttttgcagtgcctctttttctcatctcaatatctttttatcttaaaccatatatgctattcaaatgtgacatcccattacaaatatttttaaca

SEQ ID NO: 43578 - DNA, 1422 bp, Heterodera glycines
  unsure (1)..(1422): unsure at all n locations
catgactttttatttggggaaaatgtgtgggaaattatgtagagtgagtagattcatcaaaaaaaaagagtcgaaagtgatagacttagacgatttccaagtgcttttatacaggaaaaaaagcatttctgtagattagaggttgacaaaaaaaatattagggtggaaaaataagtttttcgttgctaatttaatggggaaacaactttagatttggaaaaagaattcaaaaaaaaacaaaaatgaccaaagcaattagcatattaatgatcagcattcttaaaaatgtgtttaattaactaatttcaaaaaaaaaaatttgcaaatcaagagtcccgacttaaattatcaaaagtaatcactaatcgaatattttgtcgactcaaaatctacaataagtgccggaaaatttgggcagataaaaaacatgatgcaattaagttccaatgagtggaaagagagtgccaatgtaagttacctatgctaatgacttttgagtctaatttcataaaataacaattattgcgaaaactcacatttaaaaccaagcgatggcaacagctcttccaaagttggagtcgactcaattttgaattttggcaaaaagacctgaagaattaaaaaatgagcaaaaaaaaagaacggaaatgtgccatttatcgatcacctcaactctaatcagtggtgatttttgatcattctgatcagtttggcttccgtcagttcccccaacacttttatgagtccctcgtttgaatttggcaaaccgatgaaaaggtatgcgcgcattccctcccacaaatcccagtccgatcaaccgcgatcagttgttcgtcttcgccttgttgtcaaccgtctcaatgccatcccgggggtccacccaatccaacaccgaggcgaaaaggatgttcactgctgttacccatgcccagatcagcccgaaccagaaaccggcattcaactgactgaaaaaatgaacggggaaattttaaaggattttttctccgattttcgaattttgatcaaagataaaaggcattgaaatttaactccacgagcattaaaatttcaatttttgcctcactttcgcaatttgtggttaatgctgccctccggctctttcagtgaattgccataaacgcgttccgtccgctgcgcaatatccgaccaattgtacatttcggccatctgtcgatgcttcttcaccgggcacggcaattcgccattctcacgccgacggatggcatccaaaagaccaattgcaattgctgtataaagtatttgattataaatgagtcaaataatgatcgaacagccaaattattgttaaattcaatgggaatcaacctaatttanatttggctacggtagacatgaaaaccatcatctancatagtatttgatactgtaatttcataaaat

SEQ ID NO: 43579 - DNA, 1578 bp, Heterodera glycines
aaaacgtaaaattataaagaaaagacgaaaaaaaataatataaataaaataaaatttttgcatttctcattcgctaatgcataattaaatactaattaaagcaaacaattcaaaatgtaatgagttgagagattgacaatgcttgtctggctaattaaataaatagaataatattttattacggaaattatattattatatggatttcggtgcaaaaaagaatgaaaaacaatgtgtaatcattaacaattatatgtaaaatctttaaggggacatcatgtcactactgaaaaagtaaaaaatagtgaaattaaacaaaataatttttttaaattttatataaactccactaattttttatttttttctaattattaaagttgcaattatttggatataaaacactaaataggcaccttttatatttatttttattaaagcggtcatcagcgatgaatgccttagacaaattaacttattttatataaacaattattacgaacaattaaaaattacatcaaaatacagcttaattgtaataaaaataatttcaaaaataaataaatattctttaaaattaaaaatgacatatccacttgacatttctgagaagcaatttcgttcatgctgccaagagataaaaacaaagagaaattaataaatttaaacttaaaaaaatatttaatagtcgaaataaaagtttttaaattaatgctcttattttaccagaaaatttgcattgttttaaaattttaaaatttataatataaagcaaaaaacgagctatttatcattcatactatataataaaaaaatgatacatctttttcaggtaaaagaatttattatttagtaaaattttaaaatttgcaaaattagtttaaacatatttttttttttacttttttaaagataaaccttagaaaaacaccaaaatagttgcaaattagttgttatatgaataataatttttgtttttgggtttgattaaaattattataaattattatttttgcgttaagtcaataaacgaaaagactttaggcatattacttatattaattttaacaataatgactttttttgtgatttttttcggaattttatcatttttaattttttcaattattttcatgataaattctttgagttttaattgtattaggtatttagtttcgatgttactatgacacttttgtaaaaaaaaaacaattagcaaaaaaataaccaaattcaactttttaatataaatttcatagtatttcaacgccgctgatttttttattaacacattataaaacaagttgtcattaaatataatctttgttaatagtaataaataattaaacaatgtttaaaataaattgaatttttttaaatgtataaaaatttcatatcttattaatgaaattttttcatacaaaagtaataaaattaaataaattgttattgaaattttcattataaaatttttacttataagaaaactttcatagccataaattacctggaaaatatattaaatggaacagatgaataaataataaatctaaactcgacttcatatataattaatat

SEQ ID NO: 43580 - DNA, 784 bp, Heterodera glycines
  unsure (1)..(784): unsure at all n locations
aacctcttccctaagatttaataaacaaacattggattaaatacaaatacaataatgaaaaaattcttatttaatattgagaaataaaacagatattattgtagcacctagtttcactgagctcttaggtcaaatttttaaagaaatatataatttattgaaatttaagctaattatgcgttttatggtgccaattatgactttataagggaattaaatatttattaaaagcctcattttaaccactaatcaagcaatgtttaaatcaatttttaatttttttttatggctccaacggtgaaacacaataaatttttaatattacatttaaattttattatttttttaatatatttttttcacccttttgcacttaataaaactttaatttcttttaattaagcttaaggctaatagttttgaatgaaatttatttctttagtattcctttcttcattttatatttaatttttggagtttgttaacttttttgttcccttattgttatattttaaatgttctttaaatgtaattttaacttgcgttatttttgttaaaataatttattaaatttttattatctctagcggtgtgtatggaaattctggttgttgagagttttgtgaagtttatccaaaattttgcaattgatatttgacgctttgaagtgcttcatttactcatttttcgttattaacttttacaaaatatttaaatgtaatttttaaaagttcgaaaataaataaaaatatataaacgcanattattaatatttaagttgttt

SEQ ID NO: 43581 - DNA, 893 bp, Heterodera glycines
  unsure (1)..(893): unsure at all n locations
tgtccattcccggtagggatttaatcgtgactttcacagatagccattttttgtcaagaactatttttcgtgcgttttcaaacacactattagtgttttattcagcgctacaacagaagacaaaagttggtgtccaattcccggtagggatttaatcgtgactttcagagatagccattttttgtcaataactatttttcgtgcgttttcaaacacactattagtgctttattcaccgctacaatagaagacaaaagttggtgtccaattcccggtagtgatttaatagtgactttcagagatagccattttttgtcaagaactatttttcgtgcgttttcaaacacactattagtgctttattcagcgctacaacagaagacaaaagttggtgtccaattcccggtagtgatttaatagtgactttcagagatagccattttttgtcaagaactatttttcgtgcgttttcaaaaacactattagtgctttattcagcgctacaacagaagacaaaagttggtgtccaattcccggtagggatttaatagtgactttcagagatagccattttttgtctagaactatttttcgtgcgttttcaaacacactattagtgctttattcaccgctacaatagaagacaaaagttggtgtccaattcccggtagggatttaatcgtgactttcagagatagccattttttgtcaagaactatttttcgtgcgttttcaaacacactattagtgttttattcagcgctacaacagaagacaaaagttgtgtccaattcccggtagggatttaatagtgactttcagagatagccattttttgtcaataactatttttcgtgcgttntcaacacactattagtgtttattcagcgcta

SEQ ID NO: 43582 - DNA, 1318 bp, Heterodera glycines
ataggcactattaactcgaaaagtaccttaacaatcaccaaaaacaacttgtttttcgtgtgtttcaggccactgggagctcaggaaaaaataggctaaaccctaaaaattgcatccctacttagaagcagttaattatttttacgccacatttaaaggcaccaaaaatcgcgaaaagggtaattttggacatttaaatgcttattaaatattttaataattttttccgataaggaaaatttttaaacctataatttttataaagaaaaaaaattaaattatcaaaaatgcatgaaaatcccgaaaaagcgtagaagcttcaaaccaagtgggaaacgcgttgtttatgcttaatatatcggaaatatgcgcagaaaaaaagtatattcctcaaaagtcggtctctattaattatattttgaaagaatctatgttaaatatctcgttttttgtataatattccttaagaaattaatcaattttcttaatttaatttttctaccttcatttttgggtatttttcattaatttatttaaagatagattataatttgccatttttaagtaaaaattttaaaatttgactaaaacccaaaagagaatatttttagtgcaaaatctgttaccaaatcatgcaaaattctcgaattttctccggcggcgccgcccgcctccccctaccaccaaagcttttttggaaacagtgcggcaaaaaagaagccttttttgattttcttttgattttttatggaaatttaaacaaaaaaaaatcgtcttttttccttttcgtttcggttcagaaattatttgttcgtttcgttttttaaaatcgtttttgttcgacaccactgattcaggaaggcttagactttaagcacgaagacttgggcatgaaataggaacgaaaaaagcgaaagaaggtatgcatttttaaaaaaatttcaatcaaaaatgccgaaatatgcacaaaaaaaatttgcaccatttgcctataaatgccatccttactaataattttttaattaatttttcttcgagatacttttttcagcaggtgttgtttgtgaagtgtttgcaccttttagcattttcgttgttttgaatgaaggagacgcatttgctaaacaaattgcgattttatttaatatttaataagaaatgggcaaaatgtaagcctcggatgggaatcgaacctcgtaaaccctttccgtgggcaactcaaacattgagttaccgagacacatccgccttttcttttatggatcttatcgaccccccttttccgcgttttaaccgcccagtcagcttcttccttaca

SEQ ID NO: 43583 - DNA, 765 bp, Heterodera glycines
ttaagagcgctggtgattttgtaatttgcgaccatccatcagaggtcacagaaaaaaaatcctgaccaattccctgaacaattttttgttgaatttcattggccattttgggaattacattcctccgaaaataatctttgcggagaagcttaaaaaatatgacaatagtaaaaaatgggtgaaaaatattacttggagtttcgggtaggccaaagagaacaaattctgtaattccggtgcctcaacaaataaaaaaagcgcaattcgttcttatcatcagccttgcaatttgttcatccgcctttttgtgggtcttcattgccaaaaaattttgtaatgccttggtttttctgaattttttatattcaataaaaaggaagcttgtattaccgttgacgggtcggatttttgcaaatagttttcaaattctttagcgtgtttcgctttaaaatgcccccacaatccttttgtgcacaatttcttacacgctaattggttttcacaaagccggcacttagcaacctcggaagaaattttcgtgaaaaaattccaaatatcagatgcttttgaatccattaaaagtaatcaattgggtgaaaatctattaaatttcctggaaaattgtaaatctgtgcaaagtttaatttggcaaattatatattattaatttttctaaaagagtgagaaacttttattttggcttagtgataggtaaaatttaaatgttttggttgcataacttttaaattttcaaaacgctcggag

SEQ ID NO: 43584 - DNA, 550 bp, Heterodera glycines
cggcgttttgttcattgatcagtttcgtttttcggccacaaattgcaagctaatccgattcccctccccacccaatccgtgccaaatgctggccaatgccaatgggcacttcggcggatggctacccgatcagtactcctcgctactctattcgcccgtctccgatcagtcgggcattttcgaatcgatggtgggccaaaagaaccaacaacaacaacatcagcagcagcaacaacatcaacaacaacagttgcagcagctggtcgtccaacatacaaagaacgatgtaaaaaagggggaggggagaggaaaaagtgatgggcaattaagctaaattggcaccggtttttcaacaaaatggcaaattaattaatggatgcgacgaaagtttgtgccggggctaggattgacaaatgtacattaattaatagcccaattagcctgttcagtgctcaaatttggccctgtcgccctccttcatcggcggtggtgccaatgtcggcattggccggtgcccttcccatgctcagccttcgcttgtgtcctccca

SEQ ID NO: 43585 - DNA, 639 bp, Heterodera glycines
gctttttagggattggtaatgcttttcctttgtcattgacaattttcattttctttgcgccattcactccaattttttctttaattgaaatttttttcttcaacgtccatttgcgcgttttgaattgttcatccactcggcgatcaaatcggtggctgatcatcgcaatttgaaggccaagcttagagggcggcagcaaatggaacaccgccagccaacagtcggcagaaatgaagctgaaaacggaaaatgattgccatggaaatcaatcaaactttaaattgttattacattgctttttccatttgtttatccgcttctttcggattggaagacactttttttttgttgcagtgatcaaaagcaaaaattttaacaaatagaaaaactgaacaaacgttactttcaatggtcgtataaaataggaagataaataaaacgggtggaaaatgtgtaaatagtagagaccggaattttgagatggccgggaccggaccgtgacttggaaaatgaaccgggacggtatccccgggaccgggactcccgtttttccgggactcccggtcccagtggtttgtccaaaaaagccgggaccgggagtcccgataaaatcccggcgggatcccggtcccgtccggt

SEQ ID NO: 43586 - DNA, 969 bp, Heterodera glycines
aatccagaaaaaatcactatctctttttttggcatattttacgtgtcaaagggtgtgcatttaagcgactcgctgtgcttgcccactgcatttcaaatagctggtaatttttatttctccggcctaatccagaaaaaatcactatctctttttttggaatattttacgtgtcaaagggtgtgcatttaagcgactcgctgtgcttgcccactgcatttcaaatagctggtaatttttatttctccggcctaatccagaaaaaatcactatctctttttttggaatattttacgtgtcaaagggtgtgcatttaagcgactcgctgtgcttgcccactgcatttcaaatagctggtaatttttatttctccggcctaatccagaaaaaatcactatctcttttttttggaatattttacgtgtcaaagggtgtgcatttaagcgactcgctgtgcttgcccactgcatttcaaatagctggtaatttttatttctccggcctaatccagaaaaaatcactatctctttttttggaatattttacgtgtcaaagggtgtgcatttaagcgactcgctgtgcttgcccactgcatttcaaatagctggtaatttttatttctccggcctaatccagaaaaaatcactatctctttttttggaatattttacgtgtcaaagggtgtgcatttaagcgactcgctgtgcttgcccactgcatttcaaatagctggtaatatttatttctccggcctaatccagaaaaatcactatctctttttttggaatattttacgtgtcaaagggtgtgcatttaagcgactcgctgtgcttgcccactgcatttcaaatagctggtaatttttatttctccgggctaatccagaaaaaatcactatctctttttttttggaatattttacgtgccaaagggtgggcatttaagcgactcgctgtgtttgcccactgcatt

SEQ ID NO: 43587 - DNA, 1184 bp, Heterodera glycines
agagagagaaaaagagaaaagagagagaggagagaaagaaaagagagaaacggcaaaggcgtggaaaaacaattagaaaaaaacaaagaaaagagaaggagagaaagaaactaatgctaatgagcaagcaatgagtgaagaagggcaaataaagcaagaagaggagagggaatggagcaatagaacgccaaacgccatttggacgttcaaatgagagaaaggggtgcgagaaagggcggagacaacgagagtgagagaggaattggaagaaggagagaaagagaggaaaagagaaagagagaagaagagagagaggagtaaaaggatggaggaagggtttggtgaagagttatggaatgtgtgcgttgtaataggtaagttggtgtgtgttgtgtgtgtgggaatatgtgcagagttgagggagttgggaatagagagagggggagagagaaaaagagagcgggagagggagaggggtagagagggagagagaagagagagagagagagagagagaaagggaggaaagagaaagagagagagaaagaaagagaggagagagagaaggtgagatggcggaaagagagaaggaaagaaaagggagagggggaaaaagagagaggtctggactaatcactaatcatccctaatcagaaaattgctttaacatttgattaaataaataaataaaagcaatttaaatgcgaaatctattaatataaaacttgatttgtttcagttttaagtcaattaattcaacaaataatttgaaaaaagaaagaaaaaaagaaaaagtgaataaaccgtccaaattagcactaatgaaaacgataagaaatgaagcgaagtttgaagaagaaagaagaaaaggtgggggggggggaatcggaaaaatgtacagtgataaatgataatttgataataataaatgacgacagactctgctgaaaaagcagccggcggaagggttttattgagtgtgaacttaaaaataataatttaattaatattctctaattgtttttctaaaagtgcgtttatcgatttgaagcggccatttacaacgcagcgttttgctttctgtcccttccccgcctaaaaaacattggcggcggcgctcaatggcaatgctattttttgggagtgatttgggggatgggggaagggacttctgctggggggggg

SEQ ID NO: 43588 - DNA, 1092 bp, Heterodera glycines
tgtgtttgcatttttcttacgcgcgccagctcctgctcataaaagctgccctgaatttctcaccgtgctcatccccagtttgtaccgaattgggcgcaccgctttcaacacatcatcaatctccaggatttcgtctccataatttggtaaatatcccttctcaaattgccctttctctctgctcatgcgcacaaattcatctttacggaagcgtggcgtccgcttttgaagggcagggtgtccgtacaatcgcttccacactttctgcgcatttgaaaagtcaacatcaatggggcgcatcccgtgaacacgagttggagcgctgttaattccgtccacaattttctgtactgcatccacccaattcagcgtctccttttgagcaaaataccggtacagtcgctgcttcacattccggatggcccgctcagcaaccgatgccttgactgatgaatgcactggctcatgcttctcaatttcctgctcatcaaagaattccttcaacaatcggttcttgaattcggtgcctttgtcggagaagatgcgatgtgggaccattggcatttggtcgatgagttgtctgaatgcctccaacatctcctcggctctcttgtttttcagcggtacaacaaacaggcgtttggacagcacatcaaccgcaacaagcaggtatcggtgaccccgattgtggcgcgaaagcgcctgaaaatcggccaaatccacttgaacatcggtcatgaacccagccgcaacagttttggctcttggaaagcgcacccttcgggagcgcatcagagtgtaggtgcggtgcccctccaaataatgctgcacatcctttttccgtaaatttttcaacttttttcgcgcttctttccacagcgctgtaacacctgcgaacgccgctggggaggatgggtcgttgtacagtttgtcaagcgtggagttgatcaactccactttttcgggcgaaattccttcttgattgtctgcggcgtccgggttgttttgctctgtgctgttttctttggaggagccgtccatgaatacaaaattggatcttgcctaagcctctcttcaaatatggccgctcca

SEQ ID NO: 43589 - DNA, 1268 bp, Heterodera glycines
  unsure (1)..(1268): unsure at all n locations
cctttgggaaagtatataaaagcaatttatcctcaatgagtagaatgaggtagtaaatataattattcacgattgtaatcaattttcgcagttctcattcatcttgatattttcattagatccgactaaatagcttatgagataatttgggttatcataaaatttcaaatataattagaaatgcaattcatggtatgaaagttactttatatacaatcttcaattttgcgctctggaggattggttatcgcgcaccaatatttgccaaccccccctccccctccaaaatatttgcaaaaattgaaacaaacaatttaaaaatagtgatttcacaaaaattcttattttttatccctttcgttagcacaagtgtaaaccaaaatcataatgctttttggcgtaatattttctcgctccctaaggttgacttatttttcgtaattttcttcgataaaattcaaattttgccttaaaagtcaaaatgaaaataaaattttgaatatttcggacattttggcaacaatttttacttttttaaatttttttgcatcgaaaacatgaaattttaccgactttccaataatgtcctaatcttgactattctgaggtcaactatttaaaaaatatggattattggtccaattaaaagtgaagctacatattcataaaaagctactttttagcaaaaatctgtgggtcacattcgtacggctaatttttcgtgccttagatcagtcagacatacagaacccgttacagtatgtattcagcaattgacactttgctacctaatgcaatattcgccacaagttggagctgttgttgtagaacaaccggacgatttgtatgacaaatgcactcgcgtgatgcagtgcgtaaagttgcgtgaggctctcaccaatttggtgcgctgtgtggacaccgacaaaagcattcggttgcgtgctgagcacatgcgcaccatgagggggttggacatgggcaagtttaacggtcgctttaccaaatgcgaacagtggaaagtgatgtgatgatcaaaacattaatcaaacgatgaaatgtgttcattgcaactaaaactttacattatatatttttcattaaaatttgctgtatccgattaacaaataaatgttgttttgcagagtttccaggtttctttttcatttggtggttttttgaaaggccgatgagcttttatttttaaaatgagtatgattttttgttgattttanatttttagtttttgttgttttaattaattagtg

SEQ ID NO: 43590 - DNA, 1039 bp, Heterodera glycines
gattaatttccatggcgaatgcaatggcgaaattgagcaatatcaccaaaaccgtaacatttctagtaaaattttactaatcataatacaaaaatatcagtttataaaagaaaacattatttaaaagcacaaaaccttaaatgtttcattttattttataaagaaaaagtcaaataatgttaatttctctttaaattatttgaaattaaaaaacacaaataatatggcactgattttacgaactctttatttattcgggaagaattgtttaatcttaaaattaccattataaaaaataattttaactctatcaacctttaaaatatgagaaaaaatgaaataagcttaacacaaacaagtaaaacttatctgaatccatctttactaaagattacatttaaaatttcgataaaattactagcaaatatactatagcgaaaaattaaaagcaattaatgctaaaccaaagaaaaataatttaataatcattaattggatgtgaagatttttcattacgcctgtgaagaaatttcaagatttattaatttcttatgaaatttttcgaaaaatttgcggaaatatgttgcttcttttcaatgttgatttaactaagtattattattattagactttagttaaattattaactcatgttctgcaataaatgggcgcattcatatgataacttgatgcttactcaaactcttaatttaccgaggctttgagcatgttcctgccttattttcacctttataattaatacttcttttaaatttactatttaaaattttaaagatttgctcattatttataaatagaagtcacttaatcttaacatattttatgttttacaatattttaaatattttcgttttatgtttattgaatgattatttttctaatattttaataagtttcaattgtcattaattttattattgtttgtagttaattttttattctataagcaaatgatttagtttaaaaaaaaatttaaagaaaaattagtgacggttacttctcgatgatcaagccacgg

SEQ ID NO: 43591 - DNA, 826 bp, Heterodera glycines
  unsure (1)..(826): unsure at all n locations
agtggttgaaaaaagtcttgactcaagatgctaaaatttgtataattttaaatttcgactggaaatttagctgattattttttttatgtatatttatttacgaataaatatatggggcctttcatataccacaaaatcaaagcattccgctttatcattctcgtgaataagtctcctaatcagaccttgctcaaaaaaggggcggaaaaaagtcttgactcaaacttgaaaaaccaccttagagttcatttaaaaacctgaaataattcatgctagcttatcttttgatactgatcaaaaaagtcttttacacaaactttatcagatcactccttcatggtgatcaggaaagtcaaaaatggcttgaaattggaaaaattttgaaaaattcctatgcgggctgtgaaaattttctggaattttttgattggtgccagaaagagcacaaaattctctaccgaattgccttttgaatggtcgggatacgtcttgtacacaaaaaattatacttggttgttgcacttgtcgcgaaatgacgtagcacctaactatttaaaaaagagcatttccgatgtccaaaattttttcgtaaatcggaatttcgagttttcttaaatattttaataggctaaattttaaaattctcaaccaaaaattanaaagtgaaagataaaaatttaataatgttttcgngttttgtncaacaatgtttaatcacataattacactnaaaaccgttaaactgtgacaccgaaaagaaaaattaattcttatttttttcataaatttacaaaaggaatatgcattttttggatgaaataatgaa

SEQ ID NO: 43592 - DNA, 811 bp, Heterodera glycines
gaaggttaaaaatgacaaatgcaacaacaatcagtagtagtaaaagggaaatgacctgaaaggcggcaccggtttttggtcttcacaaattatgttttttgccgggaaatgactttttcaggtggtcaaatgacaggaaagtgtcattgaaatccacgctggccacagtgctattcatccttaacaggagtgtcgtattggaactctattacgaaagccagtgatcacttattaaaccagccaactcttttgtttgacccagtctaatttcgcccattttacttggagtaatgcgcagtgtcgggctcgccataaccgagtatcaaatcgtgcagccaatcggggacaacgcattcggtgttgagcagctgccgaattgtggccaaaacggctttaaagttgttagttttggggtcgcgtcggatgacgagattgaaggtgaaataaacgtcggtttccacgcccctcaacgcgtcttctctgtattggttggcgtcaaaacggacacggtaaatgcgcaaatcgcccggaattttacggatgatgtcgcgattctctaaagtatgaatcaacttccaaatttgcattcctgtgcccacccatttcgtccaaaactcttccgtccggccccaaaattccttccacctcacacccccgcaaatattcaatttcaaattgcgatttgaacggctttcggacgtcgaatttatgcccaactggatggatgggcttaagcttaagcagaaagaagacgtcattcttgcgaatgttcatccattcttcgcgcagatcggaacgcgaaggcaatgac

SEQ ID NO: 43593 - DNA, 1119 bp, Heterodera glycines
atcattagggacgtgaattttaggttttaactatttttttttgctcaattgatttgaagaaaggagctcaaaaaacgcatttccgcataaaaatttttcgattctgatgtcattatcggtcactagaaatcactattttgggattttgtcactaaaatagttaaaaatcactattttggcgacttcgtcactaaaatagttaaaaatcactattttgggattttgtcactaaaatagttaaaaatcactattttggcgttttgtcactattttttcactatttcgacattttttggaaaattctttaacaaaaatgcaataaaaccaaaaaatacacccctaagaatcgacctaaaaattttttcaaaaaatacacccctaagaatcgacaaaaaaaaaaattcaaaaagcactcctaagaaatgaaaaaaattttctcaaaaaggtattttcgtggcaagaattttaattttaaaaattatttttttatgtacctattttgtttttttgctcttaaaaatcccagtcctactcatttgcaatgcaatcagtgaataaaaattatttttgctcaatttttggctgaaaattatgtcactattcgtcactatttcggactttttgacactattttggcatttttactcactattttagttaactatttcgggatttttcttcactaaaattcacgtccctattaatcatcattaaataaccaaaaataaatttttttttttttgatgaagttttatgtgttttgctctttaaaaatccgtaataaaaattttttaatgacttttttcacgcattttcgggatttttgtgccttttcatgctttttaaaaattttttcgtgtataatgccttttcgcaatttttggtgcctttttttgccagctctaataattatgctaattttctagattatggtattaattattcatttcagtttttcttccattttttttctttttctttaaaattttctatattttgaatgtcatatccttttttgtaaattgtaagcaggcgaataatttaaagatttttaaagacaaatataatatttaaaaaaattatatatatttattaaatatttattaatgctcatgggtt

SEQ ID NO: 43594 - DNA, 1010 bp, Heterodera glycines
gagttttcttggattttcagaaaaaacagtccagccagggctaggagttttcttgggttttcagaaaaaacagtcaagccagggctaggagttttcttggatttcagaaaaaaggcccagccagggctaggagttttcttggatattcagaaaaaacaggtccagccatgggtaggagttttcttggattttcagaaaaaacagtccagccagggctaggagttttcttgggttttcagaaaaaacagtcaagccatgggtaggagttttattggattttaggaaaaaaataggtccagccagggctaggagttttcttggatattcagaaaaaacagtccagacaaggctatgagttttattggattttcagaaaaaacagtccagccagggctaggagttttcttggattttcagaaaaaaataggtccagccagggctaggagttttcttcgattttcagaaaaaaacaggtccagccagggctaggagttttcttggattttcagaaaaaacaggtccagccagggctcggagttttcttggattttcagaaaaaacagtccagccagggctaggagttttcttgggttttcagaaaaaacagtcaagccagggctaggagttttctttgatttcagaaaaaaggcccagccagggctaggagttttcttggatattcagaaaaaacaggtccagccatgggtaggagttttcttggattttcagaaaaaacagtccagccagggctaggagttttcttggatattcagaaaaaacaggtccagccatgggtaggagttttcttggattttcagaaaaaacagtccagccagggctaggagttttcttgggttttcagaaaaaacaggcccagccaggggtaggagttttattggatttttgaaaaaaaaataggcccgccagggttaggagttttcttggattttcaaaaaaaaaaggcccaggccagggtagggagttttttttggtttttcaaaaaaaaaaag

SEQ ID NO: 43595 - DNA, 990 bp, Heterodera glycines
gagcaaagcgttcattctcgcgctgccggcccaacctaagcccccgacgaatattcgccggtgatttttttaataatttttgattgaaaattagcgagccaaaggcttttcccctttaaaccgattttttaatttaaaaaatgcttttacaactttaatatttatattttttgctcttttaaattttaattgatttttttgagttttgaaaatgccgaacattttttggcacaatttttttattttgaaatgttttacattttacaaaaactcttttttaaatttatgataataattattattattattttaaattattccttccataattagcaacaaattatcttttttgaaaatggttcgttccctccgctgctaatgatgactcatttcccttccctttgccatttattttaatttgccattttattttaatttgccatttattttaatttgccatttttccaattttcatttggccccttttttgcagtttctatttttggaatcaatcaccttttttctgtatgttttgtcattattattattaatatcatttcatattcattttctcaccggcggcgaatttgtcgccgaatttcccaaaaataaaaaaaatgggggggggggggaagaatgaatcacccaccacacatcagcccaaccaaccaaacacatttttgatttgttttgggggacaaaaatagaaacaaaaagtaaaaaaagaaaaacgggggaaaattgccgaaagaattttttaaaaatcaacgaatgtttttggcgaaatgaatgaatggacgaaaaatcattatcataatcagcatatcaatagtcacttactctctgacgacggcacgggagcaaaaattatgccaattttgtttattgctttttcgatgtgccctaaggcaataaaaatcgttttttttttgcctaactggcccccgtgggacgcccaaaaaaatataggctataacataatgtttgtga

SEQ ID NO: 43596 - DNA, 1114 bp, Heterodera glycines
ttctgcagttcgcactaattatcgcagttggctgcgttcttcatcgatccacgagccgagtgatccaccgataagactagaattcattcttcaacagaagtgtaaaaaaataatgaaaaaaagaaaaagctggcggtgcccgagctgacactcattgagtcttaagccacgtgctaggccaagcacgggccctaccgcgtcgtctcatcacggccacggacgtagcagcaagcacaaacacaccgctagttacggcacgtaagaccgggaacgaaaccaccatccccagtcatgtgttatgtgcctgccacaacaaccgctcaacgacgcacagatgccagcacagccgttaggtcgccccacgagcgtgcatcccacattggcgcagcgaaccaaccaagcgaggcggcccgccaccgacacattgccacgcagcagccatacacaggctttcacacgtgcagcactgagcggtataccacagctccaacgtatggaagcaccccaaaagcatggatcgtgaggcagctgccccgtaatgttgggcagcgtccacaagtcatctcgaacgacctgtgcccatcagcggacgggggcatttggtggtgccaacgctagcccaacaggacagcaggtaggtggtgaataggaatcacttgggtaatgatccagcagcaggttcacctacagctaccttgttacgacttttgcccggttcaagccactgcgattaaatcggttccagtctgcataccgaccgaagccggaacactaaccgtccccgaatttctcgaaatggctcagtcccgggcagcgacgggcggtgtgtacaaagggcagggacgtattcagagcgagttgatgactcgcccctacaaggaattcctcgttcacggacaataattgcaatgtccgatcccaatcacggcaaattttcaccggtttaccaacccctttcggggaaggacaagcacgctgattttgccagtgtagcgcgcgtgcagccccggacatctaagggcatcacagacctgttattgctcaatttcgtgcggctgaacaccgaaaatccctctaaaaagttgtgcccacagaagcaatgagccaactattt

SEQ ID NO: 43597 - DNA, 778 bp, Heterodera glycines
tatgaaaataagtactatttactgtcatacctatgttaaatttgataaattagtttgaacttttgcaagctaatagagaaaaattctggctattttatgctactaagaatgtaaaatatgattgcctttaagcaaagttatgccatatgctttgtcgaaaaaattgctaaaaattttgaattaacgggatttctggcgtaatgatgatcaagttcctgatgttggaatacgaaacggccaagcaccggtctacgtcagttgggcccccacgtttgggccccagcatgttatttttggctataacttttttctttgttaaccaaatccaacattattagaattgaaaagaaaagaacaaaatggcgaaacaaaattaaatctatcaaacattttagttctttgattttatcgaataatctcaaatttagattatacacattttctaccgatcaaaaatgccaccaaagtttgacccaactgagatcaagatcggtatcctgatttggcttttttaacatttaacatgaaaatttagtttacctgcgttgtgtcggtggtgaaattggtgcaacttctgcgcttgcacccaaagttgggcccctcggattggtctgtgcattatttgaaattgtttaaaacccaatatttagtcgcccaaaaaaatcggcgaagacattgcaaaagccacccaggattggaaaggactgaaggtgacgtgcaagctgacgattcaggttcgaagaccatgccaattcaattttaactaagttaccgacgt

SEQ ID NO: 43598 - DNA, 913 bp, Heterodera glycines
ataattaaaattaaattatttaaattttctcccttttcgaacgactttctccttatgtttcttcgaaactaagaactcttgcgtaattagattttttgtttatttctccatcaacactagcgtagcagccgcaacggcttaactctggccaaaaaattgagaacatttccacgaaaatggaaataaacatttaaaaaaatgttcattacccaattagcccactaattgatgccaaagttacatgtaaattaggacatttaattaacctttttatacataaataaaattttattttttgtttattcccattttcctctctctctctctctgtccccgtcagcaaaatgtgtctcaaaattttgcacatttttctgctactgagactgatgttaagccctcatcacatttttacactgttgccgcggggggagggggaccaaaatgggtttaagctttcttcctctgagaaaagttttgcctccgcctcacccccaggccgaatgacgtcagagaaaagcgcccgagggggggggggagggcgaaatttaatccaattgggcgcccactaaagttcttccgccagacttacgacctgaagaagatggcttttgtcataatattactataatggaccaagaatattgtagccaatccaaagcaatttcattcggcttctttaaaatttggtcccggttaaaagcctcggattaattgcctcactggatttcatttggccaaatttcttgaaaatcgtaccatttttgaaatacataaattgttttaataatttatgcaaaacaggatgttcgggtcggtctttaaatagtaatttatttttatttaatctatgctctgctctcttaatacagcattttcaaattaaaatttccaaaacttttaaaaaaaaagtaaa

SEQ ID NO: 43599 - DNA, 1017 bp, Heterodera glycines
  unsure (1)..(1017): unsure at all n locations
acttcgcgttctcaagcgtgaatagttaatttttttgtgctgaactgtgttagggttctccttgcagtgcgctcaactaagtctcttggagttagagcatttttcatggtattttcaagaaaattgtgcaatgtgggcgacccggaacattttagacagtttccaaaccaaacactcatagtaaaaaattatttcgttagaatacgagaaataatttgaaacgaaacactggttactaatttgcatatatctctgcgaaaattccagatccaaaaaaatcagctataccattcgaaagctgctttcaggcgctctcagaaaacagtaaaaacgctcctattcatgcactaggcgctgagatatatgcacttgactttctgcatataattgccattctccgcagcaaacttcgcgttctcaagcgtgaatagttaatttttttgtgctgaactgtgttagggttctccttgcagtgcgctcaactaagtctcttggagttagagcatttttcatggtattttcaagaaaattgtgcaatgtgggcgacccggaacattttagacagtttccaaaccaaacactcatagtaaaaaattatttcgttagaatacgagaaataatttgaaacgaaacactggttactaatttgcatatatctctgcgaaaattccagatccaaaaaaatcagctataccattcgaaagctgctttcaggcgctctcagaaaacagtaaaaacgctcctattcatgcactaggcgctgagatatatgcacttgactttctgcatataattgccattctccgcagcaaacttcgcgttctcaagcgtgaatagttaatttttttgtgctgactgtgttagggtctccttgcagtgcgctcaactaagtctcttggagttagagcatttttcatggtnattttcagaaaatgtgcaaatgtgggcgacccggaacattttagacagtttcaaaccaaacactcatagtaaaaaattatttcgttagaatacgag

SEQ ID NO: 43600 - DNA, 1163 bp, Heterodera glycines
attaggaaaattttaccaacaaatatttaattaattttttaacattttaaaaaatttcaaaatacaattgacaaaaacatcaatttttcaaaaatttttatcttattttttacattatgttcagcatgctatcgccaatcccagtctttatgtgctgaaaccgcaaaatgaaggcggaggacacaattattttgatgatgaactcaaacaaaagctgctacaattcacgcgcgaagagcgagcagcacacacactgatgcaacgaatttggccggtgacagcgaaggtaataaaatggggaaacccagcagtaatcaattaatgaacaaattcgatgcttgaacgtttactcaaaacccataaaaagggctaaaccattttggaaacttaacgaaatttgttgaaattgtgtaggatggtaaataacattaaggacaacctgagaatttcttgaattaaaaattttgttgctttttagcaaagcaataaacaaaaagttttaatagttttttgcctaacatcatagcatcaatatttctatcaattattttgggacttacaaattaggattcaaactattgaaaatctgcgcaatttcattaaaatgtgcgcacattttgcagaatttcatggtccgtcccatggaggaggccgtgttggatgacacaatcgtcgagttgggtatgttcggctacctgctgggtgacaaacgtgacagaagcattgtgcgcaacaaacagcgcggctacctcgtccgcactaaaccggcgtcgtcagcggagggcggaattagcgccggaggcgtttacgactcgctgaatttgttctgagggagagtaaccaaactaatcattattttggatacctacagtattatatgatatgatgcgatatatgtttgtcattatgtctcttggtaaatatggtttataataccaacaattaaaatggaactatcaatcgactcctctcggtctctaaagcgagaatctgaaaattagcggaaaacattgcctaacgagtaaccactcgggaccagggctgggcgcaagtgcggattacggaaattccggggtttttggagttgcggaaatttttaaattttttgtttaaggggatggctacccgtatttcgatttatttatgaattaaaatcagattta

SEQ ID NO: 43601 - DNA, 878 bp, Heterodera glycines
  unsure (1)..(878): unsure at all n locations
aattgtctcatggaaattcacgtgcgattcggaaattcgccgagtaatggttgctgaaggcgtacactttggagaaaaagcacaaaaaggcacgcccatcgacagtttttttgtgggaaggaaacggagggccacggccaactgaaaagtgggaacaaattggttatttggggatgtttaggtttctccgctgtggcgcggctgtttaaagtgcagcagcataatggggcaaaatgcgaaaaacgtacggaaagagttcggcacattgggcattaaccacgctgaaatcgttttattgcgctgtttcctcggcacaaccggtaaaacggaagaatgctcatgcgccgtcttcaaagcctcccgcagatccgtgtccgtcggctcttccaattcaattaaatttttgccgctgcctttgatttctggcggacatccccagggcaatttcttcgggtccgccgaagagaagcgttcttcggaaaaaacggacggaaaaggcaaagggtcggactttttgcgcggttggaagtgaggcatttctgtacaaaggcaaacagtgaaattcggtaattaccaggcgataatttttcggattaaataataatttgtgaaacattcatttacaatgaaaaagtaacaaaaggtaaagcaaattcttattcttaatttttcttttttgaaaatgtataaaaatttctgggaaaacaaaagaaaaacacgagaaagtgccaattgaaagcaaaacaattaaactggcagaaagatcaaggaataatgacacatcacaacacagcaaagacattcgaaaggacgggtggcaattggacacttttggcattcattgctttgttncgcacttcctcacccaccgaaattgc

SEQ ID NO: 43602 - DNA, 935 bp, Heterodera glycines
  unsure (1)..(935): unsure at all n locations
cgaaaaatggcgtcggtggaaaagtancgaaaaagtaggccacttttgaaaaccaaaattagtaaagcgtaatggaactgtaggtttgtttcttccatgccaattcgtgcttaaaataacagatggcacctttcaacaattccattccattgatgctttttccgctcatttgggggggggggggacaaatgaacacaaattgattgatcgctgtcacttgctgaaggatgagagccgatcagctgaccgaattggacgaatttcgacagcgattcgacgacacggacaacgcaatgttggcacaaacaaagcacaaaataccgccaattttggcacttttccacttcccgtcactcaccactcattcagatgggctttggtgttcctcgacctgcttggccttgttctgctggtgcccattctgtgccatttctgttgccgcgcgtccgccgccaaaacagtgagcagaagttgctgcttcgccttcagagttcgtcaatcagccgaagggcattaagctgaacaaatttttcatccgctggctttgtttggtgctttgactttcccaatatttgaacacttccattgtttttgtgggcaatttcaaaaacagccgaacagatcactgatcaatcggaagggatggaaaggaaatgccgaaattaatgtccccacaatctctcctcagttttccttttatccctcccaacgcactttgttcttctccaggttcttctcgtactgctcgtcctcctctgtcttctccaacttttcctcctcctctctctgcttgacaacgcactcaaattcccttcaatcgttgacaaattattcaatttttatttggacgaagtgccgacagaaaaacgagcggaaataattgggccggcggaggaccaattttcatgcaaaataaaagtggaacacgaactgtt

SEQ ID NO: 43603 - DNA, 1000 bp, Heterodera glycines
  unsure (1)..(1000): unsure at all n locations
attggacaactacgtgttcaatgagcacagtcgncgtctgacctcttatggagcagaaaagggtgaatatcagatggggtgcgtcccatcctaaaaattcctcttttcgtctaaccatccctccctttttgtgcactatttcgtttcaacattttatcaattttttgttgtcttttgaaataaattgtgaaaaaatatacgaaaattattttcgcttttaattatgatgtacaatgcttttaagccccgccgtgaggcggcttctttttgtgcactattttcgtttttaaaattggatccggattttttggcttttttaaataaattgtgaaaaattcaaaacaaaaaacttttattgcgttacaaatgcttttaagccccgccgtgaggcgggacagttccaaaatttgcaccacattttactgtggaaagtccaagtaccttaattggacaactacgtgtcaatgagcacagtcgccgttggccagttgtgaaacagaaaaatgggaatatcagatggggtgcgtcccatcctaaaaattcctcttttcgtctaaccatccctccctttttgtgcactatttcgtttcaacattttatcaattttttgttgtcttttgaaataaattgtgaaaaaatatacgaaaattattttcgcttttaattatgatgtacaatgcttttaagccccgccgtgaggcggcttctttttgtgcactattttcgtttttaaaattggatccggattttttggcttttttaaataaattgtgaaaaattcaaaacaataaacttttttattgcgctacaaatgcttttaagccccgccgtgaggcgggacagttccaaaatttgcaccacattttactgtggaaagtccaagtaccttaattggacaactacgcttcaatgagcacagtcgcctctgacctcttatggagcagaaaagggtgaatatcagatggggtgcgtcccatcctaaaaattcctcttttcgtct

SEQ ID NO: 43604 - DNA, 1348 bp, Heterodera glycines
aaatgacttttggcattttgcacttgccccgccatgcaagcattcacaaggcgtccgcctgaccaataatgggacggtattggctcgtcaaattttggcacgtttttcatagtcattgcatgcaatttcgtagggcgtcgcggtgatattcaacaagaatttgtccacttccgacgtgaagaaaatgtgggtacaattcgtgccaaaatggtctacatgccgcacaaatggcttaaaggcaaaagtttgttcagttgttggcacaatgccaaaagttgtttttggcacagagcgtggcgttgtgccatggaatttggttgtgccaacaaacggtgcctttgtttttggggcgaccaatgtttgggaaaggcactaaaaaatgaaattatttataaattacgaattttaaatatgaaaattgaactttctctttgcacaatttggtggtaccgccgttttctccgcaaaatgttgcgccaaattcaaatgccaaaacaaatggcataaaatcgtcaaaaaatgctgcagaagaaagcgcttcttgaagttcatttccaagtggttcagcatctgtaaaatggtaattactattaaaatattattattaatttggctttacttttggtcaaattaatttccaaatatttttccgtttttttcatttgttcggtgccgaaaatgtcgtcgaatccatggcttaattttaaatttaaatccaaattttaaaatatttttcatttgaaatttgcctcgattcgtagctgatcactccgtcttggtgcttggaaatgatcagaccgtcccattggtcttcggcaatctcttcggcacattccacaaatttcagtttgccaattgttcctttgcccaccccaaaacgttttccaatttttctgtttttggccatttcgctttggtagcagatgaggagcctaaaaatgatttaaaataattaatttaaaattagtttttcaattattttactttgtgcagtcattttccaccaaaattgtgccatttttgccattgcacgttttccaaatgccaacgtcggatgacaaagggctgaaaaattgaaaatttgaaaaatttacaaaaataataatttattttcaattaagaaattaccgtatcggaggagctgagcaattaatgaccaagctcagaaagacggtcaatagagaaaaggagttcattgtctaattgattaattaattaatgaatattaatactatttaattaatgaaaattaaaaaattatttgatttattttatgaataaatattatttcccaaatgattaaataaaatgaaatgaatgaaagtggtgggatggaatttgttgatgt

SEQ ID NO: 43605 - DNA, 1741 bp, Heterodera glycines
  unsure (1)..(1741): unsure at all n locations
ttcagaattcaataaaaataacattcacggtgcgaaaaatggggtttgaaaagtttattggggaaaaaaagactttacaaaataatacccctgggagaagggagtgggaaacatgatttcaaaattttcaattttttctagtctaatctactcaaaacggttcagaattcaataaaaataacactcacggtgcgaaaaatggggtttgacaagtttattggggaaaaaaagactttacaaaataatacccctgggagaagggagtgggaaacatgatttcaaaattttcaattttttctagtctaatctactcaaaccggttcagaattcaataaaaataacattcacggtgcgaaaaaaggggtttgaaaagtttattttgaaaaaaagactttacaaaataatacccctgggagaagggagtgggaaacatgatttcaaaattttcaattttttatagtctaatctactcaaaacggttcagaattcaataaaaataacattcacggtgcgaaaaatggggtttgacaagtttattggggaaaaaaagactttacaaaataatacccctgggagaagggagtgggaaacatgatttcaaaatttttgttgaaatatttgtcgtgctctgaagggcgtgggagggggggggcgaaggcccaccacgaggccgcgaagaggccgagtgagtaccttccgtgcaggaaaattattaaattttaaaaattttttaattgctttttaaatatgccaaaaaatgtaggcttaacttttttagtgaaaattcgatcactcatattttttgctaattgagcagaagcgtaccaaactttgcannnggatactccccggatagaaggactaacttaccactgaagatgagncccgagctagctggctcaaaaaaattttcgaaaatctgagtctttcgtttttatttattttttgcaaaattaattcttaaatattttttcagaaagggttctgaaacgcaccaaattttatttacatgttagtttaggcactctgatgctttttctatcaaaaagggagatgaataaaatttttaaaaatttttaattcctttttaaacaggccaaaaagtttaggcttaacttttttttcagaaactgatcagaagcgcaccaaactttgcagggatactgaaaggaagagaaataacctattttaaatattatctagtcagttcatttaaataatttttatccaaaaatttttttttgggttttcggggcagtccccctgaaccgatgcgcccagatttatggggagaccgaatccttcgggaatagcttccctatagcctgtactttaattctgcgttggatttttgctccccataattgtttgagtaccccaaacggacacttgaaaaaatcgatttttttgttttcggggcagtccccccgaaccgacgcgcccagatttatggggagaccgaatccttcgggagtagcttccctatagcctgtactttaattctgcgttggatttttgctccccataattgtttgagtaccccaaacggacacttgaaaaaatcgattttttttgttttcggggcagtccccccgaaccgatgcgcccagatttatggggagaccgaatccttcgggaatagcttccctatagcctgtactttaattctgcgttggatttttgctcccccataattgtttgagtacccccaaacggacacttgaaaaaatcgatttttttt

SEQ ID NO: 43606 - DNA, 109 bp, Heterodera glycines
ccgtcaacgcgggcgcggtcaacaccctggccatcaacgccgacaagctgaagccgatcccgtcggccagccagaactgttcggtgaacgtctacgccgacggcaaact

SEQ ID NO: 43607 - DNA, 998 bp, Heterodera glycines
ttgaagaggctctccggaacggattagcatcggggttacgagatagaaaattgtcctaaaaagagatagccatttttctgagaattaattcacaatttccgcagctcttagggtaatggaaaaaattttgaagaggctctccggaacggattagcatcggggttacgagatagaaaattgtcctaaaaagagatagccatttttctgagaattaattcacaatttccgcagctcttagggtaatggaaaaaattttgaagaggctctccggaacggattagcatcggggttacgagatagaaaattgtcctaaaaagagatagccatttttctgagaattaattcacaatttccgcagctcttagggtaatggaaaaaattttgaagaggctctccggaacggattagcatcggggttacgagatagaaaattgtcctaaaaagagatagccatttttctgagaattaattcacaatttccgcagctcttagggtaatggaaaaaattttgaagaggctctccggaacggattagcatcggggttacgagatagaaaattgtcctaaaaagagatagccatttttctgagaattaattcacaatttccgcagctcttagggtaatggaaaaaattttgaagaggctctccggaacggattagcatcggggttacgagatagaaaattgtcctaaaaagagatagccatttttctgagaattaattcacaatttccgcagctcttagggtaatggaaaaaattttgaagaggctctccggaacggattagcatcggggttacgagatagaaaattgtcctaaaaagagagccatttttctgagaattaattcacaatttccgcagctcttacggtaatggaaaaaattttgaagaggctctccggaacggattagcatcggggttacgagatagaaaattgtcctaaaaagagatagccatttttctgagaattatttcacatttccgcagctcttacg

SEQ ID NO: 43608 - DNA, 958 bp, Heterodera glycines
  unsure (1)..(958): unsure at all n locations
ttaaaaattcatagaaaatttaaattcataggtactactgctaaatcaacgcagagacgcctttccttgacctttttaggcccctgcaaaatctggtgcgcttctgatcactactcgaaaaatgagtgattgaattttcactaaaaagttaagcctaaactttttggcctgtttaaaaaggaattaaaaatttttaaaaatttattcatctccctttttgatagaaaaagcatcagagtgcctaaactagcatgtaaataaaatttggtgcgtttcagagcattttctgaaaaaaatatttatgaattaattatgcaaaaataaataaaaatttctaaaaatttgatcgtccataaataatttgtaattgatcaggggctcaccaaattttgcagggatacgtatcggaacactacaaatgcttactaattttcctagattttttaaacccggtgaaaattttttgcagacaccaccacttttgcacttaaaaaaatttcaaaaaactttaaaaattcatagaaaatttaaattcataggtactactgctaaatcaacgcagagacgcctttccttgacctttttaggcccctgcaaaatctggtgcgcttctgatcactactcgaaaaatgagtgattgaattttcattaaaagttaagcctaaactttttggcctgtttaaaaaggaattaaaaatttttaaaaatttattcatctccctttttgatagaaaaagcatcagagtgcctaaactagcatgtaaataaaatttggtgcgtttcagagcattttctgaaaaaaatatttatgaattaattatgcaaaaataaataaaaatttctaaaaatttgatcgtccataaataatttgtaattgatcaggggctcaccaaattttgcaggnatacgtatcggaacactancaatgcttactaattttccctagatttttaaaccc

SEQ ID NO: 43609 - DNA, 918 bp, Heterodera glycines
ttctatgccaattaattgattaatatttgtataattaattatttattcgtttataggaatcgataaatgaaaatgaaaatgaaaatggcacatccgatgagcaaaatggaggtcagtcagtcattggataaatgaatgatttaaaatattggatcagcaaaagtaaatttgtaataatatttggattacgaatttaaaatgtattttatatcggtttatctcagttgggcgccagcagatttttggattataacttttttctttatcaaccaaatccaacaattttagtatcattcgaaagtcctccttagtgtctgtcttctattatcctgcaaaattacaaaaaatttcgtcagggttaaaaaaaagttatagccagaagaattaaaaaatcatattttccaacttttttggccataacttttttgaaccttaacaaaatgtatcaaaattttgcagataattgaggacacttagggctttatttggttgacaaagaaaaaagttttagccaaaaacgtgccggcgcccaactgatgggttccgatttaaatttttatttaaattttctttttggtgcctttgtttttatgagtaaatgtttttggcacaaataaacacataaattttaacaattttaatttatttctccttcaaaaggtccaacattttgtgaacctttggcggatccaatccaagaaaaatggcgagtcaaaagattgcttttacggctgacaattgccccaatggaatcggtggagcaaaaaatgcgctcattcattggcatgcggcacgaatttcacgacggcatttttgaacaattttcgacattgaaagaatttttgcaaagggccgcaaacattgtattcaatccgacaaaatatacggtaaatggaaatcaaatataattatttaatt

SEQ ID NO: 43610 - DNA, 1199 bp, Heterodera glycines
  unsure (1)..(1199): unsure at all n locations
gctgttgctgaactgacccattgggtgctcgtctccttttggacacacatttgcctctttcctcggcttcagcattgctttcctacttttcctgctgttcaccaattacacgggccgtcatttttgccactgtttntacggtgtgtggggggaaaatggcggcgattttcattggtttttggactataagatttttcattgtcaaccaaatgcaacattgttggtatcatttgatagtcctaagtatcctctattagcttgcaaaattccttgaagttttgtcaaatttgaacaaacttatggccaaaagtacatcaacagaaaccaggttttcagtcatttttggccataatttttttgaaccttaacgaaatatttcgaaattttgcaggctaatagaggacacgtagggctatcgaatgataccaataatgttggatttggttgacaacaaaaaatttatagttcggggtcaaaaggacttttcgaccctatggtttatttgttgcttttcgaatttattttcgtactatttgacctgtgtcggattccagctccctaaaactcgattccaaattttttttaggcacagtaattttgccttccttttggcagggatttcaatttttaggccccaaaattctcttcctttttttgcaggtttgtcaaattctttgcgtgctgatcacttcactgacaattatcgctgatgatgactcaaatccgtcaattggcttcagcaaagatccaattttgtggataaaatgtgagttttttttaaatttcattttttcactgttaaccaaatctggtaatgttttcacgggtactaactaatgtggtttgggtcccccttttgggtcaaattttttcaaaagcgtaaccagacagtcaggtgcactatttccttctcttcttccgcttagtcactggagaaaggaagaaatagtgcgatgtctgactgtctgtcaacgtggggctgcggcggatggagatgtagacagtaaacagccgtgtctggatcagcaatatctggacgaatcagaagttcctccggacacaaaacatccgaaccgaccagacgaatttcctttttttagaatagggcataattaaccgcaattaattatgcctaagggcacctctgtcgaagtgtcaactggcgacgagaagtggaggcgtcgaaaaagctttgaaat

SEQ ID NO: 43611 - DNA, 915 bp, Heterodera glycines
  unsure (1)..(915): unsure at all n locations
tatttgtactttgttctccacgccctttccccccttctcattgtgtttataaggagaccattcccctcctttttggactcttccctcattcattcgtttttattattatttgcatttgtccaccgaccgatcaataaatatttttattctttgtgtgttcaattggaggaacacaacaacaattaaattatttatgtcattttaaaatgaatatgaaaattgaccacgttcattttttatttttggtgctacaaatgacgaaattaaaatttttttacagaatacatttgggaaaattaattttttttttttctgaagaaaagtatattttttttaaatcggtgaaacaattgtttttagaagtaaactaatttttgtggtcttacttgaataattatgaaattgaggaaatggacacagctcagcgcaggattgccatcagaagaaaattgaaaaaggacgaggcttacgatgatgatgatcaacgcaaaaaatataggatttatcaaccaccaccactgcctcgcgcaaaagtaaaagttgagcacccgaggcctcctccaccccggccgcgtcctaacgtcaagagagaacaacaacaaaagccaaagtcagaattcaaaccgccggcgacatcaaagaaaaccggtcaccccactccggcaaaaagagtgccagagtttgttgatctcgatccacgaccatccacatcaaggcaggccgggtataacccgcctcccccgacgcccaaaataaaacatgagccgacaacaaagagacctatgccataccgtatcccaaaaagagaaccaaaagtcgaggaagcgccacaacagcaacagcctcagtagtatatggtgccaaaacggcgcgngtacaggaacgactcctccaaaatcccaagcctattgaagg

SEQ ID NO: 43612 - DNA, 884 bp, Heterodera glycines
catcctttttccctgatcagctggtaggtgccaaatttcttctaagttattttccggaatttccgggatgaaaagaccctctctttttgacctttttaaaatcgtatccgtttccaaatttaacttatttttaaaattgatcatttcgtcaaactcctcttttggaatagcaaatgcttggtcgggaattatgaattccttattttcgcagtcccttttaagtgaggcatttacaaaagtgagagcaaaatcaccactttttgcagcccaaatatctgtcgaataatcccctgaccattttgaaattttaacataagcacattgttgggtccgatcgggcttccaaataagactgagctgtggacacctacaatttccggcctgatagtcacatgctgaacattcatttattggtgtgttcactccttgggacccataacgggtgaaaacaactgttccgtacacataacaatttgcgatttcgtaagttttccaaaaaatccccgcaggccatttaacctttctaaaaattcttctaacatgcgaattgatccctcattctctccagctaatgtagttctaatcgcttcatttaaacgatttgcaaattcatatactttttcaccgggcgcttgtctgcaaatcgataatgcttggcgtgcaatggacctcgtattttcattttcaaatttccctttcaaatgattaagtgcgacacttaatgttgttgggtgcgggtcaatcgaatccaattcggcacgtgcttgtcctgtcaggaagatgtgcaaacgactcaacttttgggcttcagtcaactgggggtaaagcgaaagcatatcctcaaatttcgaaatcgatcggggaaattgagactggtgggtttc

SEQ ID NO: 43613 - DNA, 68 bp, Heterodera glycines
ttttttttttttttttggggggggggggggggggggggggcccccccccccccccccccccccccccc

SEQ ID NO: 43614 - DNA, 1236 bp, Heterodera glycines
  unsure (1)..(1236): unsure at all n locations
cccaatcaaaaaagggaaaaaaatttgcagtcaaaaaattatcgaantttctccaatttgttttccatattccgnnaaagtatcggggtatcataatgccaaacnnaaaacgaaatcgttntaaaatattcctttctggactgacttnggtttctgnatatcgaagctgttttctacgctatttctaaaacggttataccaaacccccagatttttgaatccggttttcagaaaaaatgccttgtggtgaaaacaatatttcacatttcactccataactttgtgagttcggcacggatcgagaccgggataagaccattggaaagagcagctcgagctctacaagaacgtatggaaagaaaaaatagttatttctgggactttttcagaaatcagaattaattctccaatgtggcccaaattttaggcccccagccacagccccttgcttctcccagttttaagtcttggatttgtcaaataaattcaagacttcaaattaataatcaaaaattctcttaaaatttttttgaacccaattcaaaaaaggaaaaaaatttgcagtcaaaaaattattcgaatttctccaattttgtttccataatttccgaaagttattcggtatcataatgccaaaacaaaacgaaatcgttttaaaatattcctttctggacttgacttggtttcttgatatcgaagctgttttctacgctatttctaaaacggtgataccaaaccccagatttttgaatccggttttcagaaaaaatgccttgtggtgaaaacaatatttcacatttcactccataactttgtgagttcggcacggatcgagaccgggataagaccattggaaagagcagctcgagctctacaagaacgtatggaaagaaaaaatagttatttctgggactttttcagaaatcagaattaattctccaatgtggcccaaattttaggcccccagccacagccccttgcttctcccagttttaagtcttggatttgtcaaataaattcaagacttcaaattaataatcaaaaattctcttaaaatttttttgaacccaattcaaaaaaggaaaaaaatttgcagtcaaaaaattattcgaatttctccaattttgtttccataatttccgaaagttattcggtatcataatgccaaaacaaaacgaaatcgttttaaaatattcctttctggacttgacttggtttcttgatatcgaagctgtt

SEQ ID NO: 43615 - DNA, 982 bp, Heterodera glycines
ctctaattattataaatgagactgagaagtgagattatgtcgagacattttgaaaacgatgggagggaaattaaaagagaaattaatttcctcatttttctgcttatggttacttcctcctgctcaaaagcagcagtggaagaagaaaaagctggaaaattggataattattgggtaaattaagaagaaataaattttctcaataaagtgcataaaattttgtgtggctttttttggcctttacattttcatatgggggcattttttgaaaattaatcggcgaaaattcgtcgatgaacagattcaataaattttcagcaatttttagatttttataaaattttatgttaattggtcattgagtttgggggagaaggaattggaccaaaacaaatgggaagtgagagaaagaataaagaggaagagagggaaaatggaaaaagaggagggcagcagcaggagaaacgaaaaaaggagtgaggtgaagggggagagggaaaagaaagaggcgaaaaggcaaaacaaaaaaaaagtctcagaaaattggcatttggaaaggattacttaataaatagcattaaaaaacataattaggtaattaataaaaggatttgccattatgttttaatcagaattttgtttattttgcccataaatccgaacctttctcattaagctatgatgtttttggcatgggaaaagggtgcaaggggaggacaaagtgtgccgagccgaggtttgctgttctgagttagtgaatttgatcacgtttgtagtttacatatccttaattacccccccccccccccttaatttgccattgcgccgtccctttttttcctttctctttaatcttctgctgtctggtattacttccttctcctcttcctccttttatgggtcattatttacagtatagagaagataatgcgagttaatccctcaaaaaattataccatttgccaaaatggggggggggggg

SEQ ID NO: 43616 - DNA, 927 bp, Heterodera glycines
  unsure (1)..(927): unsure at all n locations
tatttcctcctttttcagattagaaatgtttaaaaatctcttagtacacagcctttaaaatttttagttgatatattttttagatttaacatttgaatttttttggtacattttttggggaatctgaccttagcctatttttgaagtatttattgcggccttttctcttgataaagtaaatagtgaacatcacaagtcagcaaattacagtcatattgaagaaaaaagagtgtccaagtctcttaagatttttaaacgttaatttattttaaaatcgtagaagcagcagctgactaaatgactgactaatgatgactgacttgactgatatggatactttttaacaaattgctaaaaaccaccaataaaagtagaggaagcaacaaataattttacattgcaacaaatatttagaaatttttcttttaactttaaaaaaacatttatatatttatggtattcttttaaaataatttgataattaaaaaaaacaaataataaactaaaaaattttatagaaaatgttaatgaaaatttttgcaatctttttgcaaatgatctccaacaaattatttttgctgtctgaggagcaaatttcatccaatttttcagaatgtggcatttcgaatttcgaacctccgttcattaatatgccaaaaataaaaatcggaataaatatggcaatttatttttatatttctttcaatcaaaacaattttttaatttaatctttttcattttcgaaattataggtatacatgggacaggcggttgagaatgacaattctttgccgtggatggcctcgcttatattgagaggaagtattaatttatatttgttttaattaattatgacttatttataaagtaactattattaaactcgaataataaaaaataaataatctttttanatttttgtttcaa

SEQ ID NO: 43617 - DNA, 1001 bp, Heterodera glycines
agtcagttcatttaaataattttatccaaaaaattttttttgggttttcggggcagtccccctgaacccgatgcgcccagatttatggggagaccgaatccttccggaatagcttcactatagcctgtactttaattctgcgttggatttttgctccccataattgtttgagtaccccaaacggacacttgaaaaaatcgatttatttttgttttcggggcagtccccccgaaccgatgcgcccagatttatggggagaccgaatccttcgggaatagcttccctatagcctgtactttaattctgcgttggatttttgctccccataattgtttgagtaccccaaacggacacttgaaaaaatcgatttttttgttttcggggcagtccccccgaaccgatgcgcccagatttatggggagaccgaatccttcgggaatagcttccctatagcctgtactttaattctgcgttggatttttgctccccataattgtttgagtaccccaaacggacacttgaaaaaatcgatttttttgttttcggggcagtccccccgagccgatgcgcccagatttatggggagaccgaatccttccggaatagcttccctatagcctgtactttaattctgcgttggatttttgctccccataattgtttgagtaccccaaacggacacttgaaaaaatcgatttttttgttttcggggcagtccccccgagccgatgcgcccagatttatggggagaccgaatccttccggaatagcttccctatagcctgtactttaattctgcgttggatttttgctccccataattgtttgagtaccccaaacggacacttgaaaaaatcgatttttttgttttcggggcagtccccccgaaccgatgcgcccagatttatggggagaccgaatccttccggaatagcttcactatagcctgtactttaaaaatgggttggatttttgctcccccataattgtttgagtacccc

SEQ ID NO: 43618 - DNA, 1204 bp, Heterodera glycines
ctgttttttggattcaaaaattttttaaaggcctaaatgaaaaatcggcctcgataggattttaagttggaatgtttgccacattttttgcttcttcaccgaacccctagggcctaccagtttttccgaaaaactgactaaaaattgcatacttttttgggccatttcagcgccggtggaataactccccggcttttgatgggaggaggtcggtgtaaggggcttttttgtagagctcgacgagctctatccaaccatgtttttagatttcagaaattttcgagctaggccccctcgaaaattttccgtttttgaattttattattttttacagatttttccggggaaaacggagaccactttcaagcaaccgtttttcatgctctatcgattggtgtcattttcagaaaaaatttttaaaatttttttggaaatagaaaattttgattgctaggcctcaatttcagttctggctcaataactcgtcaggagttgattttatcaaaaaatcgtctaagagcttttttgtagagaattttaagcccaatctaatgtgctttatctcatgttttaaccatgagtttaaaaaaagttatgaaattaattgtgattttgaaattaaaagccataggggggaccccatggttttgcatttcatgaaaaatttttttgctcctaaattatccaaaatgcatttttatggcctaatttaaggtgctgaactcgaatatatactttatttttggtttcagactttttggaaggtggttacaaattttgaaaaatcgtcaaaatttgagccccggaaaatccagtgaaatttcgaaaattcataactctcttcgtttttgatcaaatttagtggaataaagtttgaaaaatagcaaaaaattaggagaattttatgagattcatttggaatttctatcttccaaaataaataagttattccagaatttcttgaaaaattcgatttttcagaaaaaaattcagaactctgttctgaaaaagtattttttataaataaaatactacaaaaatccgcaattttttgctctattttataaattttattttagctttttatcacttttttgaaaaaagttatagaaataaaagacattttgtaatttgggaccacaggggtgtgaccatgattaatgagtggaaaatttttttcaccacaaaatcttccagaaaatat

SEQ ID NO: 43619 - DNA, 843 bp, Heterodera glycines
acacggtctgatcaatttgaataggcaaaaaaccaccatattttgtggccatatgttacgaaataagacacagacagaaatgaaaagcatatttttccgatagagcttcaaaagaaaaaatgaattaaaaaacgttttaaatataagaccaaattgttggttttagtattttaggtatttctaagttacttggaagtcggtcaggttggtgttcagccagtacagttgcagaatggtcacaaattgggtgagggaatagccggccatgtacttgaacacgccaaacgaagtgaccaacgcggcacgaccctcgcgaatgatctgtaaaacggaggggggggggggaggggggttataggcaaataaaaaattttaataactttttttttgaaaaattgcagtttcctaatatatatatatatatatttttttttttgcggcggcgtcagtcagcaccgcttcaccgaattcattactaatagaatttgtcattttgtgccgaaaagttcgccaaaaatttgttgacttttttgtgcataatattaaatcatttccaaccgttggcacgcatcgaatgtccgcaactttggaagtgaacggtgccgcgatggacgcctccgcttcggacaacgaaatgccggcatgtgctgccttcagcgcggcacagtcgttggccccgtctccgcacatggccactgtgtagcccacgtcctgcagctggttgaccaactgaaaaaacgggagatgggggcgaggaacgaacaaaacacagggaattgcgtcgttcaaaaaattatatataatttaaaaatgtttagtttatgaaactggaaaaagaaaaca

SEQ ID NO: 43620 - DNA, 1318 bp, Heterodera glycines
tttatgaaatgacagaaagtactttctaacctgtatttcttgtcttttgttcttcttcctacacctttccatgcactaacatacctacctaccttacattcctctcggaggaaaacaatcgagtggaccagaatccgctaataaaaaaataaaatactcggccttaaaaacaacataatgtgaataaaccaaagccgaaactcaacgaagccaaattgtttttcgaagcacaaaattaaagtccaaaaagtctcaaaattttctaagcccgaaactctgctgccccatgttttaagcgtaggccgattcacccacacagccaaaagtgtatcatcatcgtcattttatacacgaacactcaaattaataacgtatctctccatctgtagaagactgagtaacgatacatttccggtgcatatgtttagggtcactgcacgctatttggtaagacttggattaatggggaaccgcaccacacacatttgcagtctctgctctgactgataattactaaatatcgacgatactgatagaaccatttactgttacagtaacaacacttaaccgtaatgctctaccggcgaagcgtcagctgaaagggggagcagcccggaaattagcaccagttcaccaccatattcatacaaattgtctaattaaagttaataatttataaggttttagttaaaaataaattttagatccaaaattttgatgaggacaattactgtttattttacgctatgcaagcaacactggttcgatcaattagttacttggatcgtcgtcgctttcatgattacgtcaatggaaacagtgaaatgagaggaaaacttaaacatgatgctttggaaatgatgaatgctgttaattcaccagctggccaaccaattacgatgcggaaatatatgtgccgagaattgtggactggtggaatgggaaaaaattcgttggtcaatggaatttcaaaacatttgtcttcggatcggcaggccattacaagcctttattcaaatatggaccagaggactatgttgtaccgatcatcctttacttcgaagaggggcattttaatggtgtgcagaaaagtgggaatttgttcggcaagccatattgtctaagttgtgaaaagacctacgatcggccaaaacgtcacattgttaattgcgaagcccgctgcgttaaatggtaataaacaattttaacgaagaattaattatttttaagctcccaaatgggtccaatatttccgtgcaaatcaaataatggattccgacgaaaatgcgaagaatgcgataaattattcttcaacaac

SEQ ID NO: 43621 - DNA, 970 bp, Heterodera glycines
ccgaaattttttttctggctattttatcaaggtttaattatctatatacataaatctaattataatgctcagactttcaaaatttttccaaaatggaccctaaaaattcaaaaaaatgaatttttcggacattctttggtaaattgaaatttaaaaaatgcatcccaaaaatctgttttttgatttttaataattcaattaaaaaattttttttcaaaaattctacaaaaattgatttttgaaaattacggatttcgaattacgggaaattacgggtttttggacccccgtaattgcggattgcggatttcagtaactgagaaaatcgccgtaattgcggattgcggatttccgtaattgaaaatccggttgcgcccagccctgctcgggactgaagtgtctatttccagcccgactcaatgtaactctttgtgattgcttgccgtcaaatttttctgattcttgctttggagaccgagaggagacgattgatattataatttttcagttttgagtctggggattataaaccatattttcctgtctctttttcttaatcttcaccgttggctctcttttgcccttttcctatttcactttcatcctccttggcactcctacacttttagcatttttttcacccttttcactattgtcaatttggacaaaatcctgttaataaatataaataattttcataactttttttcctcggatccctgttgaataaagtgcgccgcaaaaaaggttgttgtttcacccttttgttgcctttaataaatttgaatttatcactccaaatgccaatggcaaatttattgatccaataattccaattaaactacataattccattttattgtcccaattttcgaaatcattttttgggcaaaagaaattcacgcagcaaaatattaatgttcgttaaataaaaataatatattaaatgaatctcggagtctatttaata

SEQ ID NO: 43622 - DNA, 1577 bp, Heterodera glycines
tcgatcgtctgacttgggtataggggcgaaagaccattcgaaccatctagtagctggttccctccgaagtttccccctggatagctggagctcgttaagcagttatactcggtaaagcgaatgattagaggacttggggacgaaatgtccttaacctattctcaaactctaaatgggtatgaagccagggttgctttactctgaacccaggcgttgaatgtttgagctccaagtgggccatttttggtacttgcgctgaacggagttgtttctgctgaaactatccgtctttacaagacggctgtaatagcggcgcttggcaacgctcgctagcagctatctggttgatcctgcctgaactgatgtgttcatttcaaagattaagccatgcatgtgtaagtttaacctgccagacagggaaactgcgtacggctcattacaccagctataatttacttgaccttgacttcttacttggataactgtggtaattctagagctaatacatgcaccaaagctccaatctccccagagcggagcgcatttgttcgccacaaaaccaagcgccctccgggcgtccagtgttgactcagaacaactaagctgatcgcacggtcttgtaccggcgacgtgtctttcaagtgtctgccttatcaactttcgatggtagtgtatctgactaccatggtgatgacgggtaacggaggataagggttcgactccggagaaggggcctgagaaatggccactacgtctaaggatggcagcaggcgcgcaaattacccactctcaacgcgaggaggtagtgacgagaaataacgagaccgatctcttatgaggccggtcatcggaatgggtacaatttaaaccctttaacgagtatctatgagagggcaagtctggtgccagcagccgcggtaattccagctctcaaaatgcatagaattattgctgcggttaaaaagctcgtagttggatctgtgctagccgtccggtgcacactttgtgtgttactggtttggttggcttttctgccggtctttccccggcgttggcctttaccggtcggcgtcggtgggctggcgagtttactttgaacaaatcagagtgcttcaaacaggcgtttcgcttgaatgttcgtgcatggaataatagaagaggatttcggtccgattttattggttttgctgaccgagataatggttaacagagacaaacggggccattcgtattgctacgtgagaggtgaaattcttggaccgtagcaagacggactacagcgaaagcatttggcaagaatgtcttcattaatcaagaacgaaagtcagaggttcgaaggcgatcagataccgccctagttctgaccgtaaacgatgccaactagcgatccgccggcggatttattcgccctggtggggagcttcccggaaacgaaagtcttccggttccgggggaagtatggttgcaaagctgaaacttaaaggaattgacggaagggcaccaccaggagtggagcctgcggcttaatttgactcaacacggggaaactcacccggcccggacaccgtaaggattga

SEQ ID NO: 43623 - DNA, 842 bp, Heterodera glycines
atttatatatttttttaattgtaaatgaaaaaggaaaagataaaagcatcaccaataaacaaatgttcaatgaaatcgaaaaatcgttcgtacatttggcttaatcacagaaatgaactgcttctgttcccccgtccctctccaataaatccgccggtcgtttttgcttaatcatcgacatttacgtacaaaatgtaaatcatcgcattcgtttgctttcgctgttttttaattttaataaaaaacaaaaataattattcttattaacataatcataatttggtattatttcactatacattcctttgttagtcaacatcactgttatgacgtcactttttcgacttttacttaaatcacctcctttgattatctcaaatttcataaccaaatttactaaacaccgaaaaatgctctcccccgacctctgctgctgaaggttaaaacactaatgaggctgtgaaacggcaaaatgttgataatatgataatgaccagaaaattcgcgagctgagaattgcaaccgaaagtctttgaacagctcttcttcccatcggcgaatggatttgttggctttttcaatcggctgtcagcaaaatttcgttgtccatcggcgatcagcaaaaaaatgctttgcattcctttcttttttgtccatcctaaacaaaaacaataattttcaataaccggcgaattaattggttttagccaaaaagaagctggtacgaaatgacctataactaattgctgagaccaaatgaacgatacttgtgacttgaatactaaataacaccagcagtgcaagggcgtagccaacctttggcttcggggggggggggctga

SEQ ID NO: 43624 - DNA, 1255 bp, Heterodera glycines
tttctcggagaatgcaaccatttggacaatgcttggcccgcagttgcatttggcccatcaaaattatcaccaattggatcaggcaacaagtgaatggaataaattgcaatcaactgatcgagatcggtgagaattgttggcgaagtgcgacgacgcaaattgtccaaatgatcaccatcgataaagcgcaaacggcgaatgtttgacgcaaagattggccatatttcacgaacaaaaacatcccaaatcggctgccggtcatccgtggtctgtgagggaagaatccccagacgcaacttggtgcctcttttgtcgaaaatttgatgatttgaacgaagaaaagcgatgacggagtgatcgatgtaactgtgaaaatggaatgaatgcttttattgtgagtctctctgattttaaattactcaatcataaggcattttaaacggattttgctgggcaacggacggtcgggcaattgaaattccgcaaatttgtattcacccataagtacagacagtttcgcttctggtcctttgtccttgcgacgaatttcgattcgtctccaaattgtcaattcgcttttgccatcgaaatgtttgtccaccaacgcattgaaacgtggcgaaagaagtgccaatttgaggccgagttgagcatggtcaaaggatgggaaaatgtccatccaaacgtcattgcaaatccaactgaaataatgaaaataaattaggcaaacaagaatatgtgacttttaaaaaattcattaccgtcggttcattttgtggcaattagcacaatttgcctttttggaatgatgtcactcaaatagcaggataatcaattgcgttagaaatggttttttttttaataatgagaggcaaggcgaaaaacaaacatttttatagtcatgaaaatgggattgatgaatgaatgtttgtatgtatctttggaatcgtaaatctacaatttgattttaagtgttgaattgatttggtttttttctctatcatccaaatcaaacaatcttggtatcatccgaaagctcttaacatgctcatcgataaaaatttcaatggatgaattaaaaatatctgggcattaaataacaaatttaaaacagtttaggaaaaaattataaaaactggaattttttaaggaaaatcaaccgccacaaattaaatccgttttcaatatttttcacttgtggcataagctttagaatgccaaaaaaaaaactcgaaaatattagaattccaactaa

SEQ ID NO: 43625 - DNA, 962 bp, Heterodera glycines
ttatggggagcaaaaatccaacgcagaattaaagtacaggctatagggaagctactcccgaaggattcggtctccccataattctgggcgcatcggttcggggggactgccccgaaaacaaaaaaaatcgattttttcaagtgtccgtttggggtactcaaacaattatggggagcaaaaatccaacgcagaattaaagtacaggctatagggaagctattcccgaaggattcggtctccccataaatctgggcgcatcggttcggggggactgccccgaaaacaaaaaaaatcgattttttcaagtgtccgtttggggtactcaaacaattatggggagcaaaaatccaacgcagaattaaagtacaggctatagggaagctattccggaaggattcggtctccccataaatctgggcgcatcggttcggggggactgccccgaaaacaaaaaaatcgattttttcaagtgtccgtttggggtactcaaacaattatggggagcaaaaatccaacgcagaattaaagtacaggctatagggaagctattccggaaggattcggtctccccataaatctgggcgcatcggttcagggggactgccccgaaaacccaaaaaaaaattttttggataaaaattatttaaatgaactgactagataatatttaaaataggttatttctcttcctttcagtattcctgcaaagtttggtgcgcttctgatcagtttctgaaaaaaaagttaagcctaaactttttggcctgtttaaaaaggaattaaaaatttttaaaaattttattcatctccctttttgatagaaaaagcatcagagtgcctaaactaacatgtaaataaaatttggtgcgtttcagaaccctttcagaaaaaatatttaagaattaattttgcaaaaaataaataaaaacgaaagaccgcagattttggaaaatttttttgag

SEQ ID NO: 43626 - DNA, 1132 bp, Heterodera glycines
aaaaaaattcttgccgaaaaaatggctatctctttttctcctggggatttgaccgcaaacttggtaccaacatttgccttctctagtctggctctaccaaacactcacacgatatttgaaatgctaacgaaaaaaattcttgccgaaaaaatggctatctcttttttctcctggggatttgaccgcaaacttggtaccaacatttgccttctctagtctggctctaccaaacactcacacgatatttgaaatgctaacgaaaaaaattcttgccgaaaaaatggctatctcttttttctcttggggatttgaccgcaaacttggtaccaacatttgccttctctagtctggctctaccaaacactcacacgatatttgaaatgctaacgaaaaaaattcttgccgaaaaaatggctgtctcttttttctcctggggatttgaccgcaaacttggtaccaacatttgccttctctagtctggctctaccaaacactcacacgatatttgaaatgctaacgaaaaaaattcttgccgaaaaaatggctatctcttttttctcctggggatttgaccgcaaacttggtaccaacatttgccttctctagtctggctctaccaaacactcacacgatatttgaaatgctaacgaaaaaaattcttgcccaaaaaatggctatctcttttttctcctggggatttgaccgcaaacttggtaccaacatttgccttctctagtctggctctaccaaacactcacacgatatttgaaatgctaacgaaaaaaattcttgcccaaaaaatggctatctcttttttctcctggggatttgaccgcaaacttggtaccaacatttgccttctctagtctggctctaccaaacactcacacgatatttgaaatgctaacgaaaaaaatggctgtctcttttttctcttgaggatttgaccgcaaacttggtaccaacatttgccttctctaatctggctctaccaaacactcacacgatatttgaaatgctaacgaaaaaaattcttgccgacaaaatggctgtctcttttatctcttgaggatttgaccgcaaacttggtaccaacatttgccttctctagtctggctctaccaaacactca

SEQ ID NO: 43627 - DNA, 1608 bp, Heterodera glycines
  unsure (1)..(1608): unsure at all n locations
gattcaaacggtggtgcccttccataacgacgtgctgttnaataggcgaccaagaagcgcgtacaaagataatccaggaacaaatattgcnccacaaattcgaagtgcgtcccttctctcgtcgctttgtattgcaagttccttttctctcaaggctttggtcacttcatatgaaatggtgctgaaaacgacaagcgttttgaagaagttcatgtggcgatatttggtcatcgatgaagcgcatcggatcaaaaatgagaagagcaaattgtccgaaatggtccgtttactcaagtcgaaaaaccgtcttcttatcaccggcactccgctgcaaaacaatctgcatgaactttgggctttgcttaatttcttactgcccgaaaaattttccgacgctgaacattttgactcaatgtttacggaagaccacgttcttggccaacaaaatctcgacttggttgcgcgtttacatcaggtggaaagcatggagaatcgggggatgggatggaaatgggattgtcctttggtctaatctccatttcagatcctcaaaccgtttctgctccgccgtctgaagtcagacgttgagaaaagccttttgccgaaaaaagagttgaaagtttacgtcggaatgtccaaaatgcagcgcgaatggtacaccaaaattttgatgaaggacttggaaattctgaacgcctcggggaagctcgaaaaggcacgcctcatgaatattctgatgcatctcaggaaatggtagtccaatttatttttatttattgtttctggaaaacgaatttaatttagctctaatcatccatatttgtttgatggcgctgagccgggaccgccgtacacaacggacaaacatttggtggaaaactgtgggaaaatgattttgctggacaaactgttgtcacgattaaaagaacaaggtccccactcctataagaaatgaatattttcttgctttattggtggatcgcaagccaatttactatagctttttcatagcttatttgttaggtcttatcgactatttctgattactttcggggcggtgctaaaaacaacaatttgacttttaatagatgaggtaactcacaaatggacgaatgtccaattgagtcagtccactttaggctcgcgtgtgctgattttctcctccatggcccgtatgttggatgtactcgaggattactgttggtggtgcgccttttttacctttgcctttgcccgccgaatttcgcccttttcttccctttcccaggcgttctttccattattgccgactcgacgggaacactccgcacgaagagagacaaaagtccatcgacgaattcaatgcaccgaacagtgaaaaattcgtttttatgctcacgactcgggtacaaatttaattaggagagggaaaccattcattacaaatgggaggcnncaggcaggcggacttggcattaacctggcgactgctgacgttgtgataatttacgactccgattggaacccacaagtcgacctccaagccatggacagagcccaccgaattggacagaccaaacaagtgcgcatattccgattcatcaccgaaaagtaagccaaatgcacaat

SEQ ID NO: 43628 - DNA, 1275 bp, Heterodera glycines
gcggaggcggatgcaagtagtggaggcggagggagggatcaattgtgctcagcattagctgtggcggaggatcaagcgcagctcccagtggtggaggatgtggaggcggaggaggttctggcggaggttgcggcgggggatgtggcggtggaggaggcggttgcgggggcggatgcggtggaggatgtggcggcggctgcggaggcggtggaggatgcggtggtggcggaggcggttgcggtggtggaagtggaggcggaagcatcacgcttggtgtcagttgcggaggccccagcggtggtggcggcggcggtggttgtggcggtgggtgcggtggtggcggcggcggtggctgcggttgcggctgcggacgccgaaagcgcttggcccttcttcagcgttctgtggccaagcttgtctaatgcacaagccaataataatgcaaaacgtgtcatattcccttttctatcgatctttcttttagctatttcgctaacttagcttattgttagttttatagtacaaagcctagtcttttacgtagtttttgctggtaataatagtaatttttgtattcttagattttaattaataaaaataaaatttttaattgctattttcttttttggaaaacaatttaattctgaaaattcatttaaatttaaatataaatcgagtcaaataatgaactgaaattaccgggctcaatcaagtgccgaaactattaataaaaatatttaattttattgttaaaaatagattagaagaggaaataaatgaaaaaactggtgaagagaaaggaagcgaaccaataataattagagataattaggttgaatcaaactgcgacactcaccactgaaccaccagcagccaaaaaaaaaaagtttactttttatcgaaaaacctttctttgaatataaatttacccccgttttcccctacgtttttgagctgattttcaaattctttgtcagtgcgggcaaaagccgaaaaaataattttaagcaaaatttgaagcgtttacaatgtctttggacccattttaattttgttaaaattaaaatcaaacaataaaataatcatcaaatattgctacatacatatttgttgtgtttgagagttgatttatgtttttctgggcttgattttcccccccccccccccccccgtgccatccctcccctttcgaccgtcgctcagctgacatagagaaacaaccgctcgcctcgccttttctccataatctcccgagctaacccagggggaagagaa

SEQ ID NO: 43629 - DNA, 1484 bp, Heterodera glycines
attattgcgcaaattaaaactgtcaagcgttcgaaatgtaggaagtgaattaatttggaggagagagggctgattgtcaacaaaagtttcattaagaaaatctggcaaattgcgatcgattgcaatgttgtgcagcacagctgctgccgtgatcaatgttggcacattctgcaatttaattcgtacttcggaatgtaaaatatggaatcgccgcttccatctcccaaatgcattctcgacaataacccttgtttttgcatgtgcataattatattgttgttgagcagcagttgtggggtttgcaaaaggtgtcattagccagcgacgtgttggataagcactatcacccagaataattccttggatttggccaccttcaaatgcttcccatacgtttgactggcggagaacaaaggcatcgtggctgcaaccaggccattggcaagaaatgtttgaaaatcggccatttctttctcattcgaatgctttccacgaaaaaattcgcgaccctcagtaaaaaatgtcttagcatcgtcaagaacatcctcaaattttttaaaaatttcttgtttttttgtcatttctttcaattgcatctcgagaacactccgctgcagttccattacatcagcagctgtaacagttgaagcagttccggcacgagatcggaatggcacgcgagaggtgcttgattcaaattttggagttttcaccgcctctccgcgtggcacagtgccaagaacggcataggactttccttcttcaacaacaacttgctgtgaggaaaattcggcactttcctcttgttctttgccttcaaagaaaatggtgtcgccgatgttgagaccggtctgtacgccgccgggcactcctttaacaaacatctacttacacattagctcgaacacatatctaccctcaaatgccggtgaatcagcaaacaattgggaaacattgcgcgaaacttcagtcatttcgaatttctttccaccgcctgtggcacgctgatgcctaaagaaaatgctgaaacccagcacaggcgcacatatgattaacttttttcggtttgtcgttcgtccttggccctttgttttagatttttgaattttgtttggatttgtgcaatcgttaagccgccctggggcacttcctgaggaaactcacgattcatagaatcagtgacaaatttccacgcctctttttgcttttcgtttgcttttgcagttcgagttggagggttcaaatcatcttgacgcgattgaacaagttcgatcaagcgagccaccatggcttcattgaatcgcgccgccattaataattttaattttttggggaaaatgatttgggaaaaataagaaagaatgcaaaaagaaatttgtttgatgtaaattcacgccatcaaaaacatagtttggggaaacaatctttcagttattgatcatctaagttaatccctaaattatgcaacaacaaaaaatgcaaaa

SEQ ID NO: 43630 - DNA, 1224 bp, Heterodera glycines
tataccaaaaagaattaaaccgaggcgatacaacgaataaaggaatgtggaaccaaacatatcattcaaaaaaaaataattttttgtgagattttttggagctaattataaacaaacccccgcccccgttcccgggggcgagccatttgctcacccacgcccccgcgacgctgacccccgcaatcccccgcccccgcgaaaagccacccccgcccacggggctcgaaccctagaaaagagctttgctttaaaatagcaagagaatttctgagaaatcgcattgaaaatgataattaaaaaagaaaattttcccataatttagaaaaaaaaggtgccgctgaaacggaaggcccaaaaatgaataataatacattctgctcgagaccgaaaatttcccaaggcaagaaacgcaaaaccgacaaaaatttgtctttctcacgataatgccaataaaatgaatttaatttaatttaagagaatggcaaattgaataaccgtgaaaaagttatggactttttaatgcatagggcacaattaggagatgccattgacgccgtgaaattaaattcaaaatgcctaaaatcggaaatcgcttttctaaatgtatagctgatgagcatatttaacccattaaaatacttaaaacttaattttataaacctaaaaaatctaatctaatatatagagaatgttttttgaggcatatgcctttttttgcgaattagtttcgatatattaagcataaataacacattttctgcatgatttgaagcttctaggttgggttttattatgccttttttttacttttttgtgattaccgtgcctttattaatgccttttttggcattttttcccgaaaaattccataaaaatgcaataaaatcgggaaaatacacccctaagaatttaaaaatttatgaaaaatagatcgtcaaaatttattaaaaaattttaggtttaaaattttctttattcgaaaaaaaattataaaaattttaaaatatcttcgtagtatccgctactcaaatcttttttgcattaaactcattattttgagcatgagggagtccgagatagaattacacaaaatatgtgaatatgttcttgtgtttaattaaggcctttgtgcgcatcttttaaccctttaataatagaagcaagttgaaaaaagtctcactataaatatgtgcttatttaaaattatgaatacctctttgaaaa

SEQ ID NO: 43631 - DNA, 1183 bp, Heterodera glycines
tcagtacttgattgtcggtcattgtttaatttttgtttagaaatttttaaaaatacctttttaaaaattctatttttttgttggcattttcatccggaaatattggtccgcaagtgtcgacgaactaatgaaaaacaccttattcagcaagctatttgcttgatttcccaaaattttaaaccaaaaattcacttgctaatgatgatgagcttgaagttgaagaaaaggatgaattctttgatcttgatcgcctaagagaatcgtcaaaatatttgctcatcgatgattctcccttttccaaacgtcgggctgtgttaaataattagttaattaaaagtaatagataattggcaaattaaaaaataaaataattggttaattaacagtaataaagtaattgcttgcttaattaaattaataaaatcattggctaattaacaaaattaaaggattggttattaacagtaattaagaattactaattaataaaatcaaaaaatggttcttactgttcaaaattggacgagataaagaagacggcctctttacgacttcggcttcaacatccgctgatggattattcattaacagtttgaccggcttaattttacgatgacgaacactaccatcattatgcttgttttttgagcaacttttttctataatattaaaaaaattattttttaaaataattgaaaatatccagaattgtacgttgataactcgtttgcatatatggagattttcgcttagaatcgacaagatcagcaaagtttgtattaacggattgtgcaactgtaaaatgaattgaattttaaggaacaatttttataaatttttttaaaatttttttttaattgtctttttcaacaattattttccaatttatcactagttcactgtttgagagggacaaaccaataattaaaattaatttaaaaagcggcgataccgaaaaatttggacataaatgaaatttgttagtttttgcaaatttaaccaaaaaggcacaaaattttaatcgtaaaagatagcaaaatttaattatatatattatataatatatttttaaattattattttttgattttgtgtgcctgggaagcaggtgcgtaacatggaagtcattgaatttttatcaatatcattattattctctttctgctgcacggattgatcaaca

SEQ ID NO: 43632 - DNA, 908 bp, Heterodera glycines
  unsure (1)..(908): unsure at all n locations
ttcgacataggtcgaaattaatgtcagatccggattctccgacgcttaaaactccttaaatgatcaattctcgacaaaaaaaatttcaaaattttattttccgaaaaaggggacggactaccatcggtactattacccagctttattttaaaaaagcgctaattccttaaatcggccatttttccataacatttttgtaaaaaaatgttttcagaggcaagtcggcccgcattttcagcgattggctcaaggacgccaaattccatctcgaagtgcgactgctggttgagctgctcttggcacattcccaggcttcgggaattaggacgacatattgaaaataggcggaaacgaaacaagaccagtttaatttgtccaaaaaatattgattggaatgataaagtttagacgacccatttttcaaaatttggtaaatttcttaatgaaatgatgatcagaagagcaagaaagacaatgctcgatgttcgttcaacccatccatcccctgtccgtacaagcaaaattcaaagaaaatacgtgtcgtgttcgggatttccggagtcgaaggattctcgcccacccacctcgtctgatgacctaattgtaagcccaaggacatcctatgggatatttggtattatttgttcaggcaaagaaaatatgtaatttgaaaaagaattcaattttcttagctctctctcacttgcttttcaaggcagcctctttctctccgtttgtttgagaatccaccaactccgaccccgttggaggagaaggttcatcccccattccaattccatcacaatgtcgtgtgttagaaattcgttggtcgattgccggtactaatgcactttaccagacatnaaatttttttttttttgtcttaattcgtgtaaaaatggttttca

SEQ ID NO: 43633 - DNA, 1004 bp, Heterodera glycines
  unsure (1)..(1004): unsure at all n locations
ttattttatgaattacaataaatataataatatttcaaagatttttttactttttgagtccggtattttttcctttatttcatgacattttatttctgcttgtgatgctccatttttattaatcaacagatcataattaatatcacgctgattattatgcagctttgggttagggcattttactgccatataaaatttattcttaaaattaacagtaaattatttgataatgtattaatattgaatttttaagcgatttagcagtgattaatggaccaattcccacgtggattctctcctgctgggtcagattcatctcgcccccaacactataagcgctcttggccaagttagttgcaattttgtagataatcacgattatattgctttttgttcaactcagtgaaaagcaagctaaatatagaatgtaatttggttaaatgtgccgcggcattctaatgcatatgcaaagttaccaaaattgttgggaatattcaatttcagctagagttgagcggggcagggaattttgggcaaaccgggacttttcgggttgaaaaaacgggaatttttggctgggaaaaccgggaaaaaaccgtgaatttcccggtcccggtcaaaactgatcaaaaccgggacttcagtactcagttgtccgtgttttggtcccggtcccgctcaactctaattgcagccaataaaattactgttcacactcaaagattcattgaacatcaaaaatggtaatattagaaatttaagaaatcctactttctgtatgaatttgactttcgttgggaaactgtttacggacacccaacaaaaatccgtagcattggcggcttcatcaacggccctgactttttgaccgtgttcgggaagtcatttcgaacgctaacccgcaaatttagttnaatctcatttggtccattaatcactgtttgatcacattatagaattattatattaatgccaattttgcaaaattaacatcttaccatatt

SEQ ID NO: 43634 - DNA, 1206 bp, Heterodera glycines
tgcgttcgtcgtctcatattgacgcggtcaaacgggagattatgcgaagtcagtgccacaggcaaaagcgatgccaatcagaggacggggacccctccctcaaaggtatgagcacaacgacacgaatcttcgggaacacaccgcgacggcaactgtccgtaaaagagcgaagcgtcgcggaagaggccgactcggagttgggcgactcgtccgcaacggaggaaggcggcaccgagtcgatcaggtggacagcggcgggggatgtgccattgttgcaaaatgagagactgtcccgccaggagttcgttgccgttcttcgattcgcttcgctccgccactctctcgccccatccgtttataacaatcgcagcgagcggagacaaacagttccaatacgcggaacgagacgcagtcgcggaacccttgcgctaccgcacgcggccgcctcagacggaactgccgaaagggcgcgcgacttccgtgcggtcggcggccgagtcggaagggacgaaccgaaagacgagcaaaggggcactgggcgagaaaaggtcggcacccgtggagatggaggaggacaaagacagacgaaggctaacggaagtgacggcgatgatgcgacgcctcagagacagcatcgaagcacaattggacagactaactgaacagatgggcaggacggaggacgacgacgcagcgggggacagaccgaacagccgacggggggaggagggcgaacagcggggggacagctgcgcatcactctcgccatctcgcgtttcatttgcatcgaccaaatagaaacaaattgagcccctccacctcattctcagattaatccacaaagaataaaatgttaagaatttatgtgaaacggtgtaacagttacagtacattttggtaatatattatagtgtatggtgtgcataaataccgtatggtcgggtgtttcatttacacggactttcccctcctcccaaaatcagtgcattatgaaaagaaaaataagcacaaggcaagtcgaaatcaccgcagcgagaatgagtgtgtccttgcgcttcttcatccgaattttgttcatcaaatggttgatggccgggtacttttctgaaggtttaaattagcgcaattttgaatttaaccgtttgttgagctaaccccccccccagccccgtagccaggggggggggaaggggggggggggggaat

SEQ ID NO: 43635 - DNA, 1366 bp, Heterodera glycines
aaaattgactagagcaatcgaccgctaacggacgacctaattgaaaaaaatcccccgaaggagagaatttaattaaatccattccttcgggggaccgtgccgggtgccgcggggtaagcagtgctggttcgtttcatcacggcaccgaaccttttggctagtcagcaatcgttgcttaacttgccagatcggacgggtgcgcatgattccactgttccaagcaccccaccaaaagcaaaacgatataaccaaaatataaggaaaaattttttaaaaaattttttctccatcttcctttttgatactaaagcatcagagtgctaaaattaagttgtaaataaaatttggtgcgctttagagcactttctgaaaaaaatatttatgaaacaaaaaaatcgattttttcaagtgtccgtttggggtactcaaacatttatggggagcaaaaatccaacgcagaattaaagtacaggctatagggaagctactcccgaaggattcggtctccccataaatctgggcgcatcggttcggggggactgccccgaaaacaaaaaaatcgattttttcaagtgtccgtttggggtattcaaacaattatggggagcaaaaatccaacgcagaattaaagtacaggctatagggaagctattcccgaaggattcggtctccccataaatctgggcgcatcggttcggggggactgccccgaaaacaaaaaaaatcgattttttcaagtgtccgtttgggtactcaaacaattatggggagcaaaaatccaacgcagaattaaagtacaggctatagggaagctattcccgaaggattcggtctccccataaatctgggcgcatcggttcggggggactgccccgaaaacaaaaaaatcgattttttcaagtgtccgtttggggtactcaaacaattattaaaaatttttagatttttattcatctccctttttaaagtgaaagcatagggaagtgcctaaaataacttgtaaataaaatttggtgcgtttcagagcagtttgtgaaaaaatatttatgaattaattttgctaaaaaaataaaatagtgaagctttaaaaattaataaaaaattttaaattcagaattactggagttagcatcatagcagtgcttttccttgtctttttgatgccctcgcaaaatctggttcgcttctgatcagtttataaaaaaaaagttaagcctaaaatttttcgcaaatttaaaaagcaattaaaaatttttagattttttattcatctccctttttgatagtgaaagcatcagagagccttatttaacttttaattaacatttggtgcgtttcagagcacgttctaaaaaatatttatgaa

SEQ ID NO: 43636 - DNA, 976 bp, Heterodera glycines
cggtgtcatctatgttactagatcggggatcgatccccgtttcggtcgctcgagcaggacctgcagcagctagcttgctggggatcagattgtcgtttcccgccttcagtttaaactatcaagagagggaggagagggttggagaaggaaaggaaaaaaaaaaatgaaggaggagaaagggtgggggcaatgaaggaagggaaaaaagttgaaagaggggatgcatataattaaaaaaatatataattattattttaaaattattagactgtgagtttcttacgggacaaaaaatgatttaagatcttaaagtgaaatttatgtttgagtaaaaaatttataagatcttgagactcacaaaaaggtgtttaagattttaatttgaaatctctccatgcttagttataagacattttttttaaaagttggttgtctctttttataagttgtttttttaatttttaaatacattaattatttttttcttatatatttttatttaattattttttcttcaaatattaatgaaaggtaattaaatggatataaagataagaaatggatttaaaataataatataagtaattaatatatttaatgtgattaattaaattaattatttttttaatatacatgaattaattgaaaaaatcttataattagagaccaagaaagacatacttgtctttcttttcttctcacctctccttatattgtaagaattgtgaaaaaaaaaatgaatctaaattatattactttaatgtaactctggtcccagacaaacaaaccggttcatctcgtaacttatcagcatgttagtgacaatggagttcaggatgtttatgactcatttcactacatccttaattttaactaaaactaaataacatttccttagacagatctttaacaaaaagaagtggattcatctcacattttaaagactaaaaatataattaaagtcctttttaatttt

SEQ ID NO: 43637 - DNA, 1009 bp, Heterodera glycines
tatcaaaaagggcgatgaatacaaattctaaaaatttttaattgctttttaaacgagcgaaaaactttagggcttacctttttttttataaactgatcagaagcgaaccagattttgcgagggcatcaaaaagacaaggaaaagcactgctatgatgctaactccagtaattctgaatttaaaattttttattaatttttaaagcttcactattttatttttttagcaaaattaattcataaatattttttcacaaactgctctgaaacgcaccaaattttatttacaagttattttaggcactcagatgctttcactatcaaaaagggagatgaataaaaatctaaaaatttttaattgctttttaaatatgcgaaaaattttaggcttaactttttttttataaactgatcagaagcgaaccagattttgcgagagcatcaaaaagacaaggaaaagcactgctatgatgctaactccagtaattctgaatttaaaattttttattaatttttaaagcttcactattttatttttttagcaaaattaattcataaatattttttcagaaactgctctgaaacgcaccaaatgttaattaaaagttaaataaggctctctgatgctttttctatcaaaagggagatgaataaaatttttaaaaatttttaattcctttttaaacaggccaaaaagtttaggcttatattttaaaaagtttcatcgaacctagcgcactaaaatcgatataatctctccaaattttgcaggccttctccattgtaaaggactaacttaacctgaaaaaatgccaacgcttgttgtttttaaaatttttcgaaattctgactttttcattaattatttattttttgcaaaattaattcataagtattttttcagaaagtgctctgaaacacacaaaactttatttacaggttagtttaggcactctgatgctttttctatcaaaaagggagatgaataaaatttttaattcctttttaaa

SEQ ID NO: 43638 - DNA, 1522 bp, Heterodera glycines
  unsure (1)..(1522): unsure at all n locations
ccaacatcactgggaatttccgagtgatttacggccctttaaatcactgcaattttatgaaaatcatttggactgacttttttttttaatcttttttcccatatcttatgtgatggagaacatttaattaattttcttaaagtgctaaaattttaaagaatcatataatattagaaacagaaaaactgtaatgctttggaaaaaagtgtacaattgggaagtaaacataattaatcttagataaaattgtttttgcaattttccttatgtgtctgtagtcaaaaccggtaaaaaagctaaaaacatagccattcttttgtggcaataccccccccccccgtttatattcccaaaagagttttataataaaaccgtattcgtaaaacatacgaaaaatattattcatataattttttacatataataatataaaataattttaatgcgatcaaatcgatataatatttcctatacaaaaaaaaaatcgttaaatttggaaaaatcaaaattataatcaatccaatcatttacttactgtatggcaagggctctgaatgttggactacatttgagtccctaaagtggctgcgttttacagtaaagccgtaatcgcaaaaacacccgaaaagttaaataaaatataaaaataatttttatgcgattaaatcaattatttactaagcaaaaaaaaaaaaattattttaaaatatttttacaatagttattagtaatttattgattatattataaagaatcgataaattactaagcaaaattgtaaaatttttatttctttataaaatataaaaatcaaaattatttaatagataatgagtacaaataagaattattgatctaattgaaaattgataaaatgcaaacagaaaaaatgaaatgaattcaactacataatattaaaattaaaaaattcattaaaaaaatatttttgttgaaattttgccaattttagttttcttccaaaattttcaattttcttcccaatcaaaactccatccacagaatatgtgcaattatttatttatttatttgtgttgtgtgttgtttgtccccctcttcacatttattcgccaattttggggctgattttcaaggtgaaatttgggcggggaatggaaattgcaaattgcaaattgtgcgccaaccgacggacggacgaaattggcgcaaaagaaatttgtacaaaaatggacggatatgggatggggatgtattgttatggatgaattgttggaccatatttggggatggtgtcaattattcattcattcagtcagtcaatccatttccgtcgctctctctaattacattttcaaattttttaaatttggcattatgtctctatagaattggcacttacttttttttattcgtanaactagagttgagcgggaccgggaaatttgacaaaaaccgggaccgggacttgccgggacttttcccaagtgaaaattttttttgaaaaaaatttgaaattntaagtgcactttgntacganaattgc

SEQ ID NO: 43639 - DNA, 1358 bp, Heterodera glycines
  unsure (1)..(1358): unsure at all n locations
gtgggaggtccggcggagccgctaaaacactgctgatattatgaatttagggtattttggaattttgaaaaataggcattttcaacttttaagcccaattatgaaaatgtaaaaagttccggaattttgtgctaaatggtcgaaatgcggaaccggaatatggaaccagcccttgtaagaagcaatcaatcaaaagtttttatggatttttgtttgctgtataacagagagaagaaccatatatatatgaagaaggtaaacaaaagataccaagaatgaaattttggtttgatttgataaaaacagaaataagtttggtgttgtgttgtgtacgaatcacggactaacaggcattgcagcgtattcatcggagaccatttcgacggcgatggcaccggcggtgtttgtgtcggccaggacaacggccggtgattgggtgttggaagaaaagtccaaaggacgagagacagacgacgaagaaactgttagggatgaagcgattttttttttctgaacatggcacgggtatgggataggccgatgtatccccggccgaaacgtcgccggatgttttcggaccattactttttttttgttgttaatcaaattacgctttgttgatgctttcgatagctatgcgttttgttggtgagttcgacttggacctggatttttgtcccggaaatccaggcccaacatgagattaagtccaggcttttttcaaaatgtcgaacttatttaatttggttgagaaaaaatgatggtccaaaaactcgtctggcgacaatttcgacaacaatgctttgtcctgctttggagattataaaagcattatttaaaattacatatatcccctgcacaaaattttttttcattaaacatcaaaaaatttcagtgccgactgtgatttgggcaaatttggagtctgatggtgcaaacatgcgcccccgaggaaaattagaattttgaaaggattttgttaagaaaagttgggtcaatttcagaaaatgctcctattaaaacaatcgcgcagatacattttttaaaaaataaaatgactcatcgcgtgtggcggacacgctccgccccttttggccatatggacatttttcaaaatgaaaggaccaacattgtgaaggcttctcctcctgtgcttcctcagagtcgtcgtcgtcctcaattttgagccgtttcgttggcgattcatttgacgaagaatcagcagctcgagacgcagttgttgctgttttttgatatgtatgtaaaatcatcgattgcttttgtgcttatttcggggtttccccccccccccgcccctcgtgtcgtttcatcccgaganattttgaaaaactttaccg

SEQ ID NO: 43640 - DNA, 1217 bp, Heterodera glycines
ttgctatttcccgggctagacatttcttttgtttaactgtcaattttggtactcttaaagcatgtaaatcctggtccaactatttgagctcggcttcttcttactcccctgtaatcggtcaaagctatatttttaataaaattgaccccctaattgccacttttaattcgcactctttcactaaccatcaatttctcactttcaggatgccaaaccgcgccgtgccaagtcaccctccctctttattttctattaatttcgcttccccaccacttaacccgtacccttcctcctcctcatcttctgcccctcgccccatcccttccctcttccaaaacattattcccactcctcccaaaaaattttcctctttttgctttacaaatgtccccaaccgttccccaacccccatttctagcccttcccaaattgttccccttgttcccctctctcaatctccccaaacagtacccctttcacgctcctcctccatttacctcaccgccgtctcttcacctctttcgaatcactccatttccaccccgcctccttccacacctcccccaaccattatgcctcccatttcccaatccccctccatccctcttctcccttccgacaacacccatcccccttcattccccgcggcccttcctccctactctgtggcccacaatttcccactccccaacaccatccctccccccttatatcgtcggccaaaccgccgccactcccgtagctccatctcccccattccccggtccatcactcccaccccctctaccaccccctccccctccccgtctccctccacaccccaagtacgcatggcaccgctgcctcctccatacgaagagcgctataaaattgccgaaacgcgccagtgagagtggacagcttacggctggagaccgatttaaaaccattgttgagcgcctcatcaccctagttaatgccgcttatgcaagaattagaccccacattccgcaaatattgttttttgcgtgtttctcgaaaacttcgggaagaaattgcttccatgttagacttgggagtagtgtctcccaacctttgaagagacccgaattaaggccttataagtagaaaaattactggccactcgcaaaccccgagatgaccccgattggctcaatgtcatggcctcctcttcctcggcccaatcccctccaagtttactccgaggaaatttcaca

SEQ ID NO: 43641 - DNA, 943 bp, Heterodera glycines
tgggtcggcgagagttttgggtttcgggggtcaatgttcggtttttatattcttgattaatgtgtgaacctccaaaatcaattaaaatattagtattatacaaaatgggtgttattgaagcaatatttttagggaaatggcgcatttcttcgctttcggtcccattgaggaattcggcttcaatttgcatgccgaaaggggcaaaagccacttcttcggtgccgttgacaaaggcggtatcgccgatgagtcagtccgattgaccgtttccattctttgcatttcattcggtttgtttagtgccggcctcgaaacatggcaaagtattgtcggcattaacggctatttgatctccgtacaaactgcgcaaaaggtgaactcagaaaagaatacaaaacatacatggaaaatgaggcgagggcagcgacggttccaggatttgggcttggaggggggggactgctgcgggcgacggctttttcttttctaatcgctttttcgcgccgcctttttcaaaagtttttgatcatcgagaggggtccgatggtgccggaaggctccgtcagaggaaattggaaatttttatacttacaaaaaaagttttttgaaaaaagcgcaccgcaaaaaaagtctgaaaagcaaaaaatcgtcgctaaacttggccccactccttttgtaaaactggtgcctcgatatttgtggtcaaacttttgctgcaatcagccataaatattagcggcccaattttttcgacaccaatcaaaatataacctcaaaatttttgtccaattcaatataagcgaattttatgtttttttgataagcggattcaaattacaatactttctcgaatccattttaattggatccaacaagtatcaaactgaaaaaaagaaagaataattgtggagaaatgtcagatcgatcagatcaaaaatctatt

SEQ ID NO: 43642 - DNA, 1421 bp, Heterodera glycines
  unsure (1)..(1421): unsure at all n locations
gtctataatttttancatggcttntattttccttttgntgtaaaggaaggataatagaatgtttccagatttttggtaatttaccggtgttaaaagataattttaaaagatcagttataggcctagcaagaggaagaaaagagtttttaagtatttgattgttaatgagatcaggagacgtattgttttttccatccagaagattaagtttttgaatagtatccgaaacatcaaaaattatttcagagagataaacttgagcttgatcccctcctgggagaggataagaggagcttatatcgtttgaaaaagtttgagaaaaatatttcgcaaaatattgtgctttttcgaaatcatcaaaaataaaaccactttcggtttctatagatggaatagaagtactggaaaagttgtgttttctaataattttataaagattaatcggatttgcagaaagaaattttctttgtctgttttcgtaaaattttttaacttggattttaatatggagagctaaggaatcatagattggtttaaatttaacaggatcttttttcattttacgccaaatacaagctttttcttttattgatgatctaagtgataacggaaaatttggaggtctatttttgacaaatgtattttttggaataaaaagatcaagggcattttgaattgtattagcaaaaacattatatttactctccaaagtatatgtggtagttagagatgaagataaattggagagtaaataagaattgaatgctttaattttagactgggtgaaatttctgaccgtaatttttgggggtttttgtctttggaaaggaatatcaatattaaagtacaatgctgaatggtctgaaaaaacaatactatcctttagttcaattgaagagactaaatcagggtttgtaaaaagacaaagatcaagaattgaatttcctcttgttgggcctataatattagtgttaagtgaaaatttattaaaaaagtcaagaaaagttattcctagaccggtatgaggtacaggaatattgttaacccatgttatatctttgctgccaatgttaaagtctcctatgataatcgtattgtttgttatatatttttctagaagtaaaaaaagagattttgtaggtttcaatttggtgttagggggccggtatagacatataatagttatattttttgtattttttagtttaacgatagaaatttcgcacccaaattttgaaaaagtttgggtaaaatatggttcaattgctttattaattaaaagtgaggttccaccccctttacctttactgttatttcttatggccgaaaagattacataattttcatttaacgtttggtctgagaaaattattgtttcattattagtaagccaagtttcgcacagacctagcaccattatt

SEQ ID NO: 43643 - DNA, 958 bp, Heterodera glycines
agcagacacgaaggtttcagaactccgttcggagagatgaaatgttgcggtcggtccatatgattttcaactggcagtacctcttggcaattattgcgcttcattgctcaatcggaacggagagaaaacgtacgacggcaatgccttcgatagcgaaaatgacagtaccaaaacagaggggcaaatcggacaaattgccgacggcgggcaattcgtcgatgctgtacaaatgggatgatcatatattcgagaatgatgagcaccgctcccaaatagaccaagttggcaaccaacgcaagcggtgccaacactttcaattgtcgaatgctccaaagacttaaccggggaaggggggggggaattgacaatggcattttggaaaatcattttttaaatattcacaatgattactccatagctggaaagatcagcacaaaaatacagccagctcgtggtaccttagcgtacgttatgtccataactaggatcaaacatgaccaaatttattgaaatttagatgagcttgtagagaaatgttagggctatacaatgatacacaagcatctataattcagaagactcagacaaaagttccgatcacttaatcatagacaatttacatgtgctggttctttatataacgccctttttgatggtttttatataacgactcagcacccgtcaaatgaaaatgattcgatcattggcttaaacacttggacttatgaacacacgccgatcatgtccaagttgtggcggggagactaaaatcaaaccgccgattgctggacttcgatagggcaattagggcaattggcggtgcgggcaaaaaaaatatcacaaaaaaaggaaattttggaacattttttgaagatctcttttttcttgtttgttaggcacaaaatggtcaatcaagaaaaggttgaactgatttatttctgtacgcgcaaaataggaa

SEQ ID NO: 43644 - DNA, 947 bp, Heterodera glycines
atttttaaatttatactctatcccagaaaaatgtctatctttttttttgagaaattttatacctcacaaaagcgcttgcgtatgagacggagggctgtgcacaatcgccattttatttcacagaggatttttatatttagaggttatcccagaaaaatggctatctctttttttgataaattttatacacatacaaatgctctcgagcatgatagggagggcggtgcgcaatagaccttttatttttgagggaatttttaaatttatactctatcccagaaaaatggctatctctttttttgataaattttatacacatacaaatgctctcgagcatgatagggagggcggtgcgcaatagaccttttatttttgagggaatttttaaatttatactctatcccagaaaaatggctatctctttttttgagaaattttatacctcacaaaagcgcttgcgtatgagacggagggctgtgcacaatcgccattttatttcacagaggatttttatatttagaggttatcccagaaaaatggctatctctttttttgataaattttatacacatacaaatgctctcgagcatgatagggagggcggtgcgcaatagaccttttatttttgagggaatttttaaatttatactctatcccagaaaaatggctatctctttttttgataaattttatacctcacaaaagcgcttgcgtatgagacggagggctgtgcacaatcgccattttatttcacagaggatttttatatttagaggttatcccagaaaaatggctatctctttttttgataaattttatacacatacaaatgctctcgagcatgatagggagggcggtgcgcaatataccttttatttttgagggaatttttaaatttatactctatcccagaaaaatggctatctctttttttgataaattttata

SEQ ID NO: 43645 - DNA, 746 bp, Heterodera glycines
  unsure (1)..(746): unsure at all n locations
ccctctcacgctcgagcgcttttgtaacgtataaaacccaccctgagaagagatagtnatttttcttggatataagatacttttaaaaattntntgtgaaattaaatggngattgggnantgtntntgattttangttngagagnatttgtaatctataaaatttntnaaaataagagatagttatttttnttggatataagataaatttaaaaattntttgagaaattaaatggngattgtgtagagtaattaatataaagttagagtggttttgtaatgtataaaatttgtnaaaataagagatagtgatttttgttggatataagataaatttaaaaattatttgtgaaattaaatggagattggggagtgtttttttttttatgttcgagagattttgtaaagtataaaatttataaaaagaagagatagttatttttattggatataagataaatttaaaaattgtgtgtgaaattaaatggggattgtgaattgaagttattataatgtttgagagattttgtaatgtataaaatttttcaaaagaagagatagtgatttttgttggatataagataaatttaaaaattgtgatgagaaattaaatggggattgaggagggtggttattataatgatagagtgattttgtaaggtataaaatttattaaaagaagagatagtgatttttgttggatataagataaatttaaaaattgtgtgagaaattaaatggtgattg

SEQ ID NO: 43646 - DNA, 211 bp, Heterodera glycines
cggtcaacaagattgaacgcgcgtaagagaaaccggtgccgccggcgatcagcaccagcggacggctgccctcttcccgcagccaggcgtcgccgtgcggcacgtcgacggtgatcgcctgctctttcaggatgcgatccatcaccgccatggcatacagattcagctccgaagcgccgatgtgcagctcgatataatcttgctgcgtcgg

SEQ ID NO: 43647 - DNA, 287 bp, Heterodera glycines
cgcccatcctgaggccgcgaagcggccgaatgtcccccaaaaaattaaaagacgaccgaatccttccggaatagctgccctatatcctgtactttaagtctgcgatggatttttgctccccataattggttgagtaccccaaacggacacttgaaaaaatcgatttttttgttttcggggcagtccccccgaaccgatgcgcccagatttatggggagaccgaatccttcaggaacagcttccctatagcctgtacttaaattctgcgatggatctttgctccccat

SEQ ID NO: 43648 - DNA, 1007 bp, Heterodera glycines
ttgaaaagggcggcaagggtgtcagcagtggaccggttcggcagagagtcgcgttgcagagtcagatctgaaaagcaaggacaaaacggaaatccgccttttttctggcttaaaaattccatcagtgtcagcttcttgcgcacatttgcgatcagcaattggaaaattcatgcttttgccgattttcaacaatttttcaagattggcggctgcgacatccgccaattcctatccggccttcggcgaaaaaattgtccccaattttctgaatgctttccgtcctttcacttcgtcggtgcgactcattgagcctttacttttccaaatttgtccacactttgacttttccttagaaaatacgccggcgaacacaaccaacgcagcgaaaatagcattcaaaaaccattttggaatttctcgccgatttttcctccatttttgttgcttttacgctgcaccttgacgacgaattgcgctgtcggttggacgctttccgttttggtccagcttccacgttcgttggttgtgccggtggttggttcgacaaccgcaaatcaatcaattttttatcaacttctgaattttttcgaaaatcggcacttttcgtcgcaaaattttgttgtggcggttttcgtgcacagttggattgcttccgcgcaaagggcaacctacaatggcgagaaatgtgtcccgttttgttgcagttgtagcacgacaattcggtttgtctttggcgcgaaaattttttgtggttgaaatgtcggtttctgttgaaatttaggtcggtgcttgttggtgagtgtgcgaaattgggaggagcagtggctgtccagtacaggggggtgggttgatcattgatcagagtgttgatcagaatttggtgagtgcgtgtgttgaagggatggggggggcgtcaatggcgaatgatgctgccatgcatatattatgcaggcagagaacaaaatgaagaagagaataaatgagagagagagaaaaaacaaatgaga

SEQ ID NO: 43649 - DNA, 1195 bp, Heterodera glycines
  unsure (1)..(1195): unsure at all n locations
ttatggatgaattaagtatagaaggcgtcgcagaaatccattcatatnttctaaattcgggtttcagaaaattaagatntaaaagaggctggattacagatgcttttcaaattttgggtgtatccgaatagaaagaagttggaaatcagtacttttcacgcctataaaattcgggccgaaaaatattggtgtttgtgactagaaaaatagcagatgcatatcaaatgactacagaaaattacagcctcccatgaaaataattgctttgcacaagcaatattttgtagagcccatcaaacacattgtgcttataggaaaggcagaattgaacaataggggcctttttattatgattacaacaaatcagcatggcgtctcgctgatatgatatgtttcagttaaggtttagccgatctacaaatttcggcactgtctattttgtaaaagcgaatcaaattcctttggattccaaagtggaattacagaattgcgacggcaaatcctaaatagacaacgacgctttcattataaagctttaagggagacaaagtaatacgaatatttcaatttcttacttatccgaatagacaaagataggttacacacgaacatttttatagaaattccggctgaaactaaaatccctcttttggtcttaacctatgatttttggcccattatggatgaattaagtatagaaggcgtcgcagaaatacattcatattttctaaattcgggtttcagaaaattaagatttaaaagaggctgaattacagatgcttttcaaattttgggtgtatccgaatagaaagaagttggaaatcagtacttttcacgcctataaaattcgggccgaaaaatattggtgtttgtgactagaaaaatagcagatgcatatcaaatgactacagaaaattacagcctccaagaaaatagttgctttgcacaagcaatattttgtagagcccatcaaacacattgtgcttataggaaaggcagaattaaacaataggggcctttttattatgattacaacaaatcagcatggcgtctcgctgatatggtatgtttcagttaaggtttagccgatctacaaatttcggcactgtctattttgtaaaagcgtatcaaattcctttggattccaaagtggaatgacagaattgcgacggcaaatcctaaatagacaacgacg

SEQ ID NO: 43650 - DNA, 828 bp, Heterodera glycines
cgctgttgtacctcttctaatcactgttgtaccacttctaatcactgttgtacctcttctaatcactcttctaatcgctgttgtacctcttctaatcgctgttgtacctcttctaatcgctgttgtacctcttctaatcgctgttgtactcttctaatcactgttgtacctcttctaatcactcttctaatcgctgttgtacctcttctaatcgctgttgtacctcttctaatcactgttgtacctcttctaatcactcttctaatcgctgttgtacctcaaaatttaaaaaacgggcgcgaagcgcccgtatgagttcaacgaatttaaaaaacgggcgcgaagcgcccgtccaaggccaacaaaaattgaaaaaccgggcgaagcgctcgactgaggccgtgaagcggcctaacaagctaaaaaacaggcgcgaagcgcccgtatgagttcaacggatttaaaaaacgggcgcgaagcgcccgttcaaggccaacaaaaattgaaaaaccggcgcgaagcgcccgactgaggccgcgaagcggccttaatagcccaacgaatttaaaaaacgggcgcgaagcgcccgtccaaggccaacaaaaattgaaaaaccggcgcgaagcgcccgactgaggccgcgaagcggcctaacaagctaaaaaacgggcgcgaagcgcccgtctgaggccgcgaagcggccttaatagcccaacaaaatttagaaacgggcgcgaagcgcccgtctgaggtctcgaagctgccttaatagccaaacaaatttcagaaacagggcgcgaagcttccgtataagcttcaacaaaattt

SEQ ID NO: 43651 - DNA, 990 bp, Heterodera glycines
aataaatttaaaaattccctgtagaatatattggacattgctctccgcgcccctctgcccatgctggaacatttgaatggtacgatatttctcgcaaaaaagagataaccatttttctggcatagagaataaatttaaaaattccctgtagaatagaatggccattgctctgcgcccctctgcccatgctgggaacatttgtatggtacaaaatttctcacaaaaaagagataaccatttttctggcatagagaataaatttaaaaattccctgtagaatagaatggccattgctctccgcgcccctctgcccatgctgggaacatttgtatggtacaaaatttctcgaaaaaaagagataaccatttttctggcatagagaataaatttaaaaattccctgtagaatagaatggccattgctctgcgcccctctgcccatgctgggaacatttgtatggtacaaaatttctcgcaaaaaagagataaccatttttctggcatagagaataaatttaaaaattccctgtagaatagaatggccattgctctgcgcccctctgcccatgctgggaacatttgtatggtacaaaatttctcacaaaaaagagataaccatttttctggcatagagaataaatttaaaaattccctgtagaatagaatgggcattgctctccgcgcccctctgcccatgctgggaacatttgtatggtacaaaatttctcgcaaaaaagagataaccatttttctggcatatagaataaatttaaaaattccctgtagaatataatgggcattgctctgcgcccctctgcccatgctgagaacatttgtatgggacaaaatctctcacaaaaaaaagatagccatttttctggcatagagaatatatttaaaattccctgtaaaaaaaagtggccattgctctgcgcccctctgtccatgctgggagcatatgtatgcgacaaaatatctcgcaaaaaagaga

SEQ ID NO: 43652 - DNA, 900 bp, Heterodera glycines
  unsure (1)..(900): unsure at all n locations
ttcattatattacaataaactattttaattgatttgttttttgaattaataaatttttattctgggcagcatcaattattgattattaattcatttaaagggaaaagtaatttttttttaaattgaaatttggattttactttttgttaaatttatttaaacttaagaattcgattctttaaaattattattttttattttgtgtttcaatttttaataatcgtttgatttcctctgcattttatggattcttattttttgtcttcatttatcaattattttgttattcctaaaatcttgtagaaaatgtttgttttttagaattaaagcaaatagaattttattttaaaattgaattaatttgagaaaggaaatttcatacaaaaattgagtacaattttttattaaatttaattttttaaattgactattaataaaattttcttatttttaactcttatttattgctattgaaattaaataaataagatttaaaaaaatattttcttgtcttctcccaggatcaaacttaaattttcatcgcggttgttttttattttaaatttaactgttaattttttctgcttcaaaaaaattaaaaaatatatatagcgaattctaaaatgactaagtaattataaaataataattcaattttatatgaattatgaattttactgtttgtacattgataaattgttttttatattaagttatattttatttggttcttttgcttggaggtaattttttaaatattgagcaattaaactagccttttaaactggattcatgacgttgacaatgtgtttttctttaaatagcgctattttcgtctctttttttaatgcatacaagcaaaaaaacatatnntaataaattaattcccatacctaatga

SEQ ID NO: 43653 - DNA, 1339 bp, Heterodera glycines
ctaagaggcagcaaaagaaggcacgcaaaaatctaacataaaggttaagaattaaataagttttaaaaagcatacattaaatttgcaattttactgtaaaaaatttattcagttaatggaaccacacacacacacacacacacatcatacacaggaccctacaacatgaacgaaaaaatgaaacgtaatatgttaaaaaagccgaattgtaaaaaaaaaaactcataagttctgtcataattgaaattattttcaaaaattacttaacaatggttaaaaaaacaaaaaaatataaaatttaataaaattaatggtttttgaaaattttatgcaaattataaaaatatatattttaaaaaccaaatatttttccaaataaaaatttatctattacgacagaacttaataaaatttgatattgggcactttttatttttaattttctttgaataaaaataatccctctgaaataattgtttccatttataagtttttttttttatatttaatttttaaaatatgttctaatttttttttgtcttgataatttaaaatgaatgaattattaagcatgtggctattttacctatttacataaattgaaaatttggaaaaatcatcctagaatttatttataagttaaaattttatttttagcacactaaattctggaagttatttagtctacaattaaaataaaaaaaaggtgcatttttttcacaaaaatctaaaaaattcatttattcacatttaatttcaattaattagagattttctggtttttagtgtttaaatatctacagggtgatcttgcacctttaaattgagcatatcttttgatcaacttctcttttattatgtttaaatactcatttgaaagcttattttatttgcaataatacccagtaacagtcaattaataatcgccctgcaccaaagcggaatgacgccttcaaaaattgcaccactttttgacaccactaaaagcactgttagctgaattataaaaaaagatttcctttaaaaaaaagcgatgaaaaaatttaaatcatacagggaacatggcacaacccatggaccttcaaaacagcatgagagccaggacaattaacactcataagacgcgcaaaatgatcaaaatgcgacttgaccggaataaacgaatttcaatgcgaaaagtggcactcgaaatcgggttgaaccgtgagacaatcagactcatagcaaaaatgaatttgaagtcaagccttataagctcaaaaaaatgcatttgctaattgagctaatgaaaaaagttagggcccaaagaacccgactactcatccagctgcacactact

SEQ ID NO: 43654 - DNA, 950 bp, Heterodera glycines
ggcacgaaaaacaaacaatgggaaaagcacttacagggaaagcaaagaaataattagggaaattggcagagcaaaagcgccggaggataatccaaagtaaattctgaacaggcggacagagagaagagagctgctttcattttcgcattttatcggtccacggcatttggccgaatgttcgcaatgcttttgccgtgccaataaaaaggaaaattgctcgagagtttggtctcttgattctagaaacttttttaaatctcgagcttattcaaagtacattaaataaggggcagaaacgggcaaaataatggccaatgaaatgcaaaaatttgatgcaaatacagaaaaatgaggagggcaaagggaccatagaaaaggcggagatttccaaaatacaatacggtaagagagtatggtatgtccaatgattcgtacggtgtccctttctgatcaatcagctgaacattcctttctcctcgttcactccttccatttgctcaggtccatttgcggtatctctatgcactggacaattggccccgtgcggaaggcttcgcgcggcactgtccgaaagtcgtcgccgttgtcgcaaatcactcgggcgagcgacgaacggcgaatttcggccaattgggcgcgggtgaaaatgcccggattttcaaaataaaacctgggaaaagtggggccaattttgccggagaggggggggggggaattcgtcccagtcttagtgaatgccttttttcttcacctgtccccgtcgcgagtccgtgcaaattgaggaccaataatgcaggcactgaataattaatgggagagtaatttgaaataataattaatgtttgatggcacttacactgtcggaccgaccaaaccgcgcaccaccgggtcttcgagcattccgccgacgaacagatcaattcggtctgaaaaggtcaaacaaatgtacg

SEQ ID NO: 43655 - DNA, 556 bp, Heterodera glycines
ctgatcaaccaaattaaaaatttttgttatcattcgatagctcttcagattctctattagcctgtaaaatttcaaaaaatttcgtcagtttacaaaaaagttatggccaaaaaacctcaaaaattaactttttcttggctttttcggcgccgcgtggcataacttttttatttttgaatcattcatttctatttttacatgtaaatatagagcacacatagagctttcaaatgatgccagattggctaaagctaactgacaaataaaaaagttatagcatttcaaaatttgcggcgccgaaatggtccgcaccgaagtgaccccgacccgtcgcgaaggggaaaaagagggaaatttctgaaaaatttgtccattttctgaacaaaattcattaaaaattctgaaatttttcccccccggcggcgcctatcggcaccgccggcccccaaaaatcctattttttcttaaaaaaattagtctaaaatctcaaaattggtcattttttagacaaaacctgctaacaaatagcattaaaattacaaaaaaattttccggc

SEQ ID NO: 43656 - DNA, 1259 bp, Heterodera glycines
  unsure (1)..(1259): unsure at all n locations
cgacatttgcggatttttaaaaccgacatttgcggatgttgattaaaaacgtcgtccgcaaatgtcggttatcagcaaatgtcggtccgcaaatgtcgggtaacctttagttcctagctcggttcgaacaaattttttttaaagtttttcattttttcctggaaattcagcaactttagtttttattaatactcaaaaaagctaaaatactttgaattttcttgaaattttgaaaaaattttcttttgtttgcggcgacgttttggggtgtacccgacgccccccccccgccccttcgcacggaaagggcctcaaaatgggggaccctttgcaccgaaggggaggggggtgtaaaagttctggggggatgagtcgccggcgaatttcttaaatgatcaaattttcttaacaaattcattaaaatcccaaaataatttattttctaggaattttttctttgataatttttgtttgagattttttttttcgggggcgaggggcgattgacgcacccattttttaaataaaaaattgaattataccgactctttcctacagcatcagttgaaaatggcacaccgccagcagttgcgggcaatgcgcaacaacaaaaacttcagcaattgtgcgtggcatgccgaagaatgtgtgcctacaattttccggtttgataatataatattttagaagttaatttaaaaacagttaatttgttaaaaacaatgcagttgcttaattaaagcttggtgtttcgtacaaattggcagattctaccgtacttagatttcctaggctaagcttttctttaattgtacgaactgcttttaattcttattcctgtcataaaaattattgtaagatttatactattataccgtaccacttttacagtgttttcgtcgcggtgtttggcgaggagggcggacgtgttcagcgggcgactgttgcccatttttggagcagttttgccgcgactcgnacgacgaagtgcgcagcataattgcctcaggctttcacgaaattgttgcancacgcaaaattgcgccaatgggaacaaaaaatgccaaaactcttcgtcatttccgctctggggccatttnttgtggggccatttgggggaccttttgtccagtggaaatgcggacattgtgcaacattgactgccattttgcatcgaatttttgcaatgttatacgccggaaatcagtggcagcggaaacccaaaagggggacgggaaaaatttaaaaattcattaaaa

SEQ ID NO: 43657 - DNA, 899 bp, Heterodera glycines
  unsure (1)..(899): unsure at all n locations
caatgagctcaatttttgacagacaaaattacacgttactgtcgcagatctgttcatatttctcttcagcgaaaattaatccgtaaaaaaaattgattggaactgaggaattttttataattttcccaacttttcaaatgttcccaaaaattttcaacttcaacaatcaaatttttcttaattatcaaatttttttttcagttttacactctatgagaatgcaccattgcatcagtcgattggccgtctcaaaatgcgtcgtcggccattttcgaatttgattaattgcgatttccaactctcatcccttcatgataatgcatcgtgtcctctaaaattccgaattcattttgatggtcaaatttttgttggcgatttgttggaccgtgaaagagacggggaatggctccatttggaggcctcaattggcaattgtcctccacgacgtgccgcactgatggcgacgacggcatttcgccaaaaagtcggtgttcaaattcgtctgttggacatcaatgacaatgtgccaaaatttaacgaagaaaacaatgcgaaagctttgttgatcagcgactcaatcaaaccaggaacattgctaacaaggtggggagataggaaggcgataatttgggtttttaaaggggcaatttactgctgggacgtcagtcccagcaggacgagaggggtaccgcccttttggtgtaattagttaaaaaaaaattcataattcaaaaaattcaatttcggcacaggagttattggcaggaatgccatcgcgcaaaaacccaaaattttcggcaaaaaatatagaaagttttatgcattttaacgtgaaaaatttacttttanattgaaatttanaattagactgaagacataaatttcgcaatattttgtta

SEQ ID NO: 43658 - DNA, 935 bp, Heterodera glycines
  unsure (1)..(935): unsure at all n locations
gtttttggctgcgctgaacccgaatttgatgccgtctcctcggtaggagnccaaataattttttaggaattttattgcttctgtttcgaggtagactttaaaatcaggcttttgccaaattagctctcgagactgtagccagacggaatcagagcccttagctctcgagactgtagccagacggaagcagggcccagccgttcgtccagttgactttttacagaagtttggggtggtatttttaccaatcagttttttatactgttattgatcgtatccaactgagaatctgctgaatggggtttttggctgcgctgaacccgaatttgatgccgccgttgttataggagcccaaataattttttaggaattttattgtacctgttttgaggtaggctttaacatgaggcttttgccaaattagctcttgagactgtagccagacggaagcagggcccagccgttcgtccaattgactttttacagaagtttggggtggtatttttaccaatcagttttttatcctgtttcaaggtaggctttaaaatgaggctttttccaaattagctctcgagactgtagccagacggaagcagggcccagccgttcgtccagttgactttttacagaagtttggggtggtatttttaccaatcagttttttatactgttattgatcgaatccaactgagaatctactgaatggggtttttggctgcgctgaacccgaatttgatgccgccgttgttataggagcccaaataattttttaggaattttattgtacctgtttcgaggtaggctttaaaatgaggcttttgccaaattagctctcgagactgtagccagacggaagcagggcccagccgttcgtccaattgactttttacagaagtttggggtggtatttttaccaatcagttttttatcctgtt

SEQ ID NO: 43659 - DNA, 853 bp, Heterodera glycines
agaaagagggccctatttcaaggacttccttgccatccctggacggatacgagccctgttcaagggttatcgaggtctccagcaagaatatgcatcagatttttcatttgacgacataaaatctatgatttttcatcaagtacttttttccggcgacgggtttcgttcaattatttatctcaaaaatgagctggacttctttattgcgcgaaaatcataaatgtatttgtatgaaaaatgataatttttattaaatcattaattaatatgtgtttttaaagcctccgatgtcggcgcaagatatggttgtgccaaaaaataactaatttaaaatcccaatattatttgtttttatttttttatattcttattttcctttataaattttaatgtttttccattccattttttgcatattcattataatgattcattctttcggccgttctcatctcttaacagcttctaaatgtaaatcagctgattattacaaataactaataatattttacttgcaaaaataaataaattattacaatcaaatacttaaaaatatttaatcaaaagaaaaaaatttgtaaaattcgtacaaaatgcactttttatttgccaattttgtcctaattaccgtgctaataaacatcgccaaaggccaatccatctcaaccgaaccgtaattttacaaaaaaaaaataaaataaaataaaggaaactcaattaacgaataaacgaaatcatagaaaagaggcaaaaaatgattggactgcgatgtgcaaagcaaatataactgatgaagaatttgagaggtaaaaataaaaatttttttaaaaatgtttaaaaaattaatttaaat

SEQ ID NO: 43660 - DNA, 1129 bp, Heterodera glycines
  unsure (1)..(1129): unsure at all n locations
aaaagccaatggggccgcgcctcggacaaaatgttgggcatcagagagaggagaagcagcgggaganggaggaggagaagcattggcgaaagcattggaaagaaaaaatggaattggagatttttgaaaatgcaatttaattgctccaaattcggcccctttaaatatttttgtacgtcggccttttaaatcatttttgattatcaaagatcactttttggaccacaatttgagtgatggatgacttcaaaacgcgcagaaccaaagcaatttgcagtaataattttgaaaatttaatctgaagtaattaaaactaatccaaatttggaaatatgttaacgaaaataaagtaagaaaagaaaacctttctacttaatattattttggtttaaagaacagttacacgaaatcttttaattgacagctaattaacgatcgcaagaataagagtgatttataccgtcgtaatattgtaaaattaattaatgccacgcaaatagtctgacatggacagttccggtgctcatttgtcagactgttttttacacgtcactcacaaacatcgcatcatttctggttgtttaaaaagaatgaaagaagataacaaaattgcatttgtaagaatattaccctatttagcagaatgagattggtgttataaatattttttttattctctcaactctttttcctccattaaattcgacttttggcaaattaaaaaagggatttttgacggcagaaaaaataaaacaaaaaaatgttgaaaagaaccaaagcttgccaaataaaaacgtacaaaattttggcgaagtctcaaaaaatgctgaagaaactccaactgctcaaattgaaagaaatgctaaagaaaagggcaaaaataagcaagattttgacaaaaatttaaaaaaagacgaccaaattttccaaaaccaaccacatttaagtgcggaaaacattggcgaaagctccaaaaatgaagtaaaaactcaaaattcattggctaaaaatgccaaaaaaaacgaagacattgtcgaagattttggtgaaattttagcagaaaacaatggaaattctttgaaagaaatcaaaattcgtgttctcaatcgaattgacaatctcccaaggc

SEQ ID NO: 43661 - DNA, 952 bp, Heterodera glycines
agtatagtagtccaagcctattattattttttttgactagtctttgaatggggttatccgagtttttagtatcctttttgaaaaacaaaaattttaataactgatacggtagcccaacatccattgccccaatgtagccttcggtttgtcaacgggagctaacaattgatgagtttgtttggtttcttttttaagcaattttccgtcattgctcaccaactgttaggcgtacagcaacggcggcacttgcatccgatgcagctgttcacgggctctctaaacctatttttattttttttctatctcttctctgaaaggagttataacaatttttcacaacagttttgcatttaacagacacattctaaaatttctaattagtatagtagtccaagcctattattattttttttgactagtctctgaatggggttatcccagttttagtatcctttttgaaaaacaaaaattttaataactgatacggtagcccaacatccattgccccaatgtacccttcggtttgtcaacgggagctaacaattgatgagtttgtttggtttcttttttaagcaattttccgtcattgctcaccaactgttaggcgtacagcaacggcggcacttgcatccgatgcagctgttcacgggctctctaaccctatttttattttttttctatctcttctctgaaaggagttataacaatttttcacaacagttttgcatttaacagacacattctaaaatttctaattagtatagtagtccaagcctattattattttttttgactagtctctgaatggggttatcccagttttagtatcctttttgaaaaacaaaaattttaataactgatacggtagcacgacatccattgccccaatgtacccttcggtttgtcaatataagactaacaattgatgagtttgtttggtttcttttttaag

SEQ ID NO: 43662 - DNA, 1070 bp, Heterodera glycines
  unsure (1)..(1070): unsure at all n locations
atttgcacccacagtgccaaaatgacgtcagaaactcggagtgcttatccatttcattaatttttgtgactttgggggtttcaaaaagtcggcaattaattcctgagatctttccctgggttacacgaacatttgcaaccatagttccaaaatgacgtcagaaactcggagtgcttatccatttcattaatttttgtgactttggtggtttcaaaaagtcggcaattaattcctgagatctttccctgggttacacgaacatttgcaaccacagtgccaaaatgacgtcagaaactcggagtgcttatccatttcattaatttttgtgactttggtggtttcaaaaagtcggcaattaattccctgggttacacgaacatttgcaaccactgtgccaaaatgacgtcagaaactcggagtgcttatccatttcattaatttttgtgactttggtggtttcaaaaagtcggcaattaattcctgagatttttccctgggttacacgaacatttgcaaccacagtgccaaaatgacgtcagaaactcggagtgcttatccatttcagtaatttttgtgactttttggtggtttcaaaaagtcggcaattaattcctgagatctttccctgggttacacgaacatttgcaaccacagtgccaaaatgacgtcagaaactcggagtgcttatccatttcagtaatttttgtgactttggtggtttcaaaaagtcggcaattaattcctgagatctttccctgggttacacgaacatttgcaaccacagtgccaaaatgacgtcagaaactcggagtgcttatccatttcattaatttttgtgactttggtggtttcaaaaagtcggcaattaattcctgcgatctttccctgggttacacgaacatttgcaaccacagttccaaaatgacgtcagaaactcggagtgcttatccatttcattaatttttgtgactttggtggtttcaaaaagtacgcaattaattcctgagatctttccctgngttacacgaacatttgcaaccacagtgccaaaatgacgtcagaaactcgga

SEQ ID NO: 43663 - DNA, 138 bp, Heterodera glycines
aaaaaatatttataaaaaattaatcggaatttgaaaaaaagtcagaaaaaaatgatttttctaccaagttgagacgccaaaaaaatagtagagccattaaaacattgttctgtcagacctaatctcaaggtcgagact

SEQ ID NO: 43664 - DNA, 1340 bp, Heterodera glycines
  unsure (1)..(1340): unsure at all n locations
cattgaattgggcggatgccaacaaatccngataattgcattcgaaatttgcgtcaattttccccaattcgacgtgttctctttttgtcccacacggggcgacacatttaaaagattttttgacatcaataaaaaggcaatttttattagctttaggtaaaacgttcttttcgtattagcaatgcccaagtcataattcgaaattgaatatttcttttttggtttggtgctttgatttttgaattttcagctcaatttgtttgaaaattatctattttttagcaactcgcattaacaactttaaatggaaatcctcttaattttcaatccaaaatcccaaaaaatgatgttatctgagtttcatgaccgtttgtactaaatccataaaaaggattgtcattttaaaaaacactgttccggttttaaatgcctttttgcataattggataacaacaatctttcagcatttaacaattttcccctctctgtagttttattttttaaagttttctccatttggacaacttttttttttttttttgcttttaacggtttgcgtttagacaattttatcgtggccttatgtttgaattttcaatgccatttttaaatattttttggtcaaactaattcccccccccccccaatttttcctcgctgtttgacactctttccccccccccccgcccaccggcggcccataaatcggtgccattgccctcaatatattatgtgccattttattgtgtcgcgccttcgtcgtccttcggcacacccatttggcccctcagggcacaccaaattgggtcgttgttcgtgaacaaattccacatgaaaagcccggtatgcacaaatttacgaaaattttttggcattttccgctaaaaagtaagtgaacataacccaaaaattaaatattattttaaaaatacgtttaggaatctctgattttaaattggaaacaaaaaattgcatttttaaaactgttttataattttagccacattaaagccatccatattttattaattccttttaaaacatggaaataattttgaaaattaaaatttatcaaaataattcaataaaagtataaaaaaatatttattttttattttgttttttaaaatatttaaagtaaaatatgaatattcagtcattctcaaaaataatttcataaattatttaaaagttcgaagagtgcacaaaatttgaatttaattttcaacattttttaatttattcaactatattaaacgtcaatgattgggaaaaaaggggggggggggtggggacagctgagagcggatgtttgcgcaagagaattattataagaaaga

SEQ ID NO: 43665 - DNA, 799 bp, Heterodera glycines
  unsure (1)..(799): unsure at all n locations
tgcgataattagtgcgaactgcagaaaccttgaacacaaaacattcgaatgcacattgcgccattggagttacatccattggcacgcctggttcagggtcgttaccataaaatgcactgcttgtgcgttgcttcgtgggatcatgtacttgtacgtgttcttacgttacttgctcggctcggctgtggggttttggtgtgcaggcgcgaacttgtggttctaattcgcgttttacggaccgtaactcgggcgcaccaatgcttcgcatgctgtggcggagtgcctggattactggcattcctgctttgatttttcgacctgaactcagacgtgaacacccgctgaacttaagcatatcagtaagcggaggaaaagaaactaacgaggattcccgtactaacggcgagtgaactgggaagagtccagcgctgaatcgcagctcctctagggttgcgaggtgtagcgtatagaccgtgagcttgggttggcccgcttgttcaagtttcccttgaccggggctccagagaaggtgcaagacctgtccaactggcggtgcctacccatctttacgtgtcttggagtcgggttgtttgggatcgcagcccaaatcaggtggtaaacttcatctaagactaaatacggccaagagtccgatagcgaacaagtaccgtgaggtaaagttgcaaagcactttgaagagagagttaaagaggacgtgaaaccgatgaggtggaaacggacagagctggcgtatctggtctgcattcacccgtttgttgctgtacgttgngctgctagc

SEQ ID NO: 43666 - DNA, 1203 bp, Heterodera glycines
aaaaaatcgattttttttttttcggggcagtccccccgaaccgatgcgcccaaattttgggggagccgaatcctttcggaaaaattttccttaacctttacttaattttggttgggattttctccccaatattgttgagtccccaaacggaccctgaaaaaattgatttttttgtttcgggggcagtcccccgaaccgatgcgcccagatttatggggagccggaatcttcgggaatagttccctatagcctgtactttatttttgcgttggatttttgctccccataattgtttgagtaccccaaacggacacttgaaaaaatcgattttttgttttcggggcattccccccgaaccgatgcgcccagatttatggggagaccgaatccctcgggaatagcttccctatagcctgtactttaattttgcgttggatttttgctccccataaatgtttgagtaccccaaacggacacttgaaaaaatcgatttttttgttttcggggcagtccccccgaaccgatgcgcccagatttatggggaggccgaatccttcgggagtagcttccctatagcctgtactttaattctgcgttggatttttgctccccataattgtttgagtaccccaaacggacacttgaaaaaatcgatttttttgttttcggggcagtccccccgaaccgatgcgcccagatttatggggagaccgaatccttcgggaatagcttccctatagcctgtactttaattctgcgttggatttttgctccccataattgtttgagtaccccaaacggacacttgaaaaaatcgatttttttgttttcggggcagtccccccgaaccgatgcgcccagatttatggggagaccgaatccttcgggaatagcttccctatagcctgtactttaattctgcgttggatttttgctccccataaatgtttgagtaccccaaacggacacttgaaaaaatcgatttttttgttttcggggcagtccccccgaaccgatgcgcccagatttatggggagaccgaatccttcgggaatagcttccctatagcctgtactttaattctgcgttggattttagcactctgatgctttagtatcccaaacggacacttaaaaaatcgattttttgttttcggggcattccccccgaaccgatgcgcccagatttatgggggagaccgaa

SEQ ID NO: 43667 - DNA, 690 bp, Heterodera glycines
gggggggggaaggcacaccacgaggccgcgaagcggccgagtgaataccttcggtgcaggaaaattattaaggaagagagttcattatttatttgttttttgcataattaatttataaatatttttttcagaaagggttctgaaacgcaccaaattttatttacatgttagttttaggcactcttatgctttttctatcaaaaagggagaggaataaaatttttaaaaattttttaattcctttttaaacaggccaaaaagtttaggcttaactttttagtgaaaattcaatcactcatttttcgagtagtgatcagaagcgaaccagattttgcaggggcctaaaaaggtcaaggaaaggcgtctctgcgttgatttagcagtagtacctatgaatttaaattttctatgaatttttaaagttttttgaaatttttttaagtgcaaaagtggtggtgtctgcaaaaaattttcaccgggtttaaaaaatctaggaaaattagtaagcatttgtagtgttccgatacgtatccctgcaaaatttggtgagcccctgatcaattacaaattatttatggacgatcaaatttttagaaatttttatttaggggtgcataattaattcataaatatttttttcagaaaataaagggaaacgcaccaaattttatttacatgctagtttaggca

SEQ ID NO: 43668 - DNA, 1220 bp, Heterodera glycines
  unsure (1)..(1220): unsure at all n locations
tcaaaaaanagtcttgacatcaaaaattaaaatggaaatacattggcaatttcttaattttattttgaaaaatataaaaattaagacattctttttcttccaccaaaattcatgtccttgaaaacaatgatttccacatgtccttgaaagtcccaaattaacaataatccctttagcaattagaacaaattaattttttcttttttttccaaaaaataatgattaagctatgccctgtcggaatgcagccggagccttcagcgattggctacgtgccgtgcgatttacttgcgcccggccaatgcagcgaagggtaagcacggggaatgattccagattttccggaagtccaaaaaattagaatttttcacaaattcccacaacttttgactcaaatttgccaaaaaaaatagtctctgatcactttttaaacatttccgatcactgtaaaatgccaaccgccacaggtatcagtgcgtgcattcgcgtgacgatccggagatgaacatttgttgcagtcggttgcgcaaccaaccgccatctgctgcggcagcgcccatctgccccaatcaggcaaaattttcagtccctttctccatcgcgttcagttggcccatttctgacgggacagatttttttttttttttcaataaaccgaagttggcaattttttcagcaaattttattgcgagacgggtcaagcccgcgctactgctccccacggcagggcatcagcgcgtgtccaaatgggtaccaatgcgatgagtcaattggccaaccgaatgtgtaaattcaaaaaaacaaaattggcattttaatacagtatgtgccaaatttgaaaaataaaacgtctccaggttcgtatgctgttccatcccttcgttggccatgtgcccgcaaggcttcgtctcctcgttggacctgcgcacacaaagcccggtcagctgataagaccagtgtagttatcgctactatatcaggaaaataccgtataaagcagaagtgtatgatattgcctaaaaactgattttgtatcatcatactgtattgatggtgatcgatagcttaatggaatgccctattgtattacttactacatccagtgattcccagggtgtgtattttgaaatttttggtaaaaattttcaaaaaaattttaagtttaggtatttttgagaattccaatcttatggggctcaaaaggtntcgccttaatatat

SEQ ID NO: 43669 - DNA, 895 bp, Heterodera glycines
  unsure (1)..(895): unsure at all n locations
aggtcctggaacatnnttgggcaaatgggtgaataaaaaaaggacgagagaaaaagagacagagatagagagggggattagagagagagagagagagaaagaggggggagagagagagagaaagaggggtgagagagagagaggatgagaatgcattaaatgcattcattagggccgggattttcgaaaaagtcagggtgggattcgggcttggcattaggtcgggataggtttaccgggatttacatcccagttttgccgggaattaaattccgaccccgggaatcaaatcccaattttgttgggatcccgatcctaccgggaccgggatctcgggaaaatgccggcgggatcccgaccccgtcagggccctagtttttatctcctatcacttcagttgcttctcctttcgttggaacttcgcccggcgttccgccgccccacccgcccccatacaatcagtcggtcacgccaccgatgctgcaaaagccgtcgacagacaaatgcggagtgacagtgccaatggcaaacaacgcaaataacagcccaaacgtagccaatgccaatcagcagaacatcttgcgtagttgtgcactaccaacaatgacgacaacaccactcggcaacaatatcacaggacagaacactgttagtggattggatatggccggattggacactcaaagcaaaaaaaagggcattttggatgggatatggcacggattggacacccaaagcaaaaaaaagggcattttggatgggatatggccggattggacactcaaagcaaaaaaaagggcattttggatgggatatggcacggattggacacccaaagcaaaaaaaagggcattttggatgggatatggccggattggacacccaaagcaaaaaa

SEQ ID NO: 43670 - DNA, 166 bp, Heterodera glycines
ggcgaatcaagtacttagcaatccgaattattaaacttgagaaagagataacgggttatatggtggtttatccccgctggcgcggggaactcgacagaacggcctcagtagtctcgtcaggctccggtttatccccgctggcgcggggaacacctgttttcgcaaa

SEQ ID NO: 43671 - DNA, 962 bp, Heterodera glycines
aaaaaaaattttcgatgataggtatcccaaaatttcacatctgttcaatcttttgcacaatatcatgtcagattttattacatctttgttggttggaaaatgaattttcgaattttgtttgaatttgtagccagacaaatgagggcagaacactgacaatgagtcacagtgaaaatagacacttaagtaccgaagaaaaaatggaagaaaataataatttaaagcaaaaaattacgcaaaaaggagcattgaagatggagaaaattggggcgagaagcagggtaaaaataagcgcctgaaaatcgaaaaaaatttgattgtaacagaaaagcacatatgtatggaaatttaaaaacagcaccgttccgatttttcaaagaatgaaatcgaatacacactatcctttctgttgtacttggataagaatgcatctgatctcgaattttgctgttcttcctcacaaccattctttgtttcacttctttttacgcttctgacgcgatgcaatgtccttaaatgtacgtgaaattactgttgaattgtaaattcctaattctctcatttttagccgctttccattgagctcgaagtatccgaagacaaactcacaacaaacaatgaacagttgcattcgttctctcaaggcgaaattgtcattttccatgcccaattttcggatggaaatttctccctttttcttctgctcacttcgaatgcgaatttacttgtccagtacaaattctgcgcttcttctcaattcgcttcggtttcgcttaaaaagtttttccctgaaaaggttttaatgtgatttttttccttagtttcccacgttttttaggatttttcgcatttggcaaccgtagcaatcactgcagacagttctctgattgtttgcttatcaaacgatggaccgacaatatttatggttccagtaagcatttaaaacataaatttttcaacaa

SEQ ID NO: 43672 - DNA, 750 bp, Heterodera glycines
gaaacttaatgaaattttctgaaatttaaggtaaatagagaattcttagggctatcgaatctataaattaatttagagcaattgcattttaaacacctaaaattttaaatgtttataattttatatgcattaccattacaaaaacatagcatattcaatgctttataactttttttatatttaaggaaaaaattatagaaaattatactctgaaagagaacaattaaagctattaaatgatacacgaaatatttatttggtttaaattgagtgtatttataaatattacccattttttgtattcaaacccattggcggattaggaagcgcgcatgggtggcgctttttaggaaatgcccagcaccgaatccaaggacggatggcagccctgccttaataaaatgcatttattccagggcgcgtatcgaaaatttttcaaaatcagaacatcaagcccaaaaaatcagattctggggtcgaaaatcaggacattttgcaaaattgcttcaaatcagttatttttacaatttttcgatcaaaaatgtatcaaatattatatttttcgtctcccattatcgattttaacaattttggggagaaaattagcaaatcatcaattttagcgcattcggaatcaaaaaatcagatttttatgaattttttgcggcgcatttttccaaaaaacttttaggaaatgggcgaggggggagggtccggcggtgccgataggcgccgccggaaaattttttg

SEQ ID NO: 43673 - DNA, 1001 bp, Heterodera glycines
caattggatgtgcaaaccggtgatgacacaaatatccacatgggtccatacacccaccattgggtagttacaattcgatgtgcaaaccgggggaggcgcataaatatccaatatatccagagcccccaaaatgtatcattgtcgtcagggctcgtccgttgtgagaagcacacgtctacaggttgtagatgaccggcagattcttgcggcgcaccattccatcctcgccgaaccactccagcttgaacacggtgtcagacgggccgggcgtgttgcaccattccacgatcacgcggtcgttcttgatgtcctcgttattcgggtcgaaggttgccacggtgatgatcacgttcacggtgtcgccgacgcccacggtgccgcacggcgggttcaggaagatgcgcttcggcttcgtcgtcttgaaggcgaacccaatgcgctttgagcccgtgttgatcagctgaaattgcacaatgattgatcaattagcagagaaagcctcccaaaccgacaaacgtacgcggaagttgtagatggtccggatgttgaatggcgcgttgaggtgcagctcacgtgctggaattgttgcgatgtcttctggatgttgccccattgttgtcgctgttgttgcggttgttgggcacgtcgatgtgttgctgatgaaagaagaaaggaataggcagaagtgtgtgaaaacgcctccttatatacatcatttgagttccgtttgttagtgctaaaaatgttttttgtgcataataataaatacagaacgccaaaagaacaaatacaaacataaaaaattgacatttttttttaccattttttatgaatttttttagcttttaactttgtcaataatagaacaaacaaaaccatttatgctcattttgaatggaaaatttcaggtattttcatgtctgaccatttttgggacgaaaatgtcttcgatctgatcgttgaactagagaaggaaggccgccatgtacggcttgattggc

SEQ ID NO: 43674 - DNA, 1187 bp, Heterodera glycines
ttcgttttttttcggttttttaaccgaaaccgaccaaccgaccctcttgtccggtctctaatttctacgatgcttttgcttttttagtctaatttttcaaaaattttaattgaaaaactaataaatagaggttctccggtggtaccaaatatgagcagacgttgaaatttttaaaaatatttattaataaattttgattaaatgatggcaatatttgaagatttttttttaaattgcaaaaaaaatatacaaaaagcctcaaatatattttgaatagagtccggtaaaaaaatttccgggagcgggagcgggatcgggagttcaaaattttccgggacgggagtcccgaacgggattcccgtaaaaatcccgctcccgttaaaatgccgtccatttttaacgggagtcccgggcgggagcgggagtaattcgaaaatttaattaaaaactcacaaaaatatttttaatgcacaaatttaaaggacaatcaatttattaaattaaaaatatatagaaaaatttataaaggagaaatttgaaattaaaaaatcttatttttgagtcaaaaatcagaaaattttttcaaattgcttaaataaattattttttataattaattcgaacaaaacatttattaactttatatttttgactccctttattaattttacaaaattttttgcggtgtatttcttgaaaaaactttttggtgaccaaggaggaggagggaggccggcggtgccggtaggcgccgccgtgaaaaaattgcaaattttaatacaatacattgttagattctgttcaaaaatgaccaatttttgcaaattgagcaagttttttaagaaaattaaggattttaaggatccggcggtgccgataggcgccgccgggaaatttttttgaaattttggctatatatttaacagattttcaatgaaaaatcattatttttaccaaaaaaaatcaattcttaccagtgcatttttactcccgtttttgggtaaaaatttccgggagcgggagcgggatcgggagttcaaaattttccgggacgggagtcccgaacgggaatcccgtaaaaatcccgctcccgttaaaaatcccgttcaccgaaaaaagcgggagccgggagcgggactcccgtaaaatcccgcgggagtcccgatcccgccggactctagtaatta

SEQ ID NO: 43675 - DNA, 968 bp, Heterodera glycines
ccccccccccccccccgccttcagattttgaaaaaaaaataaaaataaataggagactcagaattttgaaaattttttataaaaactgatgacaagctaatgtgataaaacaggttaattcttttcctttcagtatccctgcaaagtttggggcgcttctgataagtttctgaaaaaaaagttaagcctaaactttttggcctgtttaaaaaggaattaaaaatttttaaaaatttattcatctccctttttgatagaaaaagcatcagagtgcctaaactagcatgtaaataaaatttggtgcgtttcagagcattttctgaaaaaaatatttatgaattaattatgcaaaaataaataaaaatttctaaaaatttgatcgtccataaataatttgtaattgatcaggggctcaccaaattttgcagggatacgtatcgaacactacaaatgcttactaattttcctagattttttaaacccggtgaaaattttttgcagacaccaccacttttgcacttaaaaaaatttcaaaaaactttaaaaattcatagaaaatttaaattcataggtactactgctaaatcaacgcagagacgcctttccttgacctttttaggcccctgcaaaatctggtgcgcttctgatcactactcgaaaaatgagtgattgaattttcactaaaaagttaagcctaaactttttggcctgtttaaaaaggaattaaaaatttttaaaaattttattcatctccctttttgatagaaaaagcatcagagtgcctaaactaacatgtaaataaaatttggtgcgtttcagaaccctttctgaaaaaaatatttatgaattaattatgcaaaaaacaaataaataatgaaatctgacttccttaataattttcctgcaccgaaggggctcactcggccgcttcgcgggatacgtatcggaacactacaaaccttcccccc

SEQ ID NO: 43676 - DNA, 1234 bp, Heterodera glycines
ctgaagagtcgccttcttacagaagcgcaaaaactcaattgtgtactgtttcccgctcagacagcaggtgaaagtccaaatacttgtaggacggatgggttttccacgaatctccgccataatgttactctcaccacccaaatattcgtaacacaaactcaggaagctgtagataacgaaagctataaaagcacagtttattcattaaatccaataaacaaatcaccctcatagcaatctctgatggagttgaagtaaatgtacacatcattgctgaagaacaacaaactcagccacgagtcgaaagcgtaaattggaacgatgaaaaggattctgcacatgggatagaaaaaatgataatttacaattaaagtatttaaaacctaattatccatcgctgttcactcgggcaagaataccatcgtaaatgctggtatatttgatggctcgtaatgaataatgcagcccaagtacaaaagcctataaataggatggtaccttttttgcatcttcaaacgaaacctgcaatgctgtgagccaatgggttggtaaagaaaacattattctgtgcaatagagaaagaattattcgtcatctgagttgttgtgcctttatgtttgtgattaaactcattagaaatttagtccaaaaaattcctgaaatttggtaaaattattattaccagtagcataacactgattgtgagacagaaagtttaaccctttagggaggaaggaaataaatctaaaataacagaagctcaatgtaagaagcataatgagtgggaatgagaagaaacgtgcaaattggaaaaattaatgaaagtatagaaaaggcgaagcgctgcgtgctggtgtttgtaaaaggatatgcatgtgtatgtgtatagacatatagcagcagcagcttccttttttgtcttcctttatatgtataatggtgtggcgcccgctttctatttggacggcaaaaatgccgtagttggataggttaatacaaactcattaaagggatggaagtgatgaatggaaagtgaaaattgattatttaatgatttgatcatatgtattacagtaccaaaagaaatgtaaaattggtagattggatcgaaatcataaactctaccataacttggttatacggacaaagaagctttaaaattggccgtttaatacaaaaaataggtttgaaaatagtattaaacaacagcagcagaatgaagaaccggaatgaa

SEQ ID NO: 43677 - DNA, 504 bp, Heterodera glycines
cgcgaagcggccgaatgttatcaacaaaattaaaaaacgggcgcgaagcgcccgtcctgaggccgcgaagcggccgaatgtcccccaaaaaattaaaaaacgggcgcgaagcgcccgtcctgaggccgcgaagcggccgaatgtctcccaaaaaaattaaaaaagggcgcgaagcgcccgtcatgaggccgcgaagcggccgaatgttctcaacaaaattaaaagacgggcgcgaagcgcccgtcctgaggccgcgaagcggccaaatgttcccaaaaaattaaaaaacgggcgcgaagcgcccgtcctgaggccgcgaagcggccgaatatcccccaaaaaattaaaaaagggcgcgaagcgcccgtcctgaggccgcgaagcgtccgaatatcccacaaaaaattataaaagggcgcgaagcgcccgacctgaagccgcgaagcggtcgaatatcccccaaaaaattaaaaaatgagcgcgaatgagcccgtcctgacgccg

SEQ ID NO: 43678 - DNA, 882 bp, Heterodera glycines
  unsure (1)..(882): unsure at all n locations
gaattatatggaaatccatatttttttcctggactctgggaggcgcctgaaacgcacgaaaaacatgtttttagcttggtttgaagcttctaggatgtatttctatatccatatttccatatttatccatatttgggcgtttttccaaaaacctctaatagaacggcccccaacagataattggcctttttgacctcaaaaacggaatttttcaaaaaaatcaatttttcacaaaatttttccagagaatattgaataaatttaaattttcttaaaaattgttaaatttgtgtcaaaaataagcaaaaaaaaatttcgctttttggtttgatttttcgctaaaaatgagtaaattttaactttctcatgttttttttcttttaaaatgatttataataccatatttaaccatttttgaaagctttactttgcgtttagccaatttgaagaaattgtacctcaaattggaaaaatttatgtccatatttttgccatttatgtccatatttcgcgatttttggtccatattttgcgattttatatcaatatttttccgagccctactgatcagtgatcacgaatagagtatccatttaatgcaatctcgaacccctaatccgaactcgaacaaaaagtcaaaaactcaaaattttcgagcttttggacctaaccagattaaaaaacatgaaaatgagcagaaaacccgcctaaaacatatttttatgatttaaattaaaaaatatttttttcaaaaaaatggtgggaggggagacaaagtgaactattaccaaaaattgtgataacttttgtncaaatcgaccanattanacattctanaccctanagtttctatatcacccatgaaaatttgttcatgtttga

SEQ ID NO: 43679 - DNA, 1090 bp, Heterodera glycines
agtttatatttagaggataaggagttgaaatggtggaattccaaaaaggtgaccaagaaaattgtaatcgaagattattggcgattatcagctcggtcattccgcaaacactgattcagtttatatttcgcgaagaatgagctgtaattttgcgaattagacaaaaatgatcataaagtaacaaatgagagaatttcacattctgctaattaggctttaaatataaactgtttaagtgttgcagacggatcaggttgataagcgccataacctcagatttactattttcgcaaccccactttttgaattctgacattttcagctcattacgctctaaatataaacagcatcagtgttccggaaggatcggtttgaaatcggcaataacccccaaattacaatttcctactgtaaacttatacagattacatttggatataagaaattgaaatattgagaatatcacaaaagtgatcatgaaaattgtaaatttgagattattgggacttatcagctcggtcctccgcaaacactgattcagtttatatttagaggataaggagttgaaatggtggaattccaaaaaggtgaccaagaaaattgtaatcgaagattattggcgattatcagctcggtcattccgcaaacactgattcagtttatatttcgcgaagaatgagctgtaattttgcgaattagacaaaaatgatcataaagtaacaaatgagagaatttcacattctgctaattaggctttaaatataaactgtttaagtgttgcagacggatcaggttgataagcgccaataacctcagatttactattttcgcgaccccactttttgaattctgacattttcagctcattacgctctaaatataaacagcatcagtgttccggaaggatcgatttgaaatcgccaataacccccaaattacaatttcctactgtaaacttatacagattacatttggatataagaaattgaaatattgagaatatcacaaaagtgatcatgaaaattgtaaatttgagattattgggacttatcagctcggtcctccgcaaacactgattcagtttatattt

SEQ ID NO: 43680 - DNA, 1441 bp, Heterodera glycines
  unsure (1)..(1441): unsure at all n locations
aactttcctctgtatgattactatgttcaaatcgaccttaaaattttcataaaataaacgcctaagaaatgaaaaatttcatatttttaactttaatcaatattttgtgagctaaaagttctatctaattttatatcaaccatatttatgaaacgccttggcggttataaattttttgggtccaagattcgaatcatttacattgtaatgcattttacaactttcatttttgcttttttttattaaaatcttttttataagtaagctttatttttatttttaattcaaaaaataaaaattcttagataaagatgcaataatttcaatcaatttgatggcttcaagatttgaaattaaaatttcgttcagatgttttttttggtcggaagtgggaatgtttttattttaatttatttctttaaatccgatggcgctaatcgatccataatgttctacaccaaatcttctccagttccatcacatcacatctataatttcaaaattaactaaaatattccttgtaacaattaaacaaataattttattgcaatttatgatttatataagttttttttttatattgtgatagtcataatattgttttgcttaaaacgataaattattcataaatttcaaatataaattctcctattaacaatatttttaaaaaattcataaaaataataattaatgttttttataaaatcaaatccaattatttcagcttggcaagtaaaaaaacattaaaaatttaagttattaaacttaataatatagagaatgaccgtggaaagaaaaatatatagtctaaacttaaaaaaatgaaaaattcatcgcaaaatttgagaatagcttttacgaacctgagcacaagaaatttgcgtaaatcgacaaaatattcataaatttagaagtaatgtactaactcgatatttttattagtctgtgttgttggccttcggtttccttnnggtttcgctctttgtgtttgtgttttttttgtgggcttgggtngggttgtttccgcttttgttttttggcctcncccttttngcncttctgtctgctgtnggcgcccngntttgtgctttgcgtttttggtgtggctttgtttgtgtgtgtttttcggttttgtggttttctttcttctcctctttgttgttgtgcgggttcttgtttgctctgttctttcttctttctttgcttgctctcctgcgctttgttgtgctgcccctncgttgtcctttgttttttcctttcgtccgggtgtcggttnttccgtcccggtgtttctcccgtgttgttgtttgccncttgcttggtncncctttcgctngngcttcgttngctttccggttaaactctccgcggtgcttttctgttttctgttggtgccaatgaagaattgcttttttggaaaaaaattaacaaattcttaaaa

SEQ ID NO: 43681 - DNA, 810 bp, Heterodera glycines
gcaacgcggcggcagaagcgacgcgcactgtacgcgcgtgggcattaaatgatgcatgtttaatatttctatttgtatttaagccgtttcccgattggacttcgcccatcacttttgcccatcacaaagcgaatgcttccatagcttctcatccgtcgtcgtcgccaatggccactataatcctattcagctgcgttcgttgctccacattccgttccgtcaatgtgatggtgcggtttcggagatcgggcgttatttttaacgggtgtcacttcgtccccccccccccgagaaattaattttgattaaactacaaaatctaaacttttaaagaaatttcgtaggaagggggggggtgtaaaactgtcaaaatccccattgcgaaactaaaaaaaatttcgcaaatctttcaattcccaaaaaaaacttggtttcatcatcgaacggcacattttatatgtacattttacaccattaattatttttccattgtggcacctttttatgcattgtttgacctcattaggattttcttcttattgacagactaatacaaaaacgaaaagaatcccttcccataggcactggctgaacacattgccaaagtgcacttgcagcaaaagccattccctggcggcgttcgcgtgcgtctgttgccgaacagcaaaaacaatggacgaccactgattcagtcggccaacatcagcagcaccaatggagaacaacagaagaatctgatcgccgtcgtcgagcagcacttggagcagtacaccaaggacctcgttaaggaagtaagtgactggggcatgg

SEQ ID NO: 43682 - DNA, 1709 bp, Heterodera glycines
  unsure (1)..(1709): unsure at all n locations
tttcgcaattaggggcccaaaaattaatgcaatggagagagatttnatgcacaagaagcaaataaaattcattgaaaaaggaaaaacaatgaattgacagagtgaaaaatgacagtaaaagcgaaccattggaagaaaaggtgctgacaatgagtcgtcgtcactcaaaaacttttcaaatagaaatttttgactaaaaattattttaaattttgcttaagcataacgaaattttaattcttcatattttccgttagctctaaatgtattctattatcctccaaaattaaaaaaattcattgattttcaaatatgctccgttccaaaattataaagtcaagaattttcttgccacttcatctatttcccgtggacgaattgagctgaaattttttaccattaagagccacacaaaaaaaatctgaaagcataaaagaaaaattgttgatacgatttttttccgaaaatgtccccaaattaggcgttccaatattataaactcaaaactttgaagacatatatataactttttctatagggtaagaaaaaatctgaaaaaattcatgtacgcataacttttcatgctgatcaaaaaagtcaacagcaccaaagtgatcagagcactccttcagggtgatctgaaaaccgcaaaatggcttgaaaccgcgaaattttcagaaaaaaattcctagggtgctggaaaaaaatttacatcaaatacgaatatggcggacagaaagagaacataattggctacaaaatgcaaaaaactgcatgtcgctacgacttctgtacgctgagattccggaggattaatttcgaagtgatcaaaatcactgtaaaatgcactgttttcttaagaattacggtactacatattttcaaagttttgagtttataatcttggaacgcctaatttggggacattttcggaaaaaaatcgtatcaacaatttttcttttgcactttcagattttttttatgtggctcttaatggtaaaaaatttcagctcaattcgtctacgggaaatagatgaagtggcaaaaaattcttgagtttataattttggaacggtgcataagttatggccagaaaaacgcaaaaaaaagaagagattttcgaatattattagtccaaacttttttgaaacttgacaaaattttttaattttgcacggtaatagaaaacacctagagttattgaaaataggttaaaaattaaaatttgattgtttttgagaaaaagtcataggtaaagtagataaaatttgttttttgttttttttctggtttttgagtaacccctaagaaaagacagaagatagccaaaaacgggggacacctgttaaacagttggaggtgttttatctaaagcactagaatgatcatttagcaacagattgtgccatcatcatttttaggttgctttgtttccggttttttccaatttcgggcggctgctgctggcggatttgggttcctcagaaatttttttccatccaaaaatgtttctaccataaatganatctgcctttgcaatgccacattcgtccattgtttggtcatctttgaaaatgtatcctctgatttgtacaattccatttttgttccttcttctttctacgtaacatccncgttctccttcgatcattgccgtgatctttcctttcacaatttcaacgtgtctttgcccttcaccctcactttgc

SEQ ID NO: 43683 - DNA, 2465 bp, Heterodera glycines
tcctatgtatgaagggcaccaaattttttggttaactgctgacaatgtacgaatgtagcttaaaattcttagaaatttttgcctcaaggaaacatattctgaatttctactttctgcatttattatcattttttagagaacgggattttgaaagtaccaggtccggaaaactgcgtagtcttcttaaaaaaagacagaaaatttcttatcctttttatacgatttacaagcaaaatatattaatttaatgcgattctcccttttacactttaattaatgaccatttatcatggctcggaacccgcttgacagatgagaactattttgatttttcttcaaagtattattctatctagcacaaaaaaccgaaatttacaatagcaaatcgactatgaaaatcatttattgatgcatgctatcatctacatacttaatcaattactaggctaattattcaaaaaataacaatagaactacacataaataatatatgggggataaataaaaaaaagtgatgctaaattaactacatataaattatacaatacaaaaaataactaactgatgtatgagaaacataattatgtggtgctaaaatgaataaaagttttaatgactaaagtaactgcatctacgggggtatctgtatgtgtcaacaatgaatgatcattggcacacttttaaatcaatgaattgtgccctcctcctctgctcaattgtgtgggaagcgtggacggcatttgttgttggccacttgtggcagcagctaccgtagttggctgacagcttcttgcacaacgtgagtcggctacgatagtcccgttgccggcaactgtactgggcgcagctgttgtggccaatggtgccgagattggtggcgacaacatgccactgagcgctgccgcactgagcgccgctttcgcccaccgcacctaaaaaggatgtataaaatgataggataaatgaaaagctttgagatatcatcaaaaaattggatttttgaaagtacgcagccacagcacaacacaccgctgggcagctaaatggggcaataattttattatgggttttataggtattttttttggggggacccccactcatgataaggttatttttgtttattttttttttttttttccccccccccccccccccccccccccccgcggggggggagaaagaaaaatttctttttttttttttttttttttttttaaaaaaaaaaaacacagcaaggaaatatgaagagggggggggggggggggggagggggggggggggggggggggggggggggggttgttgttttataaataaaaaaaaaaaaaaaaaaaaaaaaaaaaaaaaaaaaaaaaaaaaaaaaattttttttttttttttttttttttttttttttttttttttgcgctcccctctccttctaaaaaaaaaaaaaaaaaaaaaaaaaaagaaggtgtgtgtgttttttttttaaaaaaaaaaaaatatattttttttttttttataaaaaaaaaaaataaaaataatttttattttttttttttttaaagaaaaaaaaaaaaaaaaatattttttttggggggggggggggggggatttatttttttttttggggacaaaaaaaaaaattttttttttcttcccccccccggggggggggggggttttttttttttttccccccccccctttttttttttcccaaaaattttttttttaaaaaaaaaaaaaaaaaaaaaaaagccccccctcccccccccccccacaaaaaaaaaaaatttttttttcccaattttttggaaaaaaaaagggggggtttttcccccattttggggggtttttttcattttttttccccctttttgggccctttttttcccatatttttgaaaaaaatttggggggttttttcccccaaaaaaagcggggccccctaaaaagccccccccccaaaaaattcccctttccgggaaaaaatttcagggaaaaactttttcggataatttcaaagattttttgattttgcatttaaccgttaggaaaaattttataaacttcccagctttagttcgtggatatccaggatgtggggtaatatgtagttctgcagtttgtagattttcatagtcatgaaaacatttctggggcgttttcagggtcgatgagtatgaatatgacattacattttcgacccatttcaaaacccctgatcaccatggcctaagaaacagggtatggtcattgagtggatgcctaaagtgcaatagagccatttcttgtgaatcgactttgggtttaaatgctttttaaagagaattcgaatgttcgactttcctgcgtttcgctttccattttcacccgctccattctttgtgtgtttccgttactttccttctgtccatttgcattgtattattttctaatgtcctctgaccttttatttttcattcgtttttgcttta

SEQ ID NO: 43684 - DNA, 853 bp, Heterodera glycines
  unsure (1)..(853): unsure at all n locations
agttttaggatcggatcatgcattttgtcagggatcacagtatgccttaggggtttgatctggaatgagtgtaacgtctaagtacaattggtttcgtattctgtaaatcgattttaggtttggtctccgggctctgaccaattgtcttttattttcaaatcaatttgtgacaaaattggatcctcaattgtctctttctcaattgagtcccgacttatttccttttggttttcttctgaaacagagcatatagggtatttcttcttttattaccgattctatttgttcgcactttattggcgcacgcgaccgagcgtctttcactcggttgacctttccctccaagtaaatctccttggcttctagctcttgtaaatccattacccggcggtttaatttggggttgggagtcgacactgaatgcaaaaaattcagagggagatggtcagttacaatgattatgtgggagccatatattattgtctgaaaatttttcagcacatacacaattacggccaattagccgagggttgccgggagaattgcgtctgttgcggttagtgnnnccccaatcccgccccctggatacgtgcctggtgccaggcaaagtgggacatcgttggaatggggaaaagttatgactgattaaattaaagtgttttggatgacattattgcgcggactcaattgcaccgatgcgcccgttttttgaggcccacaaaggcaaaaaacccatattttgttcatttgaaataaattccaatttccaaataaaaccctggggttttttaaagtgtcgtaaaaatgccattaaaaatgtaaaagtaaaaatggatgccgtaccttcgtcatc

SEQ ID NO: 43685 - DNA, 430 bp, Heterodera glycines
  unsure (1)..(430): unsure at all n locations
aatggggggtcaagtgcgatgaacncaaccggcgatcattttgcaacaacagcaaatgacagcccaaattcaacagcagcagtggcaccagcaaatgcaacggcagcagcaacagggacagcagccgatgatggggtaagggggaggggggacaatgaaaaaacattgttggaaattggggttcctataggtaggcgacaggcacgaaaaatggcaattctcaaaaaaatttaaccatttttttataaaatattaaaatttcagaaaattttcccagtggcgtctatcggcaccgccgtgcccccatttcaccttatttttttaaattttgaccccaatcctttttggcggaaaatggctacaattcctgttttttactctcctgcgctgaaatactcaaatcatacatttttagggggggggggggggg

SEQ ID NO: 43686 - DNA, 1031 bp, Heterodera glycines
  unsure (1)..(1031): unsure at all n locations
ttttactacaccattttttctagcttagatcacatgcgatttcggcactctgatattntagcgctcataatgggatgtataaaggcgattgtagaaggaattggaagcgctaaaattgtttgagaagctttttgagcgtaattacgatttttacttagaccatttttttctaggcttagatcacatgcgattttcggcactctgataattttagcgctcataatgggatgtataaaggcgattgtagaaggaattggaagcgctaaaattgtttgagaagctttttgagcgtaattacgatttttacttacaccattttttgctaggcttagatcacatgcgattttcggcactctgataattttagcgctcataatgggatgtataaaggcgattgtagaaggaattggaagcgctaaaattgtttgagaagctttttgagcgtaattacgatttttacttagaccatttttttctaggcttagatcacatgcgattttcggcactctgataattttagcgctcataatgggatgtataaaggcgattgtagaaggaattggaagcgctaaaattgtttgagaagctttttgagcgtaattacgatttttacttagaccatttttttctaggcttagatcacatgcgattttcggcactctgataattttagcgctcataatgggatgtataaaggcgattgtagaaggaattggaagcgctaaaattgtttgagaagctttttgagcgtaattacgatttttacttacaccatttttttctaggcttagatcacatgcgattttcggcactctgataattttagcgttcataatgggatgtataaaggcgattgtagaaggaattggatgcgctaaaattgtttgagaagctttttgagcgtaattacgatttttacttacaccatttttttctaggcgtagatcacatgcgattttcggcactctgataattttagcgttcataatgggatgtatanaggcgactgtagaaggaattgaagcgctaaa

SEQ ID NO: 43687 - DNA, 1315 bp, Heterodera glycines
  unsure (1)..(1315): unsure at all n locations
ctgaaaacagtttaacgttaacatttaccctaattaatgcccatgtttattttttgccttgtaatcacataaatcaatgtccgccagcaagtggtcatgctcgttgttgctaatgaggccaattaaatgcctttcagttgaaacattttcaaactgttgagcattcatttcataaataccaatatatataagctaaaaatattaattagtgaaataattggccctaggcaataaataaaggcacattaaaattttataaattaaaaataattaacataaattggaaagtgcttaaatgcttataagtggccaagaataagaaaatgaaaaaacagtgaccgtaatccttggtctcaaaaaattgtttcgcctacagtaactatgacaaaaaaatctcatcactttcggttaataatttgataaaaatcaaattttaaaacaaaatttgtacctcacgctactaaaaataatattttaaatattttcatattttcaatttatgtatttttataaaatttatatcgaaactaagtgaatcggccggacaaattgaatttgtgtcggcattgttctgtgccaatgttggatgggtctaaaaatgtgccgagaactgaatgaatgggaatggcccggagccgccaaatccgcccaaaataaaaatgaatggtgggataaaacaaatgaaaattggattaaacccatccgtttgtttgaatcacttcttgtcgaggagaaatggagccaaatttggattgcttactactgtttgctgatgaatgaatatgaaaagcaatagaaaacttttttttttaatttttgaggatttttaaataacaaattttaattttcgatacaaacggaaattttttggaggcgctaaaataaaacaaatattacaaataagggcaatgaaaaaaatttaagaattttcgaatatttttaaaataataaatcttaaactttgggtaaactaaattttttggattcctaaaataagtacaaatcatacaaataaggacaacgtagcaacaacaaagaaacccaaattccttgcttaaaattgcttcgtgttaagtgccatatttggcgcaacaattgccaatggcattttcaatgcatgtgccattgtcataaatccaaataagatcaatggactttgttgctgaaaatgcaaataaggaagtgcatagcactcggaagcctttaattgaactgcatgcatgcataatanaaagaatgggaggttatatcanaaaaaaaaaaacccgagtgtatgacgcattttctaattattataattgnggcatctaattat

SEQ ID NO: 43688 - DNA, 877 bp, Heterodera glycines
aaagcgcttgcgtatgagacggagggctgtgcacacctcaattttatttcacagaggatttttatatttagaggttatcccagaaaaatggctatctctttttttgataaattttatacacatacaaatgctctcgagcatgatagggagggcggtgcgcaatagaccttttatttttgagggaatttttaaatttatactctatcccagaaaaatgtctatctctttttttgagaaattttatacctcacaaaagcgcttgcgtatgagacggagggctgtgcacaatcgccattttatttcacagaggatttttatatttagaggttatcccagaaaaatggctatctctttttttgataaattttatacacatacaaatgctctcgagcatgatagggagggcggtgcgcaatagaccttttatttttgagggaatttttaaatttatactctatcccagaaaaatggctatctctttttttgagaaattttatacctcacaaaagcgcttgcgtatgagacggagggctgtgcacaatcgccattttatttcacagaggatttttatatttagaggttatcccagaaaaatggctatctctttttttgataaattttatacacatacaaatgctctcgagcatgatagggagggcggtgcgcaatagaccttttatttttgagggaatttttaaatttatactctatcccagaaaaatgtctatctctttttttgagaaattttatacctcacaaaagcgcttgcgtatgagacggagggctgtgcacaatcgccattttatttcacagaggatttttatatttagaggttatcccagaaaaatggatatctctttttttgagaattttatac

SEQ ID NO: 43689 - DNA, 1152 bp, Heterodera glycines
ctgaaagcggagagcgagcggggcagacgaataacagagatgtacataaatataagcattaaaacgcttagttaacccccccccccccatctataaatctattctctggtcagtagagttgaaccatggtgaaattattaagcttgattggagattaagttgccgtattccctcgattaaaagacccatatcgattattaggtccctcttcttttgagggggttgaacattaagtactataattgagaaaatactgtagtctaactttgtcaattaatcaacaggtttattttttgaattagcgcacaagaaatacttttggcataatgttttaattgtatacctaattttatttcctgttgctattccaacgcagaaatgtcaaaaatcatgtccaaatggcatattggaatgaacatcatcgctgctttggatgccaattgcggcattggccgttccaatgcattgccctggcatttgccggaagaatacgcacattttgtacgcgttaccacacacacgactgacccacgaaagcgcaacgctgttttgatgggacggaagtgttgggaaagtatcccaaaaaagttcaaaccgttgaaggggcgcctcaacattgtggtgagttttgattcaaattagagttatttcaaaaaacaattatattttttaaatttagctcagccaaacaatggcacctcaggtgaatttgtgcagcaattaaaacactaagcttttgatgcacttattgttagataaatgaccaactgatagtggcaaaacagctcgacgaagtgttcgccattctaaacgacgaaccgttcaaagacacagtggagaccatttggtcagcttcacaatgtaaaaaaggcgtttaaactagcagaggattattattatttttttgccatttcatcaaaaaaagcatttccaggaatgtgggtggtcacgatatctatgcgctcggtttgcagcatccgtcgctgcacaaagtggtgctgacccgtcttgacaaggcctttgactgcgatgttcatttcccaaccgttgactgggcacaattcgaacgcaaagacgactttaatggaccggaggaaatgcatgaagagcgaaaagtgacttggcacgtgacgtcgtacacgcggaagaaag

SEQ ID NO: 43690 - DNA, 839 bp, Heterodera glycines
gtaaaacaccgactgaaaatgagtgtaatagtaaaaaaatacaatgtaaaacaccgaatgaaaatgcgtgtttaatagtaataaaaatacaattgtaaataccttaccagaaaatgtagaaattccggttattaaatataattgtaaaacacaaccggtaaattcgggctttacgtaaaaaaatttcaattataaaacacaactggacatgcacaaaacaatttctgaatttaaattttacttttccggaaaacactttctgtttttgtttttacttttccggaaaacaagaataaaagaaccgaaaaaatgtattttatttcatataaccaaaaactattcattttaaaataaaaaaaaatcggaaataatgtcttttctgagaataaccggaaagcataatggtgttgaagagttttgaataatttagccttaaatttggaattttattggttcttatttggtggaatagttctggattttatctccatgttttttccgaccccctactgatcaacataaaaaataagttagcaaatttaacaatttactattttgtaaagaattaaaatcgccattttctaatatcttggaaaattaatgagaaaatatattcaatttcctaaaggattgcatttaaactttttttactattcaattaattaaatccgtttttataaaaaaggatcattaaacttttcaaaaattttctccctgacaccgcggcaccacaaaattttcgtaattatttttaacaaattctgataagttttctctgattacaaatatggttaaaccaatagagtagccatttcgattaatctgtaattttttttttt

SEQ ID NO: 43691 - DNA, 1021 bp, Heterodera glycines
tgtttaccatcatcgaagcgttaattcttagttcattcaataataattacttttcatgcgtcataaaatttggcgctgttaactgtcatttctctgtcctatggtttctgtttctctattccggtgtaccaaaaggcaattgaggacggtgatcagatgaccaccggatcatattttgattttataaaggtttgattttgttttttatattttaaaaattatatatttttagagtgtttcacttataatcaattttgccaataaattttggggtcgctgatcacgaacccggcatcaattttgggtcaattccgaaccccggacccgaattcgaacaaaaagtcgaaaatacaaattttcgatttttggttcaaaatcggttttcgcaaagacgaaggccgtttttgttaaggcacctcaacgttcgaacatttaccacgaatgtttccggatttggcactaactccaaggctgttttaacgagatgggggacttggcttcaagccgtatcgttttattggcaaaatttcgaggcagtgaaagaagtatgtgaaaccttaggcttttttagcattatgcgtttaggtggtcaactcgttcgacccatgtgatgcattatgcgttagtgaaagtcagtcgtgcttcactctttcaagatggcaagaactctcgtacattcacacgaacaagcagccggcgataaagcagaaataatccgccaaaaaatctcttacattgtctcaaaaaacccctcatttgatcaaattgcaaaattttgccaaattctttccggaaaaaatgttgattgtgatgttcccccaccttaattccattttacaaatttgcccctctcacttcttgcgatgttgaacggactttcactatttaaaaaataattttatccgataaccgattttgccttaaaatttggaaatgtacctcatttgcaactgcaatcagtgaataaaattatattggcttaatttttggaagaaaattatgtcactatttgtcaatattt

SEQ ID NO: 43692 - DNA, 1021 bp, Heterodera glycines
tgaacgggcgggggaaggtggccaccggaaaattttctgtatttcgttctgatttgttaacagattttctcccaaaaaattttaagaaacaggtgggggtaaggcgtgccggaaaaaaactttgtgcttttaatgcgattcggttacagattttgtccaaaaaattgtttaaattttgccaaaaatcttatttcttgataaaatagtgatattatgccataaatttcataaattttgagtttatttaagaaatcagaacaaattttggtcgccccccaaaaatcagaacatttctgacaaatcacagatgagaaccctgatttaaacacaatacagctatttaatattaaataataattttttccaattaatttttttcgttttatttgaaattcaaaaatgcaaatccaagctgatcgcgctcattggatgtgcttctattttgcattaattgcttatttcgaattattttaaatagttctgctctaattgatgtaaccgccaaatgaggaatgaattaataggctataaaattattttttacgaatccttgctaattaatgtcattacgtgccaccattatttacctatcttttggcactttgctccattttgaattgcttcacaaagctgccatttctgtttgtttacactgcatttttgacagaattacatttcgtttagcagtgaaaagcgcttttattccacggtttgcaattggtaacaacacaaaataatgttttagattatcaaatttcgcggcaatttctccgacgtgattttcaacggctttgatcggctgattagaataatttctgagaaatattagaaaattaaaatctgattttattttgggtttttctatagtaaaagcaatatccgattttctttaactacacaacattaattttcatagaattggtttaggattttgtattacattttatcatattataaatttgtatgatggctagataatcactggctgtataatcgatattcaaattcagggcccttctca

SEQ ID NO: 43693 - DNA, 460 bp, Heterodera glycines
aggcttttgatgctacgaattgcttctctttttctgcataacattcactgaaatgggcgatcatttgtcttcatttgcctaaaccctttcaaattttcttctttattaattttttttattttcagccatttttaatttttgcactaacaaataagttctttcttcgtcatctaaattaacactaaataaggcttagttttgaataatttgctctttttcttctctcattttttctttttcttgtcgcgcggcagcaaaatctgacaaaaggcggcacttttgtggcaggggacggacggacgagagaaaattggcggacgacggacatggcgatttgtgctgtttttgttgctgttgctgcgtgaagtgccgattcgctctcatccatttaaagctttgtcaattgatcgatcgctttctctgtttgtgttgtcgccgccgccgaatccgccgaatattc

SEQ ID NO: 43694 - DNA, 858 bp, Heterodera glycines
ctgcgtggatttttgctccccatatttgtttgagtaccccacacgcacacttgaaaaaatcgatatttttgttttcggggcagtccccccgaaccgatgcgcccagatttatggggagaccgaatccttcgggaatagcttccctatagcctgtactttaattctgcgttggatttttgctccccataattgtttgagtaccccaaacggacacttgaaaaaatcaatttttttgttttcggggcagtccccccgaaccgatgcgcccagatttatggggagaccgaatccttcgggaatagcttccctatagcctgtactttaattctgcgttggatttttgctccccataattgtttgagtaccccaaacggacacttgaaaaaatcgatttttttgttttcggggcagtccccccgaaccgatgcgcccagatttatggggagaccgaatccttcgggaatagcttccctatagcctgtactttaattctgcgttggatttttgctccccataattgtttgagtaccccaaacggacacttgaaaaaatcgatttttttgttttcggggcagtccccccgaaccgatgcgcccagatttatggggagaccgaatccttccggaatagcttccctatagcctgtactttaattctgcgttggatttttgctccccataattgtttgagtaccccaaacggacacttgaaaaaatcgatttttttgttttcggggcagtccccccgaaccgatgcgcccagatttatggggagaccgaatccttcgggaatagcttccctatagcctgtagtttaattctgcgttggatttttgctcccccataaatgtttgagtac

SEQ ID NO: 43695 - DNA, 986 bp, Heterodera glycines
tttagaggctttttctaggctattgcttagcgaccccccaattaccaaaaaagttataacatgaaattgcaaaaaagtcaaatttttgaagttcgttttttggcaaggctaatagagcatgttaagagcttacgaatgataccaagattgttggatttggatgacaaagaaaaaagctcaagtggaaaaacgagcctgcgcccaaacggccgcgcccaaacgcgtgggtccctaaaatgatattaatttccaaaaaaaaatcagtcaaaatttgtaaattaaaaaaaaaaatcccacaaaataagaaattttcaaaggctcaacagaccttactgatgctaatttgtaaggtcagtgccaaccatttggacattattggccaaccttatgcaatttttagaacggtagtgatttgaatgaattttttgtttgaaatacaaaaatatgggtacagtaatccgtcaactgttttggtgctttagggatggcctacagttgggggcaaggtcggcatgaacttgtataaatttctggatttttaaacgaaattttgtacaaatcaccattaattctcaaaaacatttttgacaaattatttgatgttaaattaaaaatttaaaaatacgagctactaaaattcccatccctactgataacaatgggaatccggcgggtggcgataggtgccgcctctggaaattttttttggacatttttgcgaaatatgatatgtaagaaaactgtgccaaatttacaaaaaatttgcccattttttcctgattttttatatttttcatttcgggggggggggggggaaaggaaaaatgagaaaaaaaataaaaattattttttaccatataaaccaaaaaattaacgggggtggatttttagggccaacgactaagaagggccatccgtccgtgagcctttttccttcccttttttagcctaaaggggcatttgtcccctaatcccctcccccatcc

SEQ ID NO: 43696 - DNA, 889 bp, Heterodera glycines
tgtccccctttttaatttggccacaattcgccatttttggcattttttctaaactttgcttaaagcagtcaaatttttcatttgatgaaattcaataacctaaatgttctctatttgcctaattatttccttcttgcttaaatctttttgtaactgaagaatgttcaaaatgttgcagcatatgcttcacctgactcttaaactgctgattgccctcattgctttttccctttcccacttccactgatcccacggcacattctccgctctctccgtccgccccttttgccgtgccgtcgtccctctcaaaagttccaatcgccgttttgtgcgcatcgctttcgcgccaatcgccgtttgggctgtacacattggggacgacattgttccgctgcctttgctgatcattcgtcgtccgatgatggtccctctccaattgaatcgctcctccgatcatttcgcactgatcagtcggtttggcgatttgttggtgtgtgtggtagcgaagcaatcgcattctgtggacatttaaatttaaaatgaaattttcaatggcattacctccacaaagcgattcctaaggggggggggggaaggaaattagtgaaatgaaacgaaggaaaagcgaagaacgaaccgcagccaattgttgcgatgatatactgaaaaggaacaggtttaattcagttttactatgtaaagtagagctcggcctgtacctggatccaggtctggatttttcctggattctggtccaggacatccaggtccaaatggaatccaggcaggctttttcaaaataccgagctctaatgtaaagcacttccccctacatggatgatgtcggtcgagccgaacaccatcatcgcctgtctgttctgtcccatga

SEQ ID NO: 43697 - DNA, 1376 bp, Heterodera glycines
tcaaaaaatggttgctaaatttgaaaattatttcaattttgttgaggacatggcactgtgtgtgttcatccattttggtggcgagccacagctgtactacgggacgcatgaccaccagcagcagctgcaccaccacccatccgtgatcatgccggacggggttgccggtccggcacgcatgtcgttgggtgtcagtggtggtggggacgggtacatgaacggcacactgtccaacgccagcatgttcatgccaagaagtgagtgatgtgcgagccatttttggggagtacaaaatttgatccggtcatttgatggcgcaaagtgttaggggaaaatgaccgacaacacatttcgaatcttttcctcttttaaaattagtcaacatttttgaatttgtgcgattctttcgaggaaaaccatatatcaatctaaatatgcgttatttaaataaatttttggttttacgacaaattgttcacgaatggactggaattcaatttgtacactaaatgcatgttgtgaatgccaattctaatccggtaactgtttcaacagcacctcttcgaacatccaccccacaacaaaacggtggtggtgccgcggcattgagcagcggaggaggtggagcagtgcacatgaacggacacacgccgctgcatcaccagcagcaatatttgacaccgggcggcgcgtttgacggggaccagtccatcgtggccggagcacaggtaaaattgggttttagaaaacagtcagtggcttttaaatgatcgaaatcgaaaacatttttacggcgcttgactcgactctttctaaactcgagagttaccataaaatgtgcgtaactgtttagtttttgtgaaaaaaaatcggggcttttgagtcgatcaatgtccaaattacaataaaatacaaaaaaatgttcccatgttttccctatacaaaaacagttgatgccatcgccacggcacgagtcattgcacacactgttcgcgcggattgtgaaggatgtgtggcgacgcaatctgtgtacggcacagtcgagcaataatgtgagcaaaaaagggggccaatgtttcattttaaatggatttgagggaaaatgccaaaagattttcgtcacaaaatgcctgggatttaacccaatgcattagttagcagatggaaatagccattttgtttcacccttgcagtttgtcaccccgtgattcatttttatatggttgatggaattctttttttctcgaaaaatgctgttcctagggccctttaaaaggtggactctgtgttgttaggtgattcggcacttggccagcagagtgagcctgccggcatcagttggcgcactgcgccgtgcatggacgacatcagctgac

SEQ ID NO: 43698 - DNA, 994 bp, Heterodera glycines
  unsure (1)..(994): unsure at all n locations
cgtacattcgtggggtcacaatatgcaacaaagaaaagtgcaaatanaataataattagaagcaatgccaaattaaatcctatagcaacgacactcatatccgaaggcnccgcgcgctttcgccggcgccgatttgcgccttaaattttgataattatttcgtaacccgatntaaaaaatagagtaaatgaatcagcccaggtattgtacggtatcaatgattagcctaccgtttgaaaattttggcttaatcttttaaaatctttggtcagagtgccgaatctcataaatgagtgaaattcctattttaaaatttaagtctgagataccatttcttaaaataagtgaaattcttttagtttacgttttcttctctttgccatgccgccgtcaccaatttcaattgttttcgccaaaaaattcaaaaattttgccatcctcccttttttacccttaaattcattgcaattttcatgttcattttcataagtcgtatcattcattgacaaatattcatttgaatcattggaattctgtttatataaaaataaggatccaataaaaattattcatttaaaatttaaataaggttggaactttgataaaattaacctttgcttttgttccaaaaattctctcaaaaatggtaagaaatttgtgaattttgcaggcaatatttaccaaagattttgcggtattgttttggtgatcttaattaatgtacataacattatttaaccataaatccaaaattaccgttttctaattgtgttagtccatcattaaacaagtttataaatgccattttgtcaatttcatttgactcatcagattttgcatattttattaaagaaaagaaaaataaaggaaatattaaagtaaatgggtgcattaattaaattactaatttaatggaatatttttaatattaaaaaaaattacgattcaatataatgttgttttttgtttatttccgcngatgcattataaaaaa

SEQ ID NO: 43699 - DNA, 1348 bp, Heterodera glycines
  unsure (1)..(1348): unsure at all n locations
gggagaatnttatggactttatttggaatttctatcttaaaaagaaaacaagttattccagaatttctgaaaatnttcgatttttcagataaaaattcataacccccttctgaaaagaaatttttgaaaattaaaatactacaaaaatccgcaatttttttctttataatataaattttattttacatttttatcacatttttaaaaaaagatacaaaaataaaagtgattttgggattcgggaccaaaggggggtgaccaggatttttgagtggaaaaatttttccacccaaaatcttcaaaaaatatgtctttaggggttatttgggccgctgatcacgaatacgtgatcagattttacttttgacatagtcaacacctcagaatccctgtgtgattggggattctgagtcatcttctgggggggggcggcaggttcgaatccggacggtgaacattatttttctatgcatttttgggttatttttcagtgcgtttaatttatatttaaagatttgttatttttcaaaatatgctcctatgaaatgaaaaaaattttctcaaaaatttactttcttggcaaaaatttttaattttaaaaatttttttaggtaactattttgggttttttggtcttaaaaatcccagtcctactcatttgcaactgcaaatagtgaataaaaattatttttgctcaatttttggctgaaaattatgtcactattcgtcactattttggacttttttcactattttgtcactattttggcactttttcgtcactattttagttaactatttcgggatttttcgtcactaaaagtcccggccctaaaaattaatttcatattaatttaaatatccaattcttgtacatttcaaaattctctttgtaattaataaaaggaataattaattttattttttaaagtttataataaattgcattcaatttttgtacctcttctaatcagttttgtacctcttttatcactgttgcacctcttctatcactgttgtacctcttctaatcacagttgtacctcttctgatccctgttgtacctcttctaatcactgttgtaccttttctaatcacagttgtacctcttctgatccctgttgtacctcttctaatcacagttgtacctcttctcaccactgttgtacctcttctaatcactgttgtaccttttctaatcactgttgtacctcttctaatcactgttgtaccttttctaatcacagttgtacctcttctgatccctgttgtacctcttctaatcacagttgtacctcttctcaccactatgtacctcttctaatcactgttgtacctcttctaatca

SEQ ID NO: 43700 - DNA, 1220 bp, Heterodera glycines
  unsure (1)..(1220): unsure at all n locations
atttatgaattattatgcaaaataataaaaaatttctaaaaattgatcgtccataatannttgtaantgatcagggggctcaccnaatttgcaggggatacgtatcggaacactacanatgcttactaattttcctagattttttaaacccggtgaaaattttttgcagacaccaccacttttgcacttaaaaaaatttcaaaaaactntaaaaattcatagaaaatttaaattcataggtactactgctaaatcaacgcagagacgcctttccttgacctttttaggcccctgcaaaatctggtgcgcttctgatcactactcgaaaaatgagtgattgaattttcattaaaagttaagcctaaactttttggcctgtttaaaaaggaattaaaaatttttaaaaatttattcatctccctttttgatagaaaaagcatcagagtgcctaaactagcatgtaaataaaatttggtgcgtttcagagcattttctgaaaaaaatatttatgaattaattatgcaaaaataaataaaaatttctaaaaatttgatcgtccataaataatttgtaattgatcaggggctcaccaaattttgcagggatacgtatcggaacactacaaatgcttactaattttcctagattttttaaacccggtgaaaattttttgcagacaccaccacttttgcacttaaaaaaatttcaaaaaactttaaaaattcatagaaaatttaaattcataggtactactgctaaatcaacgcagagacgcctttccttgacctttttaggcccctgcaaaatctggtgcgcttctgatcactactcgaaaaatgagtgattgaattttcactaaaaagttaagcctaaactttttggcctgtttaaaaaggaattaaaaatttttaaaaatttattcatctccctttttgatagaaaaagcatcagagtgcctaaactagcatgtaaataaaatttggtgcgtttcagagcattttctgaaaaaaatatttatgaattaattatgcaaaaataaataaaaatttctaaaaatttgatcgtccataaataatttgtaattgatcaggggctcaccaaattttgcagggatacgtatcggaacactacaaatgcttactaattttcctagattttttanacccggtgaaaattttttgcagacaccaccacttttgcacttannaaaatttcagaaa

SEQ ID NO: 43701 - DNA, 1085 bp, Heterodera glycines
aaaaaaaaaaattttttatttttttttgtatttttcaaaaagtttcctttccttaaattttcttaataaattgaaaaaaaaatggttgagccttgtttaacaaattagttttttaattttaattcaatttagtgtacatttattattttttttcaatcccaaaatccacaaaacaaaaaaagttgtaagcctttttcgttcataaattatatttttccctttcgcattggtgagccgggggatgggagggacatatcaacgttgttgattccggtaaaacgggctttttttgaacgggcggcccgccccggtcaattttcgaagcccggtcccgggcccggtcaattttaccaggctaaaacgggcttaaattccgccagcgaaactgcccaaaatttgaaaatttaaataattattttggcgaaatgtctttaattcaaaaatttcaagatagaactttggatttttgaaatttttgagcaatttcaactgttaaaaagaccccaaaatccatacgaaattgaacaacattttcataactttctttttacaaaaaaaaaatttcaaatttcatgaaaaaccaaaaattttcttaataaatttcattaaaagtcaaagtttttcttcagcgtcgcctagtacaaaaagctaaatttttttctaaaatgtagctcaaaatagcaacgttttgtcattttttcgtgtgaatctgttaacaaatcaaactcaaattttcaaaaatttacccggcggccctgtcggcactgccggaccccccccccccccaatgtcgtcaaaatctttttgaaaaaatacaccttaaaattcttttgaagagtaaaaaagctcgatttacaatggcttgacatttctaagctaaaataaagaactataaaattttttcgaatttttaatcaaaattacaaaaatttcgaaaaaagcccggtcccatacgggcgcccggtcaaaattttggaccgggacgcccggtaaaacgggctttttttgaacgggcggcccgccccggtcaattttcgaagcccggtcccggtactttcaaaattccgggctctactaaaaacatt

SEQ ID NO: 43702 - DNA, 972 bp, Heterodera glycines
cgcatctgggaaaactatagaaaaaaattcagcgcggacgactgagtcccagggacggatttctcattttttcgtgcgtttgacggcccataactttttttctgaaactcggatcaaaaaattcccgctgtgagggcactccgcagaagtgtcctctataatccagtattttttattttttgatcagaccaaatccctgacctgtacagacacggagactcagttaatttttttttcccacttcagtaccaggcgaataactcattagggtttgatctgggcggggagttaccagcagacttattgtagagttttgaaagcccgatttttccaaatttaaaaaattcgaaaattttcaaaatttttcgagttaggcctaaaaaacggttttcgggttttttaattttatgattttttaacgaattttcccagaaaaacgaagaccacttccaaaacatagtttttcgagctctatcgattggtaatttttttggaaaattttcgatttttttccagaaatagaaaaaatttttggcctgagcgggacatttgagtcccgggcccataactcgtcaggggttggttttagccaaaaatggccttagagcaaaattgtagagctttttaagctctatcgaacggtgtacttcattttcgaaaattttcaaaaattttcgagctaggccccctagaaattttcaaaaattttttttgggttgaaaaagagggtgaaaaaaatttttctggggtaaattagggtcctgagcacaaatatgatgtttattttaagtttcagattttttagaattttttaaaaattcgaaaatatttttaatttttttggtccttggaaatttgggttaaaatttgaaaattcataactcaatggaggactggtcaatttaagtgaattaaagctttaaaaatagcaaaaaatcgagagaattttatgagatttatttggttttataa

SEQ ID NO: 43703 - DNA, 995 bp, Heterodera glycines
tcatttctaactcacttctcaaattgttgataaattgcattatatttttccaaaagtctgttgacactttctgaaaataaattctatactcatgtattttccacttattagattttgcaggcttattgctgcatgttctttgccacttcttcaaaataacctatgccctttattcgttcaaaacaccatctttgttgtttcgctttggattgacaagcccgatgataaatagctcgagcgcaaaacgcgtgcatgtttggaaagtatcgttcataccaataattgagggtttatttttaaatgaaattttatgataaaccttattatctcagaagctatttaattgattcgaatgtttttatcgcggttaattagagcaacgaaaattggtttgaatcgtgaagattatcatttctaactcacttctcaaaattgttgataaattgcaaatatatttttccaaaagtctgttgacactttctgaaaataaattctatactcatgtattttccacttattagattttgcaggcttattgctgcatgttctttgacacttcttcaaaataacctatgccctttattcgttcaaaacagcatctttgttgtttcgctttggattgacaagcccgatgataaatagctcgagcgcaaaacgcgtgcatgtttggaaagtagcgttcataccaataattgagggtttatttttaaaagaaattttatgataaaccttattatctcagaagctatttaattgattcggatgtttttatcgcggttaattagagcaacgaaaattggtttgaatcgtgaagattatcatttctaactcacttctcaaaattgttgataaattgcaaatatatttttccaaaagtctgttgacactttctgaaaataaattctatactcatgtattttccacttatttagattatgcaggcttatttgctgcatgtctttgacacatcttcaaaataacctatgccctttatt

SEQ ID NO: 43704 - DNA, 938 bp, Heterodera glycines
ccatttactcggtggtggacgacgacggcgtttcaatgcgtcgagacgaagaggtgcggatttggggattctccaaatagcagcacattctcattttttacggcatactttttccgttgcacatgcaaaattaactttaattctgagcggcataatttaatttttatcgtcattttttgtggcattaattgattttttctttaattgcctaatattttacaattactcaggggaaaattctcgaccacgaggggaaaccgttgccgaccgacgcttacggccaaccgatggggcccgacagttcgccattgccgaccaatttctatggccaatttgtgcttggccaacggctggaggaggaggacaaagtgttgcccaccgacacaatgggcttcccaatttacccaatcgtttatccggacggacaattgctgcccactgccagttccgggcttttcctggactcggaacgaggggacgaagtgcaacgggacgagcagggcattccggtggacaccgatgtaaagcattggcaaaaaaggacaaaatgaatggcacgggggggaaggcaaccaacatattgtgaaggaggtcaagccaagtaaatcaacgaactcttttttttcttgttttttacaacatttaaagaggggaggggacggcagtgccgataaacgccgtctgggaacaaattggaattttttaattaaaatttgtttagcttagaccaaaggatttgtaaaattcagggtaaaacgctgccaaagaatgcggagggaatgttcgtattcccccggccaccgtcggaatttgtgccggagggcggagggtgccgcggccgcccaaacgactgctccgcccattttgacgacctcttccgaagcgcctcccacccccacgtccagtggccgaaggcgacgacaacgtcgacagcgcgt

SEQ ID NO: 43705 - DNA, 683 bp, Heterodera glycines
ggattttcctggatttttgtccaggaaatccagtccaggcaaaacacgaaaaaacctgttttcctagacaaaattttagaatttattatttcaagtgaccgatgtttttttcatttttcaaaaatgataatgattagggatgccaaaaatatgcacataaaatcgtaaaatatgcgcataaaatatgcaccaaaaatcgtgaaatatgcacataaaaagtgaaaaatatgcacataaaattttccaattgagggtgtaatttctcaaaatttcttcaaatttgttaaacataaagtaaaatcttcaaaatggctaaatgtggtattaaaaatcattttaggagaaaaaaacacgatacagcttaaaatctactcattttagcgaaaaatcaacctgaaaagcaaaattttgcttatttttgacataaattaaccattttttgagaaaatttatttattcaatattttttcgtgaaaaattttttgctaaaaattattttttttaaattttcccggtttttgaggtaaaaaaggccaatttgtctgggtggggccgatctattagaggttttttgggaaaacgccaaaatatgcacgaaatgccaaaatatgcacataaatcgcgaaatatgcacaaatatgcaaaaatatgcacatggaaagtcatcccagaagcttcaaatc

SEQ ID NO: 43706 - DNA, 960 bp, Heterodera glycines
  unsure (1)..(960): unsure at all n locations
aatccgaatcatccaatcacttagaatttatgggcacctatatcatcacttgactattttttgacaaaaaaacaaacaatttttgaggcacatttgggcataaggaaaatgtcacaatgaaaaattaaattgaaataaacaaaaacagagagaattttttgttaaatacgatgaatgtaatttaaggcaatgaattgcaaatgatttaagacgatgatcaatcaattggatgtgcaaaattaactcatgaatgacaaaatgacagcttttgttgcggtttgaattttaatttctgagcctggcaaattttgactgaccaaaaatagaatttctgaaaaataccttctgtcattcaaatgttaatgaaaagaataggtacgtgtaaaataaagaaataaatacttaaaagtggaaaaaagcaacaacagcgcgctttttgagtcctcagcggcaaatgaacgggaaatacacacagaaaacggtggtacccatgaaaaagaggatgatgatggcgaccacaatgcagatagccaacattattttcagctaaaaaattggttgctcttttactgaaattaaaatgttttcaaaattttgccaaacatagcggtttattcatatttttctctgtcctatattaccatcgtcgtcaaaaaaaagaagcgaacttagaaaacccaaaatagtaaagctgatcggaaaataggaatcgatgacatacaattttaaaaggggaaaaattgaaagaaaatgttctagagcccagtaaaatgtttgacgattggcagttgtgccaccatcaccttcatgttgcgcttctttgccacctccgcagctttcaccgtttttgagggcgccgtccgcgcgttcctgcccggnnnacactttccgctcgaggagaccgaccatttccccctggttacgaacaaccaattaatggagttaatgcaaaaatcccct

SEQ ID NO: 43707 - DNA, 848 bp, Heterodera glycines
ccttccatggaagggtgtgtttcgagtaattaagaccctttatgtgatggtaacaattgtcagttgtaatgccccgcaggctaaccctaaagttgtgcatattaatcagcttaaaaggtgcgtagaaatcctaggacccgcttgcaccgcaccaaatgtctccgatgaggaaaaactttcattggaaaaagcagatgctgttgaagtatttgacatgcccgattttaatcatctgaactcagacaatccaaataaatccgaaacagaccctaacactgagtccacataaaccttttgcagtattttgttattttcccacgtaccacaacactcatcaaattcagttccctcatttgatttcagattcaaaactcataatcctccaaattcccaatttccttcctcgttttctgatcaattccattccccaacaaagtccgacatccgatctttcatggactccgacaaccgttcaatgtccagcgacacgtctacgattcgccgagtaatcgacgaagctgttgacaacgttgtttgctctgaattgttggagggtcaagatcccattgacatcgacctgtcgtatgcgctggaggtcgaattgctcgggccgcaagagcccactaatccgcgcataacacctcaaccggacaacaactccgaagtttggcaaagttgtgacgatgacaacatggacacgtccagctccaagttggatgtgagtattgtgccgagtagtgatggtcgggcgacagcctgttctaatgagtcagttgtggaggatagcattttgattgatgaggaaggggcgacagcccagtctaatgactcgcttgaaacgaatgaaa

SEQ ID NO: 43708 - DNA, 963 bp, Heterodera glycines
aataaatctggcacatttagtggagtttgtccaagtctgatcagcaattcaatccttttgtataataaatctgatcagaattgatcataaagtttgtccccattaagcgctgaccgacccgagcattcactacggatttcatcggatgcagaaatcgttgccaaaatatccaaatgatccggaacgattgcccaaggaagtgattttgagaagagcggccgaactggcagaagcattgtacaaccggtgtgtggttatagtacagcttaatttattgtgatcaattggccattataccgtatttattgaaataaagcccccgggggctctatttttcaattccctcaaaagtggggctttatctcaggggggctttaattcaggggggagcgctctgtttttcaacccccctcaaaagggggtctttatttcaggggggctctaatttaggggggggggggttataattcagtaaatacgatatatcagtgccaatgccggaaatatcaatttttaaccattggcattttgactgcacaacaatttgtttgccctgaattaaggtacagcagcccggcggagcagttgagccactatgcatacagcttcgactcgggtctgtttaagtagatatggcccccgaatcttcggggtgagaaaaagtcggggttggggtgtactcccgaaaaatgtgcctaagtttgttttcgggattgggatatcctatcccagttttaactggcattccattctcggcaattatttgttccttttgggtgcgtttccttcatgccgtaccccctaaaatgcgatttcccggcaaaacctttctaattaagccgatatgcttcctcgttacatattacagatttttgatcatcattagcgatttgtcccgaggcaattatcggattagggtcgaaaattgctttggcattaaatattcgagctttatctataccg

SEQ ID NO: 43709 - DNA, 772 bp, Heterodera glycines
atccgattcagtcgaccgcgaatgccatatacagcaataacgaacagattctttgctccagtgttatcggcacaattaattaccttatgacttttaataaaaaatccaataagtaaaatcttactgcgccaacaggaagagcaagagaaacccggaatttcgccccagaagcgcctccacgacctcgcttagacattttaaatcaattattactttaaaaattgtctaaactccaattttatgtttaaactaacgaatttcaattctagaatcaatagttaagttaattgataaaagggcattaacacgcaacgctcacgttttctctctttgcttcaaattgagtaaatcgaaaatctcatttttggcataaatttccaattttagaggttattttattaaattctctaaggaatttcctaaaagctgattttttcaatccttagaggtcaaaaggtcacccttaattatgaatcaagggacgcgttggtttttcgaggcatggacggtaaaaaaggaaaaaatccaaaaaatttggctagtaaacaaaatgccaatgcattcaaaaagaaaacaaagtatttatgttatatgttgagaccgactaaaaaggcaccaaaaatagcgaaaaaggcactataaaaggcacgaaaaaattgaaaaaaggcatgaaaaggcacggaaatcccgaaaaaggcatgaaaaaaggcatttaaaatttttttattaagaatttttagggagcaaaacacgtaaaacttaaccaaataac

SEQ ID NO: 43710 - DNA, 1243 bp, Heterodera glycines
ttttaaaaagtgtttcactgaaaattgacaatttattaacatattttgaaattttagggaaattttgggggcctgtcgtgctgataggcaaaatggccatttttgagaattttttccaaattaccataaatcagcatctcataaaaaaatcagctttgaccttttgaaatcagcaaaatgctgataaaaaaaaaaagttctgatttgaagggctgagccaaacatttaaaataattggagttaaaattttttaaaaatactttcttttatttagcatatgtatcataaaaaatgtatcacggactggtaaaattgcataaatacataatgaattttgtttggttttttgtgcaggatgaagcaaaataacatctgtccgatgtgtcgtgcagatttatttaaaattacattttttaaaggttttatttaattaaaataaatttgcattaatcattttttgttaaagcaaagccaatcgtacagaaaaaaacaaaaaatcaaccgaaaattacaaatgaaattcactcagatgtgtgaagagacaccggatcgaaaagaaaaagagagtaacaaatttttcaaatttctgaattatttattttctttatgatatgtagcatttctaaaaggggggtggggatgacacaaagatttggcaagtattttacagtcattaaaccactaacgatgtttgaattctttttttatttcttttaacttattctttactcgataaattttgttagaagaataaaatttaaaggatttattataatgaaaaaaggacggattatatttaaaggttaacaaacccaatccgcaaaagtttgctttatttgaagatgaaaataaaaaatcataaaaaagtgcggacaaagtcacgcaacttttatatttggctttttatgatcaattttcaatatttccgtgttttttctttggttttgtattcagcacaatttttgaccaataattggctgaaaattttatttattttttattttcaaaaatcacttttgagcaacctttcaaacgattgaaaaagtgactccaatgttcgcaccgctttttaataactgttttttgttgagtcatttctcgatgtgaaatgatttttgtgctttttatttaataaactaattggatagtatcttaaaccagacggtgctatgacgttagtcaaaaaccatcaatgaaaatattttttgaaataactttgctcaaatgcaaccaaatttttaat

SEQ ID NO: 43711 - DNA, 1093 bp, Heterodera glycines
  unsure (1)..(1093): unsure at all n locations
ttaatgctatttgttagcagatttntgtctaaaaataccataatttagattttgtctaattttttaagaaaagatagctttttggggggtcggcggtgccgataggcgccgccggaggaaaattttaagaatttttaatgaattttgttaaaaaaatggccaactgatttttcataaaagtcggtcgattgtttcgcaattacctaaagaaaaataaatcgaaaattttcgtgataaattatttagatttgttattttcttggttcattcgatagctctaggtgtttctactagcctgtcaattttgaaaaatttggctaagtttcaaaaaagttatgagcaaaaatgtatgaaaacctggctcgttgattacattggccataactcgatggttttttatataacgcccttattgatggtttttatctaatgactcagcaccttttatccgaccaaatatctcacgacagcctgcccagtttggcatcgactaatccgcccctcaacaccaacatggcggtcaacgaggagcaaaagagataactcaaagttggcgcagtattcagtgagttcatttcaaaggcgacagtgcagagaggcatagacattttacaagtttttacttttttttattttttattattattctttcagctatttagaaaaatgcattgatttttttaggtttcttagatcataatagcccatcgatcttttcccacattaaaaattttttctttaattaaaaattgtccttttaggaaagaaaatgctaattcttttttttgctaatttgtataataaaatgccttaaattatcaacccatttttaacctgaaaatcgaatgaaacaattctttaaatgtgaacaataaaaagtcagaccgcaaaaattgcatgtgtaaaaaattggcaaattctttcatagtgctaatcaatttatgccactttanagcttttaggtaagttgctaaaatttattattaattcccaactagcattttttcatttttctaataatttacatcagccgattaatacaattaattgtacatttaacttgcccatagaaatgcctttacaacttttattt

SEQ ID NO: 43712 - DNA, 889 bp, Heterodera glycines
ctctctctcccctcgtgccgaatcatttctgggattgcaataaattgtttcctatcagcgagagttgcgtcgcaatatgtaccaatttgaggactctctggcaaagatgttcagcaatggggctgaagtgtcgcccctccccgtggcgcccccggccgactcagtccccagtccggctcaattagtccacgcacttgccattgccggaaaaattggccccgtttcttctgtatgactccaatcggccgatgcttttcattttcggcattttttgccattttttgtcaatttttgtcatttaattcgttagtgttcttttttttcgttattacagtattgcctccctttgagctttaaaaggaattaatcttttcctattttccatttttatttcttccgccgaattcgcctttcttttttcgtttttaaatttgctaattctctcaattaataattaataaatgccggtcgtccaattaaacatttgcacatttattttattttatttttctcatattttgtcctcttcagctgcatattttattttgatattctcattctcatttttggctttcctctcattttgcattgctttaactttcgttttttcgtcttattgttaattattgctcattttttgcgataaatttttaccttttttcgaactttcgccccgggcattttcgtccttttttccctcgtcaatttttgcgcaaacattcggtcggagaattggcaccgatttgagtttaataatggcacttttttttgtctattttgcctcagttcgatgaatttccttatcaaattgtccttttccttttcatcggatcgaataaaaagaaaagaaaaagaaggaaaggtgcatcagtgcaaaaaatgaggtgta

SEQ ID NO: 43713 - DNA, 620 bp, Heterodera glycines
caataaaagcattctttccattttcaggtacatcgatcattccgtcatcgcttttcttcgttcaaatcacaaaattttcgacaaaagaggcaccaatttagatttgtggattccttattcaaacaccacggatggccagcggatttgggacatttttgttcatgaaatttggcccattttttcgacaaacattcgccatttgcgcttttacgatggtgatgatttggacaatttgcttcgtcgcacttcgccgacaattctcatcgatctcaaccaattgaattcaatccattcatttggtcggttgcccgctgcgtttggtgatggttttgatgtgccaaattcaacattttcttctggccaagcattgtccaaatggttgcactctccgagaaaagatggccaacccaagctattgcgttgcgtagattacaacgaacaaacggacttcgattgggtcaacaatttcaaggaggtgtggcataatttcggcaaatcactgatttttgttttcaaattgtttagcaatttattcgtgccaatgccatttcttccgtcagttacgaaattcatttttatgttcacgtgccgtcaatacaaatggagccattcgagttggt

SEQ ID NO: 43714 - DNA, 1043 bp, Heterodera glycines
tttgtatggtacaaaatctctcgcaaaaaagagatagcctttttctggcatagaaataaatttaaaaattccctgtagaatagaatggccattgctctccgcgcccctctgcccatgctgggaacatttgtatggtacaaaatttctcgcaaaaaagagatagccatttttctggcatagagaataaatttaaaaattccctgtagaatagaatggccattgctctccgcgcccctctgcccacgctgggaacatttgtatggtacaaaatttctcgcaaaaaagagatgccatttttctggcatagagaataaatttaaaaattccctgtagaatagaatggccattgctctccgcgcccctctgcccatgctgggaacatttgtatggtacaaaatttctcgcaaaaaagagatagccatttttctggcatagagaataaatttaaaaattccctgtagaatagaatggccattgctctccgcgcccctctgcccatgctgggaacatttgtatggtacaaaatttctcgcaaaaaagagatagccatttttctggcatagagaataaatttaaaaattccctgtagaatagaatggccattgctctccgcgcccctctgcccacgctgggaacatttgtatggtacaaaatttctcgcaaaaaagagatagcctttttctggcatagagaataaatttaaaaattccctgtagaatagaatggccattgctctccgcgcccctctgcccatgctgggaacatttgtatggtacaaaatttctcgcaaaaaagagatagcctttttctggcatagagaataaatttaaaaattccctgtagaatagaatggccattgctctccgcgcccctctgcccatgctgggaacatttgtatggtacaaaatttctcgcaaaaaagagatagcctttttctggcatagagaatatatttaaaaatccctgtagaatatatggccattgctctccgccgccctctgcccatgctgggaaatttgtatgggacaaaattctcgcaaaaa

SEQ ID NO: 43715 - DNA, 843 bp, Heterodera glycines
ccctcggacaaaacaattcacgggtagaatcatggggatggggtgggggttatcgaggccaaattttgacaggtggcgacatatacaaaatcctcgaccaagaaaacttcgcttcattcacggcaccaattccacccggaccattgaaattcttgctgatggatgcaatgaatgatctgcggaacatttaccgtctttccagggccaaaatccttcatcccgaggacctcaattagcttgaacactggaccaaaatgttctactgccactggcagcaactccgaacaattgacgccgctcgttacccagtccggccaaagcttcatcttctcgctgctcacgtcgttccatttgcacgcactcatctctggtggggactgatcagtgaacagggaatggagcatatgcacagaatgcaactatttggtttaatgaataatttttcccattaaaattataaatccaggtcggtcgttatgctcatctcggtactccagagaaggttgttgagaagttggtgaaacacgtgacactgctgaatgcccttcacgatcgaggtgtcgaaaacaatcaagaaaatggaaacaaatacccaaacttttgatcaaatttcatttttccaaacattttcaccatttcacatttccactatctgaatattatgttgaacacatcttttccgctttctatagtactattaaataaagagtttagtcaattgaataaagtttattaatgttaattggtcttcaaaaaaggcagtgatcagtatatcttttgaattaacgcgcaaaaatttacgccaaatgcgctatttggcgttatgagcaattttgtctgaca

SEQ ID NO: 43716 - DNA, 170 bp, Heterodera glycines
cggccgagccagtcgattttatcattcataatcctataatacaatcgtactacctagcgggggatgcgccgaaggcgctgaccccgctagttgtataaattttttgccttttatccatgaatatgtcattcttaggggtgtattttcacccccgtgcccccgcgggggcg

SEQ ID NO: 43717 - DNA, 823 bp, Heterodera glycines
tcgtccaatcgcggacaaagtgagtggttttgtgcctccccatggttcatttggttgtctaatgtgaaaaattaaggctgagggttagcaaaaaaaatcaaaaaatgatgcattttgctggatttttgaaccataaaatttgaatgttttgtaagctagtcgtgccaggccgttaaaaaaaataaaattttgtcggttggttaaaagttttgaattttggcggtgaattgggagtagtccggcggtaccaacaaacgggagcagctcgtttccccccccccccccccccccgccggtaaatcttaccaattctccatataaatttctcaaaaaattttttcttagaatattcctatgatgatactttgctagatgtttatgctgagaaaagaccaatgtaggtaaattttgttaacacaatttatctaggatggttgtgatcccgtctttcgagcctggttaccgatgtatttgattccccaactaagaaaggtttagaatatctactttagcatggccacttatacattcatcagaaatgttcagtgcgtgtacataaatatgaccaagagaggatacgtcgcgctatcttgtaattagcgggagtgcttaagcgaaccaatttctaatttagtaaatgtttcgaatcactgacccgaattcaaacaaaaatttgaaaatttcaaaatacatttatatgttcgtatctataaaaaagaaattttttccaaaagaaggtccaccatctaaagtgataccaatgtacatcgtttgattccattttttgcgaccaattaccaaacccgatgtcctacaaaaagaa

SEQ ID NO: 43718 - DNA, 911 bp, Heterodera glycines
  unsure (1)..(911): unsure at all n locations
ccatacattaaaaaggggggtgggttggtaaaattttttgcgaaggggggggtcggccgccgatgaccttttttttttgcttttcaaaaaccgttttttcggcgcgtttttcccaaaaaaattttcgggaacagggggggccggcggtgccgataggcgccgccgggaaaatttttgatctttgggtgtgatttgttaacagatttttcaccaaaaatggccaatttttgcgattttgagccaatttttgaagaaaaaataggaattttggtgttcggcggtgccaccagcgnncgccggaaggaaatatcaattgccacctttgctgtgttgtttcgacaagtgcggtccaccatcatttcgttgttattcgacgtcacgggaggcaacggaacattgcgaagcaccggcggcggttgtggcggaggagtggcgaatcgaatgtttgaaacttctaaaacaaatacaaataagcaaatgtttggtacagcatccgtatgtaaagcttttgccttgtgatccgttgatttgttgctggtaatccgacagttcgccaatcggtttaaacttcggcggcgagactccctgagaaagttttgaaaaagtgggaatacaaaattgtataaatggtcggacaaatggaatcagacaaataaaaagactagcgttttgaaaccgaatgaaaccaaacatgtgtaaagggtgcagaaagggctgaacgtaactgcgtttcaataatagaaatccgtaagggaggtccaaaaatgcttcaatttgtaatccgtaacccattatatgcattgagtctgccacacatccccgcccccctcctccgttaaaatgcgtatccattttaatggaggatagcgagtggatattgcgtgtccgaaaagcaaaaaagtagacattca

SEQ ID NO: 43719 - DNA, 227 bp, Heterodera glycines
aatttttcatttatttttcaatcattaatttataattttcacttttgttatttttgtaaaataaattttaaaaattgcacgctcagccacaaccgagcacgccaagagctccgatcgatccccccccccataggagagcccaagcaccactctctcggagcccagagcgtacccgcccttttggctagggctagcacagctcggtccccaaaagactctcggagccc

SEQ ID NO: 43720 - DNA, 896 bp, Heterodera glycines
  unsure (1)..(896): unsure at all n locations
cgcacgntgaatgttatttttattgaattctgagccgttttgagtagattagactagaaaaaattgaaaattttgaaatcatgtttcncactcccttctcncaggggtattattttgtaaagtctttttttccccaataaacttttcataccccatttttcgcaccgtgaatgttatttttattgaattctgaaccgttttgagtagattagactagaaaaaattgaaaattttgaaatcatgtttcccactcccttctcccaggggtattattttgtaaagtctttttttccccaataaacttttcaaaccccatttttcgcaccgtgaatgttatttttattgattctgaaccgttttgagtagattagactagaaaaaattgaaaattttgaaatcatgtttcccactcccttctcccaggggtattattttgtaaagtctttttttcaaaataaacttttcaaaccccatttttcgcaccgtgaatgttatttttattgaattctgaaccggtttgagtagattagactagaaaaaattgaaaattttgaaatcatgtttcccactcccttctcccaggggtattattttgtaaaatctttttttccccaataaacttgtcaaaccccatttttcgcaccgtgaatgttatttttattgaattctgaaccgttttgagtagattagactaaaaaaattgaaaattttgaaatcatgtttcccactcccttctcccaggggtattattttgtanagtcttttttttcccaataaacttttcataccccatttttcgcaccgtgaatgttatttttattgaattctgaaccgttttgagtagattagactagaaaaaaatgaaaacttttgaaatcatgtttcccactcccttc

SEQ ID NO: 43721 - DNA, 1010 bp, Heterodera glycines
aaaaaatgagaaaaaagagatagctattttttgtcaaagaattttttttgttgcgtttcaaatatcgtaagattgttgatagggccagacaagagaaggcaactgttggtaccaagtttgcggtaaaaaaatgagaaaaaagagataaccatttttggtcaagaattttttttgtttgcgtttcaaatatcgtaagattgtttgatagggccagacaagagaaggcaactgttggtaccaattttgcggtaaaaaaatgagaaaaaagagatagacattttttggtcaagaattttttttgtttgcgtttcaaatatcgtaagattgtttgatagggccagacaagagaaggcaactgttggtaccaagtttgcggtaaaaaaatgagaaaaaagagatagccattttttggtcaagaattttttttgtttgcgtttcaaatatcgtaagattgtttgatagggccagacaagagaaggcaactgttggtaccaagtttgcggtaaaaaaatgagaaaaaagagatagccattttttggtcaagaattttttttgtttgcgtttcaaatatcgtaagattgtttgatagggccagacaagagaaggcaactgttggtaccaagtttgcggtaaaaaaatgagaaaaaagagatagctattttttggtcaagaattttttttgtttgcgtttcaaatatcgtaagattgtttgatagggccagacaagagaaggcaactgttggtaccaagtttgcggtaaaaaaatgagaaaaaagagatagccattttttggtcaagaattttttttgtttgcgtttcaaatatcgtaagattgtttgatagggccagacaaaagaaggcaactgttggtaccaagtttgcggtaaaaaaatgagaaaaaagagatagccattttttggtcaagaattttttttgtttgcgtttcaaatatcgtaagattgtttgatagagccagacaagagaaggcaactgttggtaccaagtttgcg

SEQ ID NO: 43722 - DNA, 1289 bp, Heterodera glycines
cagacttttggaaaaatatatttgcaatttatcaacaattatgagaagtgagttagaaatgataatcttcacgattcaaaccaattttcgttgctctaattaaccgcgataaaaacatccgaatcaattaaatagcttctgagataataaggtttatcataaaatttcttttaaaaataaaccctcaattattggtatgaacgctactatccaaacatgcacgcgttttgcgctcgagctatttatcatcgggcttgtcaatccaaagcgaaacaacaaagatgctgttttgaacgaataaagggcataggttattctgaagaagtgtcaaagaacatgcagcaataaacctgcatgcccctacgagggtccgagcgaggagcggagcgaagcgaagcgacgagcgatgtgtaccgagtcaatacgaacctgatcaattcttttgcatgccgcgtagggtggggtgggggtgaacggctaggctaggctgtaaccggtagctgctactgcacgaacatccagacacgcatctgcgcctgagctgctactgcactaacaaccgcgacggtgcacaccttacgcatctacccctcgtgtggcctaccagccgaccccatcaattgcccagccatctaccgggacgcctagttatctttattataaaattatgtggggggctaaccataaaacgatttggccgcaaagaactacgcaacggatcgccacgagaccggtaccattcgaaagagctcggttttttctatcgttctatccttgtggaaaaattagtcacaggcagaaaatttcgagaaaatcgcgttcgaacgaaaaaaacccggctttttacaactggccaaaaatgggttgtaaaatgtgtgttttcaccttatttctcgagaaccgtcagagctacgcttttgcggtaagcgaacaatttgtagagctcgtcgagaggaagggtgagaaaaaaaattcgtagctctacgacaaattcgaacaaagttataccccggcaaaggtcgaaaaaagccgattttttttgtattttcgccttccggtttacaatccgtttacaattgcaaattcgtccggaatgtccggaatttcgaccgaccggatggattttgtgtttttgcatgtgttttcaaccggtttacatgtgttttcggcatgcgttctttaaaccggttccggtttttcacgtgttttgttcacatttacgtgtattttcgacacgtttgcatgcgggaagaacatttcacgtgtgttttcgttacattaacgtgtgt

SEQ ID NO: 43723 - DNA, 996 bp, Heterodera glycines
  unsure (1)..(996): unsure at all n locations
aaaacgacagctgttcatcaatttgtaaggcttcacatatgtaattggcatttctcttttataatttttaaaaatttaattttttttgtccataattttcgacatctccctatttttgtcatttanagggcgatcttctgtccatcaattgccatgagcgcacggattcgtcggatttgcttggaagcattcgtcccataagtgcggaagaagggggcggcggctttcgttggcgggatggcattgtgctgcaggcaatgcgccgtgggcaacggttgttggtcgatgaaatttcgttggcacccgactcggtgttggaacggttgaactctttgctggagccacagcgtgccattctgttgaccgatgcgggcgccgcgcatcaaagcgacggcactgacagcggcagcagtagtgccattggcggtggtgagacagtgacagcggctggcggtttccaactggtggcaacaatgaacccgggaaatgatcatggcaaaaaggaggtgagtgagaaggaaggaattaattttttaccactttttcttatttgttgacaaaaataattgatattgactaattgtgcgaaaaaaagttgttgtattttcaagttgccgactacactcaaccaatccccgtttcttttttcatcacaatgaattaaatatgaaattttgaaggaaactgctttttcgttccaaattttcgggtgtgaaaaattctaatgtaaatgaaaatgggtataaatcagggatgggccaaattgaaaaataaaaagcgaaatgcgaaaagctaaaatatgcgaaatgcgaaagcgaaattttttctacaactttttaatagtttaaagcataaagcaaaaatcatttttttaaattttattccaaatttaaaaatcaatagaacgcttttttgaggctcgctttttccaaaaaaactttttgggaagagggggcaggcgccgccggaaaatttttgaaaatttgattaaaattt

SEQ ID NO: 43724 - DNA, 858 bp, Heterodera glycines
ctccccataaatctgggcgcatcggttcggggggactgccccgaaaacaaaaaatcgattttttcaagtgtccgtttggggtactcaaacaattatggggagcaaaaatccaacgcagaattaaagtacaggctatagggaagctattcccgaaggattcggtctccccataaatctgggcgcatcggttcggggggactgccccgaaaacaaaaaaatcgattttttcaagtgtccgtttggggtactcaaacatttatggggagcaaaaatccaacgcagaattaaagtacaggctatagggaagctactcccgaaggattcggtctccccataaatctgggcgcatcggttcggggggactgccccgaaaacaaaaaaatcgattttttcaagtgtccgtttggggtactcaaacaattatggggagcaaaaatccaacgcagaattaaagtacaggctatagggaagctattcccgaaggattcggtctccccataaatctgggcgcatcggttcggggggactgccccgaaaacaaaaaaatcgattttttcaagtgtccgtttggggtactcaaacaattatggggagcaaaaatccaacgcagaattaaagtacaggctatagggaagctattccggaaggattcggtctccccataaatctgggcgcatcggctcggggggactgcccccgaaaacaaaaaatcgattttttcagtgtccgttttgggtactcaaacattatggggagcaaaaatcaacgcagaataaagtacagctataggaagctactcccgaggatcggtctcccataatctgggccatcggtccgggggactgccccgaaacaaaa

SEQ ID NO: 43725 - DNA, 475 bp, Heterodera glycines
tttttattaatttgctttttttttgtttagacatttttaaggtgaattattgctgagtaagcacagtttttcccattttcgttcataaattgcatgttttgtgctgctaacattgtcctggagaggtcaaagtgaccataattattaatttggacatcacataatgggatttgtgagggttgcggaaaaagtgggggggggggggtgggcatgtgctaacaaataaaagtaagaaatgtcgagagagagacattggcacaaaaagaattaacagtaacagagcccagtcgagacgagaccaaagaatgaatgaatggcccaaaaatccgagaagagccccccatcggtaagaactgtcgaaaaaggggacgaagtgttttgacttggaccctcccatgaagaacaatggcaagtggaagtgcgcggcgcgtgacctttcccccttcgctctccccttccccctgccccccccccc

SEQ ID NO: 43726 - DNA, 961 bp, Heterodera glycines
atcaaaaaaagaagataagccatttttctagggataacctctaaatataaaaatcctcttgtgaaataaaatggcgattgtgcacagccctccgtctcatacgcaagcgcttttgtgaggtataaaatttctcaaaaaaagagatagacatttttctgggatagagtataaatttaaaaattccctcaaaaataaaaggtctattgcgcaccgccctccctatcatgctcgagagcatttgtatgtgtataaaatttatcaaaaaaagagatagccatttttctgggataacctctaaatataaaaatcctctgtgaaataaaatggcgattgtgcacagccctccgtctcatacgcaagcgcttttgtgaggtataaaatttctcaaaaaaagagatagccatttttctgggatagagtataaatttaaaaattccctcaaaaataaaaggtctattgcgcaccgccctccctatcatgctcgagagcatttgtatgtgtataaaatttatcaaaaaaagagatagccatttttctgggataaactctaaatataaaaatcccctcaaaaataaaatgtctattgcgcaccgccctccctatcatacgcgagagcatttgtgaggtataaaatttatcaaaaaaagagatagccatttttctgggataaactctaaatataaaaatcccctcaaaaataaaaggtctattgcgcaccgccctccctatcatacgcaagagcatttgtatgtgtataaaatttatcaaaaaaagagatagacatttttctgggataacgtataaatttaaaaatcccctctaaaataaaaaggtctattgcgcaccgccctccctatcatgctcgagagcatttgtatgtgtataaaatttatcaaaaaaagagataaacatttttctggggataaagtataaatttaaaaattccctcaaaattaaaagg

SEQ ID NO: 43727 - DNA, 1155 bp, Heterodera glycines
tttttgagtatgaccattatcaaaaaaaaagttaaaatcaagtttccatagaccataagctttagttaatcccaagaacataggtattatagaccaagtaagaaaaaagttatggcctaagaaacgggatgatcattcacgggacacataatctgccacgggacgcataaaaccgactagaaccaaaaatttaggtttaaaaattttccttatccgaaaaaaattatttaataatcatttaaatgaccaagattaagttctttgaatacctttaacgtgtttgctccctaaaaagccttaataaaaatttttaaatgctttttacatgcctttttcgtgacttttttcaaatttttggtgcctttttagtcggtctctacaaataaatttaaatttaatcatatgttttttggcaaatttgttgttttttacagaatttgtaagaaaagtttttgtcgcatcaatgtgttggccaaggagaataaatacagttcggtagcaattggcaaaattttcgatcagtaccggtaaaatcgattttatcccaagaaaatattattttttaatttataaaattaagtgccataatttttaaaagaaaaaaagtaaagaattttttttttaaatctaagttggaaaaccttcgagctaatcacaaaatttgataatccaatttttttaccaaaaagtattcaattacatatgtatgtaatcacataattttaataaaatgtcacattaacacatcatctcgttgaccactccctggcagttgaccacgggttgaacttcgccagttacagctgtgtccatccgaccgggtctttgttctgtcagtgagatgaccagtgtcgtggccgcgccctatttgggaaagaaaaccttattttgaaaaacactcatttttcaaaagataacataaatcaataatttaaattacttaaatcgattgctttagcttcattttactgggaagcagtgtattttttttagaaattttggcaatttatagtttttcactattttttcctgagctccccgtggcctgaaatgcacgaaaaacatgtttttttcgactgttattaagctacttttcgagttattagcaactattttatagttctttatttttagcaactaaaaaatataaaattt

SEQ ID NO: 43728 - DNA, 1241 bp, Heterodera glycines
  unsure (1)..(1241): unsure at all n locations
ttgacgtttgccaatggaattgggtcggtgtacatcttttccacccgcctcgancctggtccattccaaggtctaagaaaatttgaaattttattattagaaaaccaaaggggtgggtaataggattcaaaaaaaggngtcacggaattttctcagtttagtggacccaatcggngtgtgtgtagttaagttggggtaaaaaaacaagagggngatgaagcagaatttgtggacagcaaccctgtgaaatttcacaaaccaaaaaggtcacaacttatggccaggggtccataaaactggaaaagtgctaagggcacgaataccttgaaacatcgtgttgagtgtggtggagagacggatcacattgcggtcaacctcaaacacctcatcgtcgttcgacttcagaaaaaattttgacgctgacatttgcaatttagggaaatatttagcttaccttaaattgtaacaatttatttgttttttgtgaacataatttagtgttgtctggttatgacttatgatgtattttataactctacttttcttcgactatatttgtaaataattttttgtttactgtttcgagcacaaattagttatacaaaaacttctgtatactttaagctttcaattgataccaagaatgtggcctatatagtcattgctgggacacttaatctgtgatttgacgcgtaaagttttgattggacgcacaaaatggattcgatgcgaaaattgctaaaacctattttatttgtgccttacaattagactgaaatacatatttttgcggttatttcggtaaaatgcgaaaagcacttaaaacaaatgaatttttaattgaagggaatgggaactcacttcagtattttctttttgctggtgagaatgtgaatgagaaaaagtaaatgaatgaaaacgtgagaatttttgatgaaaattttatttggatggagacacaatgccaataaaataaaattcaaatttgactgaatataagagcacggcgggacggtggggtcaagttgttgactcggtcaattgcgcatgaacaaagtttcaatgtgcttcttctttcaataaatttatggcaaaaaaccaaattttcacgagcattttggccacaaatttaatttgttgttttttgttgcagatccgacaatttattacaatgtttcccggattattcactttccaaaagagtaagaggcctttgtcccttcttctggacttttattatt

SEQ ID NO: 43729 - DNA, 1131 bp, Heterodera glycines
ttaaaattttgcctattaaaatatttattaaattttaatatattttatattttttcaaaaatttccggtttccgacgtttttggggtcgaaattccattccgacttccgaaaaattcttggacctcgaaattccgattttcgaaaaattttttacccccgtaattccggtttccgtaaatttttggggcctaggaatgccatccctggtttaggccctatatcgcccagttggcatcacccatttggctacgcccgccgctggcatcgcccggttgatttgatcccatcggaaataaaagagtggaaagacgatcatggttcccacaaataattaatgttggcttttacaatgttttgaagacgtggaattcgcctgaaaaaagcgagtgaaagtcatgttattggagtaattaatgtgcaataatgcttgaaacacaaaataatatcgaattattccataaattataatgtttttcaaaacccattaattagaatatacaaattttaaatgatcgcctctcatttagaaatttaattaattaattttcgaataaaaaagaaaaataattcagattttctgctttgtaaatgcattttttggcatttttattttcgtttttctgttttgacttcgttttggcagatgaaacggacaaaaggctgaaactgcgcgtaattttccaccagaatttgccaatgcgcaaagtcaacattagattaaatgcaattttcaatgatggcaacgaaatcgtacagaaatatttgaatggcaaagacattgaaatcgaagtgccatcacagggagaaaagaaagagaaaattgttttgagattttcaattgttataatggcaaacgaagacgaaattaggcaaaatgagggggaggagaacgatgggacggcgacgaacacggcacaaaaccaaagccaaaatgccatccccagcccaagaaaaaaggccatggcccaacggcggagtgtcgaagtggcactgtacaagccgaacttttcaaaaaggtgccctccctaccaaacacacaaatttaaatttaaaattgacatagttatttatcccataataaatctttcaattggtctgacctattaattggtctggcccaaatcgaaact

SEQ ID NO: 43730 - DNA, 214 bp, Heterodera glycines
taacgaagacggcggtgtcatccatgctcaccataacggcggcggtggcctgacgagccatcataccggtttcgatggtgacggtatgctggccatactggaatttgcgaatgatcggtgtcagcaaaattatatccttgattagcggcgcgcaatcgcattgacgactcgacacgcctgtgactcgatttgccttctcactacatcctcgcga

SEQ ID NO: 43731 - DNA, 1381 bp, Heterodera glycines
  unsure (1)..(1381): unsure at all n locations
caaacggtgtaacagagcgcgttaatcagaccatactaggaatgctacgaaggtcgacttattcagctgggaatgggacgaaagactgccttttgtagtgtttgcctataattcgacaccatcagaagtcaccggcatttccccccaccatntaatgtttggcaaaccaataaacttcccattggaacatgaattgaaattcagcgtaaatccgctttacacaatagaccaaaattcgtatattcaactttttcgtgagtcactaatgcaattagtggacgaagcgcggaaaaattcccaaataagtcgtgcaaaaatgaaagaacactacgacgcacaagcaaaagtcacggagaacaaattccaaatcggagacagggttatggtcatttttcccgggtcccacattcgatcaccacataaaaagattttgtggaaccattttggcccatttcgtattacggaattgaataaatcgacggcgaccgtaatcccgtccgataatccatacggtaatccaatgacagtccctcttgaacgattagtgcgcgtaccaaaggaattgccaaacatttgtacaatgccgaaagggaaaaacccctataagaatgttttaaatggactgataagtgtggccggattaatttgtcaagaaaacataaaattgtatggggaagaaaaattgaactctaaaccggacggaataattgggcaattgaggtcaattgcatttttaggcggtgaggaggagcacatggaaacggaacagacggacgacaaagaggcggagaccaacgaaagcgaaaacgaagaaaatgtagaggaaaagatggacggcaaagaggtggacgcgaatgggagcgaaaaagaagcgaatctggaagaagaagaccaaatttcggtcgttcaggaagaagaggagccgaaaacgctttcttggacattggcatgtgtcggagacgggcacaaatgctgctccgatgtggtcgtggccgacttggatgctgtccttgaccgatcaggcattgggctcacgaagatcgagaatccgctcaaagcgctgttggcaatgtttctgctgaagtctgaagcggtcgcatcggcatctgctgccaaaaagctcatttcgcaaattctggacacggatgccgattgggaactcgcaacatattgcagtgcccgagaagacgacgtcaaaaacggcacatttccatccgaatcggacgtggaaagcgttttgcgaatttggatcggccactgccaaattgcccgaaaagaagtcgaaaaatcggcatttgggccaattgcaattgagctgccccaaggcctatcacttctgcccgaaagagaaagagaaggcatgaggaaatcgctcgaaagt

SEQ ID NO: 43732 - DNA, 1037 bp, Heterodera glycines
ttttttttttccccgttgtccagtggggttttccccaaaaacgcctttctatttgcggttgagccctacaaaaggtcggtttgaaaattctgttttcagaagaatagataatctcagaaaaatgggctatctctttttttctacaccgttgtacatgggggttttccccaaaaacgcattactatctgcggttgagccctacaaaaggtcggtttgaaaattgctgtctcagaagaatagatattctcagaaaaatggctatctctttttttctacaccgttgtacatgtggggtttccccaaaaacgcattactatctgcggttgagccctacaaaaggtcggtttgaaaattgctgtctcagaagaatagatattctcagaaaaatggctatctcttttttctacaccgttgtacatgtggggtttccccaaaaacgcattactatctgcggttgagccctacaaaaggtcggtttgaaaattgctgtctcagaagaatagatattctcagaaaaatggctatctctttttttctacaccgttgtacatgtggggtttccccaaaaacgcattactatctgcggttgagccctacaaaaggtcgggttgaaaattgctttctcagaagaatagatattctcagaaaatggctatctctttttttctacaccgttgtacatgtgggttttccccaaaaacgcattactatctgcggttgagccctacaaaaggtcggtttgaaaattgctgtctcagaagaatagatattctcagaaaaatggctatctctttttttctacaccgttgtacatgtgggttttccccaaaaacgcattactatctgcggttgagccctacaaaaggtcggtttgaaaattgctgtctcagaagaatagatattctcagaaaaatggctatctctttttttctacaccgttgtacatgtggggtttccccaaaaacgcattactatctgcggttgagccctacaaaaggtcggtttgaaaattgctgtctcagaagaatagatattct

SEQ ID NO: 43733 - DNA, 955 bp, Heterodera glycines
attaaatcccgtcccgggaattggacaccaacttttgtcttttgttgtagcgctgaataaagcactaatagtgtgtttgaaaacgcacgaaaaatagttattgacaaaaaatggctatctctgaaagtcacgattaaatccctaccgtgaattggtcaccaacttttgtcttttgttgtagcgtgaataaagcactaatagtgtgtttgaaaccgcacgaaaaatagttattgacaaaaaatggctatctctgaaagtcacgattaaatccctaccgggaattggacaccaacttttgtcttctgttgtagcgctgaataaagcactaatagtgtgtttgaaaacgcacgaaaaatagttattgacaaaaaatggctatctctgaaagtcacgattaaatccctaccgggaattggacaccaacttttgtcttttgttgtagcgctgaataaagcactaatagtgtttttgaaaccgcacgaaaaatagttattgacaaaaaatggctatctctgaaagtcacgattaaatccctaccgtgaattggacatcaacttttgtcttttgttgtagcgctgaataaagcactaatagtgtgtttgaaaacgcacgaaaaatagttattgacaaaaaatggctatctctgaaagtcacgattaaatccctaccgtgaattggacaccaacttttgtcttttgttgtagcgctgaataaagcactaatagtgtgtttgaaaacgcacgaaaaatagttattgacaaaaaatggctatctctgaaagtcacgattaaatccctaccgggaattggacaccaacttttgtcttctgttgtagcgctgaataaagcactaatagtgtgtttgaaaacgcacgaaaaatagttattgacaataaatggctatctctgagagtcacgattatatcgctaccgtgaatcgatcaccaacttttgtc

SEQ ID NO: 43734 - DNA, 983 bp, Heterodera glycines
  unsure (1)..(983): unsure at all n locations
gggggggagatttcaaccgccttcaaggtgtgggggctttatttcagggggctataatataggaaatacggtaattgaattttttttttataaattctgccagggctacctcgatgcacgctttggcacattctctgaccaaatatgacgcccgaggggggctgttcaacttgagaaccttaaaaaccaaaaaaaaaaaaattaaaaaaaaaattaaccaactttcattcgaaaaaatgtgatggaggtgagcaaatcgacggtggacttcaaatcgcgcaactttgccgagttggaatacggaaaatttttctaaaaaattaaattaaatgtttgtaatttaaatttgtttttttttagctaattgatttatttaacaattttctccaatgctttaaactaaaaaatttntaaatgaaatttcaatatattttcaatttcaattttttatgaaatttatttttaaaatttatatttttctactgatagtttaaaaatttttcaaatttaatttttttctccattcagtataaaaatgttcccaaatttttataaaagtatttcttcattttctatattttaattttcaaatttaaaaattgttacaaaaattcatataattcctgattcaaccttctgatttaaatttcaaaattttaactccatttgaacaatttgtaaacaaattttccgttttacattaatagatttttcaaatttttctccattttaaacaatgcgtaagcaattctgcattttcccccagtgttttatgtttttcctccaaaatgcttcatctccccacggcatggcatggcatgccattttgtgccagagcacacctcctccctcctctgcatgaacatgttcgtcaacacttcggacacgcgttccagtgccgggccgacgccgtccggcgccgccggactcgagtggcgccggcccctgtcgtccgcgccgtccagcgccagtgccgactttgg

SEQ ID NO: 43735 - DNA, 1403 bp, Heterodera glycines
  unsure (1)..(1403): unsure at all n locations
cgacggttcacgcacccgctagtatatatgttatataggtttngagtttcgttgctaaaaacattttctcccgggccgaaggccggggagcgcccctgaaagtagtggaagggtcttacaactttttgaggagcatccgggaaaactatagagaaaaattcagcgcggacgactgagtcccggggaccgatttctcactttttcttgcagtttagggcctgtaactttttttctaaaaccncgaatcaaanaagtgcccggctgtgagggncactcccccccccacccgtcctctacatgctggtattttttatttttttattagagccaccccctggcctgcacgcttggctaattgaagtgtgctcaaaatgtacacttcagtaccaggcgaataactcgccaggggttgctttgaccgaaaaattgtttctgagcaaaaatgtgtagtatttgaaaggctatccaaccaagttttaaaatttcgaaaattttgaaaatttttcgagctaggcctaaaaaacggttttcgggtttttgaattttaggattttttaacgatttttcccagagaaacggagaccacttccaaaacatagtttttcgagctctatcgactggtatttttttcggaaaaatttcgattttttcccggaaatagaaaaaatttttggcatgagcgggacatttgagtcccgggtccataactcgttaggggttggttttatcgaaaaaactccttcgggcaaaattgtagacttttttaagctctatcgaatggtgtgccatatggccggaaattttcaaaaattttcgagctaggccccctagaaattttcaaaaattttttttgggttgaaaaagagggtgaaaaatatttttctggggtaaattagggtcctgagcacaaatatgatgtttattttaagtttcagattttttggaattttttaaaaattcgaaaatatttttaatttttttggtccttggaaatttgggttaaaatttgaaaattcataactcaatgaaggactgctcaatttaagtgaattaaagctttaaaaatagcaaaaaatcgggagaattttatgaggtttatttggttttataatgttcaaaagaaaaaaagttattccagaatttctggaaattttcgatttttcagaaaaaaattcataactcggttctgaaaggtcatactgtaaaagtaaaatactacaaaaatccgcaattttttcctctataatataaattttattttacatttttatatcttttttgcgaattgttataaaaataaaagtgatttttggtttcgggaccataggggggtgaccaggatttttgggtggaaaaattttttcaccgnaaaatattccaaaaacatgtctttaggggtattt

SEQ ID NO: 43736 - DNA, 1593 bp, Heterodera glycines
  unsure (1)..(1593): unsure at all n locations
actcgccctcagatttgtcaaactctaaattgaattgcaaataattgnatatagtgaaaaattgccattttacttttacttgggaatgctttctttgatttggtcgccttttttgttcctttcacgcttcccaaagctntggcttctggcaatccaattgcttcaatttcgctttggtccatttccatggcgaattcaggattctaaatgagtattgtcgaggattcgatttaaatggccatgattaaatcaaaaacatacctttttcaatgcctcatttggatcatagaccagtccccattgcacttaaattttgccgcgatgatagttgggtttgccatgcttttttgatcaaagagctaaaagtattaaaaaaacgacatgaattaattgtatctatttgctgagcttgttgatctatgtatttgaaatgaaaataaaattctaaatcgaattccaaatttctgaaagaggaatttcaaaaaaaaattaaaataatgtgagaccatcagcaaatcgaatacaacaacaggaaattagcaatttaaaacttcaatatttttaccatccagctatgttcctttgctttttcttctgttttttgttttgcctcttaactgctgacaatttgtatctgaatcgcattcctttttttcctccatgttttactgaacgcattgttcttaataaattgatctgaaaattagttaaataatttgaatacctatttatctagtaattttacaggtaactaattggggtattcatgcatagagtaaattctgtttttctattaaaagaagagataatacgccaaactgagagaaattattatgaaaaaaagaaaaagcagagaaagaattagatttcttaaaaatccctgttttgagtttgagtgtcaattttttgagattatgattttttcccctaaaataatgtttttcaaccgcaaattctaactctatcattttagtagttttattttcccggtcaattttagagtaaattccctataatgcttttctaaagttgaaacagtcgaatctattgaactttgttaatttatatttttttcccatataattttagttaatctttcaattttagttaaatttttctcatacaaacgaaatgcctttggctgaagatttgttgtatcctgatccgcaaaaggaacgtcaaaagcacaagctcaaaagactcgtgcaacatccaaattctttcgtatgcattattataaataaattaaatactgtcatcccttttttaagtttatggacgtcaaatgccctggttgctataagattactacagtgttcagccatgctcaaactgttgtggtatcgatttattcttgccaaataatttagtgatttaatgagctaagcaaatgaatagtgcacactaagaccggtcataaatgagctgtgttttgtagaaatttgcatacatttctaatttaggtctgtgttggttgcagtacagttttgtgtcagccgaccggcgggaaggcgcgacttgtcgaagggtgttcgttccgaacggaagggcactaagacaatgagacaataataacgggaaggcgatgctatc

SEQ ID NO: 43737 - DNA, 975 bp, Heterodera glycines
atttttatatatttttaacaatgaataaatgaatcctttaaatagagtttttataaaataatggtttagccttgccaaatgaaaatattgttatcctcaaaatgctaggtttattcttcttttataaatttaaaatcgagctatattaattattttaatttgttttttatcaaagatgtttctagttaggcatcgtccattaatttatttttccagttgaaaattgtctttctttgaaaaatctttccttttaccaaagttccttaagaatggtttaccaccaattaatattcaataatttctttactaaatttttaattaatttttttctatttctaacttttttaaaaattttaatgctttcctttttactcattaaattatcattaacttgctagcaatcaattcattaaaatttgtggcaaagatgaggggaaagtttattaaattaaattttaaaaattattcagtggaaaaatatctatggccatatgcttttaacattaaaaaaataaataaaatttatattgaaataattttatataatctatttgagaaataaatagaaaaatggatttttgcgaatgcgaaaaatgcaaaagattgtgaaactggcataggaggataggacggaatgacctaattggttgaaggagtgctcaagtgaagcgatgtgaccgcgtcgtttcccattaattttcagagaaaagtgagaaagagagaaaaggggcaaagaaaaagagaaatttgaaaaaattaataaaaaacaaaaaacaaatgcgatatcctaaacttgtaagatttgtcctgttttcgagagttatcaatcgacccaaattgtatttatttattcacgagttttttaggtaactgatagaaattaccccaaaaaaaactcaccgaaattcgcgaaaaatatgaaaaaaaacatattaaaattatctcgaaaatgtgcgcaaatattttttatgaaaa

SEQ ID NO: 43738 - DNA, 585 bp, Heterodera glycines
cgtatatgctctaattatagcccatgggggattattcctttacctcctcagaaaaggggggataattagagactgggggattatgatagagggattatttttcaaaacacctcgtagactggggataattggagactgcgggattaatagagactgggctataattagagcatatacggtaattgacaatttttgtcaatggttaaattgttgaatgtgaatttttcatgctaatgaattgttttgttatttgacgtgttctataaaataaatcccccgtttccttcaaaagggcgctttagggctttatttggggggggtggctctattttagtaaataatatgagttttttcgtgttaattccgagtgatcaacaatttcaaattatgcatttgtgcttactttatcaaatacttttcacactttttttcgcttttattttgcttttttatcatttaatgagagtcggtcgctgttttgaatattttacctttttttggtcggcttttccctttttgcttttttgatgctttgtaatgcgatacccccctaagtatcttctctcctctgttggatcctatcga

SEQ ID NO: 43739 - DNA, 1448 bp, Heterodera glycines
tgtggagatgggcttagcccctaaagggggaaatgtccttctgagaagaattgggcctaccgaaaggatttccttgcaaacgtaagcgatccattcctccttcaaataaccgccttcgaacgatttgatcagatcggtcaccgatccgccgccgcaaaattccatcacttaacggaaagactcgaaatcgccggagggggcgagaaaaccgagccaaagttggtcatcgtttgccagttgaggagggcaacttcttgatgaaggcaccgtagtaagtggcgatgtttgggtgatgtgaatactaaaaagttgcacgttcatccgtcccattagcccacttaatgtgcgattattggcccccttttctctgccatttaatccccttttatttagccatttctttcccctttttggcaatttttcctcctttctgatcattcctcccttactttttgacaattttctcttttttggccattttcctcctttttagccatttcccctcttttttgggcccttctttttgactccctcccaacctttttgagcatgtttatttccgctttgatctcctcctcctcgtcttcgtttatgttcattatttttattgctgctaatgcctgcgttttcaaatgccgtcccttaattggtcaaaattagtgtcagattcattataagcgactccgaatttttaaagctttttaaatttgggtattaaaaaccttcaaacgagtatccatttcattgccaagacgtaacgattcgcgtaagtagtaatgattaaacactgcatctatccggatttttgtcatttttcctaaaacgaaagaattaaattcacgtttattgcccaaaatcacttttaggggttttcagggtttaaaaatccaattctgacacccattttaagcaattcgaattccgaacgaagattaagaacacaaaatagtttaacggtggtgattttgattttgcattatctgtttttggtttgttttttaaacatattgttttgtatttctcactttggcgtactcactatgggtacgtcccagtgttagacagggttgcgatctgtcctgatttatcagatttgtcctgatttggacgtggtgcgacattttgaggacttgacatttgaggacccgacatttgaggacccgacttttgaggacccgacatttgaggatttgacatttgaggacccgacatttgcggatattcccgacatttgaggacccgacttttgaggacccgacatttgaggatatacacaattactataaaaatgaaatgaaaattttatttatatcattataaaaaaagagaaaaacctatttccccgagggcccggggaaacaaaaaataaaattgtaccaaaatgcttggtaaaccccttatcaatcttttgatatttttggaaagtttcatatttaaaaaaaatttaa

SEQ ID NO: 43740 - DNA, 1008 bp, Heterodera glycines
  unsure (1)..(1008): unsure at all n locations
gtcgatttacccagtttaattaaatttggaatttccctagattacttttaaaacattatgttacttggtggtcttggaaaataccttttttggtgaccactttcagactcggcactccaataattccatgctgagacgttccttaaaactgccatcatgtgcaataattaaactacaaattaaaacaactatatagaaatacttgttgatataacaaacatttgtaaattaatatacattaatctccagtattctttttttttattattccttaaagtgttccccaaaaacacaagttactaaaaaaataaactatttaaaatactaattgtcatgtatcatgtatgaggacttatttgatgggactcaaatgaaatatttcaaatttgtctcttaatccccgactcgttgctgcctatttaaatgctgcctttccctcctttccccgcagtcttcattcattcatttattgttctcaatcatctccacttttgacccttctgtcgcgaaagcgacgagagtgcgatcggaagcccaatgttatttcccttttttatgtcctttcatcgatcctcattctttcaccaattttcactattctctcgtcctcccattttgcccctttttttcttcgtttttacaattggactttgagcccttctccccccgggttggccaacactttgtttttgtcacccgcctattaggtttttgaattgcgctctctcctcaatttttgatcatgaatttcccattcatttgcatttttcacacttttgctccttcccttcacccgcctttgttcgtgcctctcttttctcacttttctgctcagaattcccttttcccaatttgtgctccttttttcttttgtctcgtttggattttgtttctcctttcgctcgcatctcccgtcccttcctactataccccattactttaccctaccctctcccttatataattnccntttgcttctcttcttcaaacttcactcttcaccttttt

SEQ ID NO: 43741 - DNA, 945 bp, Heterodera glycines
ccgtgtcccggctgagcttgctctggctgatattctttctaagctcatccatcattcgggtctgcccgatacgctgggtcgggtcaatgtagttttccggataataaaccagccgcgacaccccaccccaggtgctgtaacggatattcatcgcccagtcggtaaagaactgacgggttgacacatcggcacgggcattcgattctatccggttcagcgcccggttgatgtagagctgaataccggcaatcgcttccgccagtcgggtagtttttatggcagaagagacctgattatcaatcaggaagtagctgtacaggtcatcccggctttgcaggaatatcccttcaggctggatattggccagaaaccaatggcacagcacactactcaggcgctctgcggtatgatctgccagtgcctgagcctgttgtgtactgagcccggcttccatattttctgccagggtctgccattcatcccaggaaggcagatccgactcggctttgttcggcacagtcacgtagcggatattgaccagcctacggataaccgatggcatggtgtgcaattctgaggccacatccatccattgcagcacggcgttgatattctgccagctttgaagactgctcacgtcagcacaggctatggcctgtgtcaccatactgatgtccagacccatcaccgaggccagtctgtctgccgtcagcgtttgctggcgcagcatatccagcgtgtcagagctgaggttacccagtgcgttaatccactggtggaatcggtagagtgagaacagggtatcgatattgtgctgtccggcgggttgacttctcacacccagtaccgtgaaaccggaaatgaccagtacggacagctcggcttcactgagacgcaacgtctgcacggaaagcgacaactgagccatcacatggcagaactgca

SEQ ID NO: 43742 - DNA, 1502 bp, Heterodera glycines
  unsure (1)..(1502): unsure at all n locations
ttttgaaactgaccgacgggtcgcataaaaaacgatcggtcgccgccacttttgcgttggtgatgaaagcgtcctccgcagtcatttcgatgcatttttccactaataaaaaagcaagagaaattacgaagacacaaaatcacaaataaaatatttcctttaaatcagtattttagacattttggtaagtattaaatttgatgtggacacttttaacattatacgtacaaactaatagaaagtactttataaattaaaatatatgtctttatctgagaacttaaggaaaataattgcaaatacaacacaaaaataaagtgaaaatgtgtgaaaaaaatgtcattctactcgcgacggaaaacagaaaacttcttgctcttcttagtctgcacaagaatctcgtccatttttttgcacacttcggcaaattggtgcttcatgtcggtaaactcgtgctcaaaccggcgattgacctgagcagaaaataatgcgaaatccgttttcgattcaccgagctaagcacgaacttggccaatttgggttgtcaaatccaactttgtatcggcaaactgcagagccaactccgactttgtttgcgaaaactccgtacgaagttgggcaatttgagttgtcaaaaaatggtaaatggtgagtagaatgataagtccactaagcaaggggacgatgaatggcagtagaatcgtcaaaaatgtccgcgcgttttgcagttcaattgccagtgctttggaattcaaacgttcatcagcatatttcgatgcatttcttaactgataaaaaagaaagaaaaaaagttctttgacgcgcgaaaactttttctggtccctccgaatcactgaatttagggaaaatgaaatggtcacagccaaagagataaagcaaatgcaatataaacagactaatttgacatgtacagcaacgaaaaacgaatccttcaaacatacggactattatttttcgatttttttgtaaatataatctctttgatatgctgggtaaaaatcagctattttatcatattccgtgacaccaccacccaccccctttttctttttaaggttagaacagtctttccgtttgccatgccaacaccgcccccgtctcacagtaatgaatgtcctccaagttcactcggttcggcttgccaacctccaacgctttgcggcacacctccttcacatattcgaccacaatttgctcaagtgcctccaaagtgtcgtcgtttgggttcttaataactaggggaataaaatgtgaaaaatccctaaatttttttcgcactctttcgtccccaaaaccgaatagcatcgaccgcagctcctttctgaacaaatatttgcgctcctccggcgtctttttcttcgcttcttcatcctcctcctcttccgagtcgaaaagacacgattcgtcgatcatttagaaaaaccaaaaaggaaaaacacggaaaaaacaaatgaaaataaaaataataaatgancaaggca

SEQ ID NO: 43743 - DNA, 1358 bp, Heterodera glycines
ccctttgtttttccattctttactgatcggtgatcgcagttcagtctttttcctcctctccttctgctcatttctcctaattcttctcaaacgtcaaaatgctttctgaaattgtatgtgtcaaataactattaaatttaaatttaatttaatatttggcattgcctcctaaccaatgcttttttttctttacgatggttttttttttcagccgcttccccaccaaaaaggcatcgtcgaccctcgtcttccctgcaaaattcaaattgtcggccgtgccaatgacgtcgcgaaacgtttcgaagtgaatcttttgtcacaaacaggcgaacaccttctccatttcaacccgcgcttcgatgttcgtaaaatccaaagatcgaccgaagaagtcccttcaggaacattgcgtggtgcgaagcagcacaaaagacggccaatggcaagcggaagaaaggggagggaccaatcccttcgtggccgggcgagcctttctcgctcgatctgctggttgagcaaggcctaattgaggtgggtgccggccgtttcggcccccaaattcgcccgtggcttcagtgttctgtgaatggcttccaattctgtgaatttgccgcgcgggatgacttctcccaattgggcgctgtttccgttggcggtgacattcagctgaactctttggaagtgtccaccgccgagggtcccgcgattgcccatgaaggcggcgataaggggccgcgcgaagctgacgaggaaaatgcgcaagaacagccgcccattgtgatgccggcccatcccgaaccgcaaccggtgccagccgaaccgactccccagcagccgcagcctccaccggcccaggggccgctggtcagtcacacaattaatccatttaggtatgctgtggacgagggtatattcgaatcattcgcagtcggtgccttaccaagctccgctccatgcgttgcttcagactaaccgaatgcgcgtcgtcggtgtcccccgcccgggggcacagcgcttcacagtgaatttcaaaacgcacgacggagagacacttttccatttcaatgctcgctttgatgttagagacaatactcttaagaaacggtatggtcaatttagcaaaactgtgtggtgcgcaacgccagcgtgaacagacaatacgcgccggagggggaggagcgcgaggggacgggctgcccattcaaagtgggcacacatcaaacgacgcccactcattcatccctttctttcaattagcctggggttacttttgcattggattttctcatccacggcaacgtcattcgagttaacgaaatgcataatgcatttgccttcgttttttgcttttcagacct

SEQ ID NO: 43744 - DNA, 901 bp, Heterodera glycines
tttggaaattggctatctctttttctgctcaacagtactatgaattccaaccgcattctcagaataattacgccgatactaattgttctggaatttgtttctcggcgcgtttgtttgggaaaaatttggaaaattggctatctctttttctgctcaacagtaataggaattccaaccgcattctcagaataattacgccgatactaattgttctggaatttgtttctcggcgcgtttgtttgggaaaaatttggaaaattggctatctctttttctgctcaacagtaataggaatcaaccgcattctatctcattttctgctcaacagcaataggaattccaaccgcattctcagaataattacgccgatactaattgttctggaatttgtttctcggcgcgtttgtttgggaaaaatttggaaaattggctatctctttttctgctcaacagtaataggaattccaaccgcattctcagaataattacgccgatactaattgttctggaatttgtttctcggcgcgtttgtttgggaaaaatttggaaaattggctatctctttttctgctcaacagtaataggaattccaaccgcattctcagaataattacgccgatactaattgttctggaatttgtttctcggcgcgtttgtttgggaaaaatttggaaaattggctatctctttttctgctcaacagtaataggaattccaaccgcattctcagaataattacgccgatactaattgttctggaatttgtttctcggcgcgtttgtttgggaaaaatttggaaaattggctatctctttttctgctcaacagtaatagaatccaaccgcattctcagaataattacgccgatactaattgttctgcgatttgattctctgcgcgt

SEQ ID NO: 43745 - DNA, 1018 bp, Heterodera glycines
tggttcaagaaaggggcattattcataagattttccaaaattgcgcgaaataaattttttagtcatgaacagaaaagtaccgaaataacttaaaaggagagataacccatctatttctataaaaaatgaacaaaaacccagccgaattaaaagtaataaatattgaaatatgatagactaacttgtaagagattgtgccgtgcagtcgtgtcttatggtggttttgtcaaatgatctatttttatgttctatagaagcctatgaaaaaataatttaaaaatatatcttggccattttgcactttttaccggatgtacgtgcagtacagtagcaattggtgggtcttcccgtgccgcagtctgtccggttctgttggatacgtgtgtggtgatctcgaatggatcgaaatggacaccatattcgtgatcatcgaaactcccaaaaacccaaaaaacttgtttctatagcaaaaaattttttgaaaatttttttttcaaaaaggggggtaccatcgacacagtattacccgagtgagaattgtaaggttaaaaatattaaatgttaattaggttatatatagtgattatcgaatgctgaggtgaaactttctatgcaaatgttaagctaagcctactttcgagttttataacctattttctaggctgaaaacaagtacccggagttttcgagatcgctgatcacgaatatgataattattttagcatattcagaaccatgaaccaaaattcgaacaaaaagtaataattttgtttttttgtttgaatctgaataaaataaatattttttgatgtttcaattagagcccggaaatttcaaatatgcggatcctgttgcaggattggaattcaaaattttttgcaggaccggatccggctggactaatcaagcaaggctggaaatccggcaaatccaacatttaaaatttttcggctcctctaaatttaaaaaatttccaaagtctataaataagtgtaaacagatatattattagtctaaa

SEQ ID NO: 43746 - DNA, 1047 bp, Heterodera glycines
  unsure (1)..(1047): unsure at all n locations
atcagatgacttttataatgcctaactttgcctattttgaagttttgtgcctaaggtgcctatcttaggatttttgaaaaaatccttnancnaaaatgcaataaaacgaaaacacacccctaaaganagaccaaaaaaaaatttcagaaaatacatgggactaacccaaaaatggtttttttggtaagaaataaaattttaatccaatattttttggaacttcagcgtttttagaaatatagtaagattaaatttttattcgttataattataatagcttcctcaatggcttatttcggggtgcgctacaaaacgtaagagaaaatccatgcccgatcgagacccgattttgtactcaaaattgatgagttgcttctgttgatttttaagaaatccttcatagcctaatcgcaaattcaacaaggcataagcaatgtaaaaaattcaatgtttttaaaaattgtctcaccacatactgtatatgattattataaagttttaatataattttttttattaaattgaaaaatgaaaatattatttttcgtaatcaaatgttcatttgccgttcactgtgccaaaatgaaaaaattgcaagaatatcttgacttatacgatgtttttttctcgtggaccaatctcgacgaatatggtaccaatcgatagctctcgatgagatagatcgatctagggatggtggaagttgatccgacaagtataaaccgggttttgaaccggttcaaaactcgaaaaattgagagattgggcactataactttttttaacgatcgaatcatgacaaatttggtatcattcgaaagctcttgacgggctaggtctaaaaatcagggaatgaagttgaacggatgccatctgacaatgatagatttttgaacaggttcaaaatcaatgaaatttggcgcaactacaaattaaaaaatttttttttgcttattgcgctaaaaaaccgccgcacactcgactacggtggccagtagttggggcgagactacgggcttcggaagaagtccgcgcgagatccgcagg

SEQ ID NO: 43747 - DNA, 1159 bp, Heterodera glycines
aaaaaaaaataaaagcattataatagaaaaaattgaacgttttttttccgtttcattgcttggctttttattggcttctttatttaatataatcgccagcttttatttccttatctttaaaatttatttttatttatcatggcttttcgtttcttagctttttcgattctttttcattttcgcctgctttttttttcttagctttaaaaatgtttttcatggttttttcattttcgtttgcttttccttttaatacgctcaagcttttctttacttagctataaaatttttttaaatttttcatggcttttcgttggcttttctttttcgcaggcttttattttcttagctattaaaatgtttttctttttcatgctttttgttggcttttctttttcgcaggcttttattttcttagctactaaaatgttttctttttcatgctttttgttggcttttctttttcgcaggcttttcttttcttagctattaaaattgtttttatttttcatggctttttgttggcttttacttttcgcaggattttcttttcttagctttaaaatttattttttttttcatgctttttgttggcttttctttttcgcaggcttttattttcttagctattaaaatgtttttctttttcatgctttttgttggcttttctttttcgcaggcttttcttttcttagctattaaaattgtttttatttttcatggctttttgttggcttttatttttcgcaggattttcttttcttagctttaaaatttattttttttttttcatggcttttcgttggcttttctttttgcaggcttttcttttcttagctattaaaatttactttttcatggctttttcgtttaagggcctggcttttggtttacttttctttcttttttttttttgcctgcttttcttttcttagcttaaagttttttcatggctttttcgtttcattaattgtctttacgattcgtttgcttttctttgcttttctttgttagattaattaattaattattaatttgttagttagtaagttaaaataagcataataaaagcacaaatataaaaatattgaacagaacaaataaataaaacggacaagaaatcaatataaaggggagaaatggaatgaaaatgatgggt

SEQ ID NO: 43748 - DNA, 1027 bp, Heterodera glycines
  unsure (1)..(1027): unsure at all n locations
aaaaatggtgtaagtaaaaatcgtaattacgctcaaaaagcttctcaaacaattttagcgcatccaattccttctacaatcgcctttatacatcccattatgaacgctaaaattatcagagtgccgaaaatcctgtaatctacgcctagaaaaaaatggtgtaagtaaaaattgtaattacgctcaaaaagctcctcaaacaattttagcgcttccaattccttctacaatcgcctttatacatcccattatgaacgctaaaattatcagagtgccgaaaatcgcatgtgatctaagcctagaaaaaaatggtgtaagtaaaaatcgtaattacgctcaaaaagcttctcaaacaattttagcgcatccaattccttctacaatcgcctttatacatcccattatgagcgctaaaattatcagagtgccgaaaatcgcatgtgatctacgcctagaaaaaaatggtgtaagtaaaaatcgtaactacgctcaaaaagcttctcaaccaattttagcgcatccaattccttctacaatcgcctttatacatcccattatgaacgctaaaattatcagagtgccgaaaatcgcatgtaatctaagcctagaaaaaaatggtgtaagtaaaaatcgtaattacgctcaaaaagcttctcaaacaattttagcgcatccaattcctttctacaatcgcctttatacatcccattatgagcgctaaaattatcagagtgccgaaaatcgcatgtgatctaagcctagcaaaaaatggtgtaagtaaaaatcgtaattacgctcaaaaagctcctcaaacaattttagcgcttccaattccttctacaatcgcctttatacatcccattatgaacgctaaaattatcagagtgccgaaaatcgcatgtgatctacgcctagaaaaaaatggtgtaagtaaaaatcgtaactacgctcaaaaagcttctcaaccaattttagcgcatccaattccttctacatcgcncttatacatcccattatgagcgctaaa

SEQ ID NO: 43749 - DNA, 1048 bp, Heterodera glycines
cgtagaaaacgtgttctagtttctgtttggacttaggcctgaataccggcttagttggcccgaaataacaagagacccgtctaattcaatttaaactcataaaattaagtcttgaacagaccgaaccttgtaatcttataaattgtaaataatacatcgtgtatggcattgatataaaattaatggtaatgagtttagcaaacaagcacgcttaatcgagtgaatattcgttaagaaaactttctattcctaactttattaaatttactattgttttaaattagatagttgcaatttatagacaattaaaataatttttattttttaaatccttaatttggtgcccaaacttcccggtgcccaaatttatggtgcccaagcttccgcccccccccccttctttctaaatcttttaaaagaatttttggtgaacatttttaaatttttcgaaaatgtaccacaaaaaaatcggtaaagaagagatattaaaattaatttttgaatattaaaataggattttaagcctatttagatcattttattgatttcaacctttacgaagaagtatttcaaaaaaaaactattttaaaaattttattttcacagtttgctacatattttgagttttatttatacatttgttttttttacatattttatgtaaatattttgctagagggtcgagtaaaattttctgaaaaaattattaggttcacggaaagaacaccaattccaaatactaaaagtatggaatcaaatcatatgttcaatcagggaaggatgttacaatgtgtaagttttttgtaatttttaaagtcataaaaatttttaggtggttttctgggtcgctgatttcaaatatggtaccatttcggtcaatttctaactctgaacccgaattcgaacaaaaagtcgaaatttaattccgcattttcgtctaaaaacggtataagaactattactcaacattttttaaatgcctctatattgatttggcataatatatttaatttgaccttaacattaattctccggaaaactaaaaaag

SEQ ID NO: 43750 - DNA, 1544 bp, Heterodera glycines
  unsure (1)..(1544): unsure at all n locations
aaactataaaaataaattagtttttcaatcaatggttggttattccctttttaatgaatttcgttatatcgttctgcaaggatacctaaaagatatggcaaaataatgttaagaaaatttattttgatgttttaggtgatatatatttttaaataaacccttttttaaacaagctcgcgggcttaaaccgtgcctacccctaccgaaaattaaaattaaccaactgaacaatcaggcccaaagaaattctttttattgacccataattgcgagactgttcccatccaataaaagaaaaaattatcgtaaataatttataaaaataataatcattcttaaatataatatttataggtttgaaactaaattctaatttttttaaacaaaaattttataaacagaagtaaaaaaattttcaattctaattctgaaattttttcggtcatttttaggggtaaaacaacgattcatcaataaatctccaaaatctattttcatcgatacgcaaaatacaaaaaatttgcagttataaaggaaatagtgatattcaaaaataatttaaaatatatgttaaaaattattataaataaaaggattacaaaacggccattaaaaaataaaaataaatgatttgctaattaatttggtttcaattaaaatataaaattgttcactccatcggcatttcagtgacaatggagcatgagattgaaattaatattaattactttaatttaaaaaataattggaaaacacttaacttactacaaatctccaaattaagaattatttttagtccaaaatcaaaattaagcaaaaattagatgtgtcaaaatatggattggtgcgaaaaaataatttaattagaatattaaaaaatgcaaatataattaaaagccaaaatgaataaatgcattatttttaatgataaagaatttattatataataattatatcaaaataaaacaatttttttcaagtaaacgatttaaaaaattatgatcttaattaaacaatactaattttttaaatgtaatttgcaagaaatatagttttataatttaatacacaatttgtaaataaattaaatgtgcagccacattaaataataaagaataaataaaattaccaaattattgttattttaattaaattaaattttataagaaatgaatgtacagttaatcaatttgaatttccaacaattttaacaataataatgtaattatgtgtgcaaattaagtttagaaggggatacttgataaataaaattgaatataattataatcataacaagcattgatttaacaaaaatataacttaatttttttttaaagattgaataagcaaccattcattatctcaacaaattattaatggaaaaaataaaacttctctacaatttatagatataaaatttaatatttaataaatcaaattcttaaggccattaaatcaaaatataaaaatttttaatcttcattanacttaatttanaaatttaaatgattgactntgtacataatgaaatgataagacacgtc

SEQ ID NO: 43751 - DNA, 1052 bp, Heterodera glycines
gtgaatgtgttaaataaaaatattttggtataattaatttgaaaaaggaatgacaatttggcgtttcgttggccgcaaatgtccgaccgcatttgtcgggccgctatcggtttttctgtgtttttcttttctcttgagatttggactttttatttccttttcgggaaatagagggaagggggggggagtaaagaatttccccgaaaattttttattgccggaatttgaatttcgactctcctggttcgagttcgaagtcctgttttttaaccaagagccgacttgtttgattcggatacaaatttaaaaactcaccatttggccaaatgtttcctggttcgtaattcgctaaaaagcaattttgtttttttttatttgaaccattcagcttcgtctcacctcttttttccagtcgactcgattattcttcctggaagcgaaaaaaattaattaaaatttttttttgtttcagaaaaaataagatcattctactgattgtgaaccaggagaggggacacgcgagggaacccgaacacatttttggggagaaatattggtactaaatactgtgctttgtccaccccccttttttcgaaatttttttttttgtttcatagtcatgaaaacatgtttccaagggtttgcggggatgcctgatcagtgctccgaatgtcatgtcacggaaacttgaggaagcgcgggtaatcggcgggagaaactatgactctcttaaggtagccaaatgcctcggcggctaactaccgacgcgcacgagtgaggcgatactcggaacctccggggagcctgttaggagttggcctacaggtcgcgaaagacgctaggtgctgcacgggttgcgctaatccgagggcgctgggataccttcccatcggccacaaacgtctgggtcttcgtaggcgcgggtgcagatatttctgttgagcctgacagttcttcccggatatggcgaaagattacagggcggtatttcgtgaaacctaaaaaaggtcgggccgaatggcacggacagactccgcttcgagagtgagctc

SEQ ID NO: 43752 - DNA, 1113 bp, Heterodera glycines
  unsure (1)..(1113): unsure at all n locations
cagaatgtggtcatagaatagtgggtttgaattatttgtatttttatgagtattatgtaaggatattttcgactaaacataaccaattccgagtttcatgaggcatcacttcattcttttcttgtcctgcncaattgtctcaaatgtatacctaaaaatgcgctaaaaatgatcaaacccgtttttagccgaatatcctgtcaatatttccctattagaaacgatactgtgaattctttcgcctctttaattcattcgtgctttgcttcggattagtctaaaaatttctggacgccaattttacatattagccattttttattttattagtgaccgcaaatttttacatactagccattttttattttattgtgaccaagcatatctttcctcgtatttctgggatttttttcagaatgtggtcatagaataggtgggttgaattatttgtattttttatgagtattatgtacggatattttcgacaaaacataaccaattccgagtttcatgaggcatcaacttcattcttttcttgtcctgcccaattgtctcaaatgtatacataaaaatgcgctaaaaatgatcaaacccgtttttagccgaatatcctgtcaatatttccctattagaaacgatactgtgaattcttgcgcctctttaattcattcgtgctttgcttcggattagtctaaaaatttctggacgccaattttacatattagccaatttttattttatttgtgaccgcaaatttttacatactagccattttttattttattgtgaccaagcatatctttcctcgtatttctgggatttttttcagaatgtggtcatagaataggtgggttgaattatttgtattttttatgagtattatgtaaggatattttcgactaaacataaccaattccgagtttcatgaggcatcaacttcattcttttcttgtcctgcccaattgtctcaaatgtatacctaaaaatgcgctaaaaatgatcaaacccgtttttagccgaatatcctgtcaatatttccctattagaaacgatactgtgaattctttcgcctctttaattcattcgtgctttgcttcggattagtctaaaaat

SEQ ID NO: 43753 - DNA, 723 bp, Heterodera glycines
ttccgttccgctaattcctaaattggctcttgaatcttactttttattattttttgtgtattaaatgtattcctaaaaaaacaaaacaaaaaagtttcttctgcccttctatatagacttcaaaattacatatcaaagagcagaattttctaattagattagactcaaaagttacaaacatcggcaccgacaaagtgccgaaaaccgaaaatggaacggacactcttcggtgggggggggggcgttgggcgaagtgatggcacagccaatgaatgaatgatgccattttgggggatctctggtaaaataagccaacggcacaaatgccacgagataattgtgcatgcttttattgttgtaaaaaacccggataaagtttcgatgaaatgagattttgcaaaaataaaatttatcttttacccggggggaagaaaaattgaataaaatccttcgccggaaagcattatgccattccaacacatcgcctgaggggaaagaaacattttgccgggggggggggggggcaaaatggcgaaaaaagggacaaagtgccaacaaacgaaacgcacaaaacaaacggaccatcgaagaagcgattaagcggaaatttgagggaaaagtgggaaaatgtgaaaagggaggcgaaagggaacagacaaataaatgaaataaaacacattttgacgattttcgagtaaaaaaaacgggggcaagggcaaaggg

SEQ ID NO: 43754 - DNA, 865 bp, Heterodera glycines
atttgaatccaatgaccttgcgaggcaattgcattttcggaattggcaatgattttctattgtcatttgtaatttccatttgctttgtgccattctctccaatttttctctcaatacgaataattttcagcgcccatttgcgagttttgaagtgttcgtctacgtagaagtcaaaacggtggctgatcagcgcaattccgaggccaagttgagaaggagtaagcaaatcgaacaccgaaagccaacaatcggcggagatgaaactgaaaaagggggaaaacaaaattcaaattgaaaattggcattttaaatttaattttacattgcttttgccatcttttcctctccttcttttcggcggtctgacattttgttgagcaaattattaatgacagttttcgacgggtttatattattagcttaaaacattatttttaaaacaatttaaaatttcaaatcaaaagccccccccgctgtggtttttcgtcgggcccactaaagcactaaactgcaaaattaccgaaaagtttttgatcaaaaaatacttttacattttccttaaacgttggttcatatttctgaagaaatttgcagcaacaaaataaccgcaaaaatcaggcgaatgatgaatgaatggaatgaggaggaggaaaaggagaaacgggcattcttatactaaaatttaagcgtagcgcaccaaatcgaaaaacttaaagaagagtgccaattttgagaaaaagccatatatgtaggcaaaaggcatagaaaagtaacatttaatgtcataattttttgtaatcacaatttacgactacctaattaattataagtgtgtttggcctaattgctgcaaaaattttttttt

SEQ ID NO: 43755 - DNA, 952 bp, Heterodera glycines
ccaggtgttcatacgaggaatgttataattagagacgcatacaagccgtatagaacaacccacggtggattcctcggtattaatagtggtaaatttggataagataattcgctaatttttaatattaaaagcaactgacaaagtttgacgaaagaatgtcaaagcagagttcacaggtgttcatacgaggaatgttataattagagacgcatacaagccgtatagaacaacccacggtggattcctcggtattaatagtggtaaatttggataagataattcgctaatttttaatattaaaagcaactgacaaagtttgacgaaagaatgtcaaagcagagttcacaggtgttcatacgaggaatgttataattagagacgcatacaagccgtatagaacaacccacggtggatgcctcagtattaatagtggtaaatttggataagataattcgctaatttttaatattaaaagcaactgacaaagtttgacgaaagaatgtcaaagcagagttcacaggtgttcatacgaggaatgttataattagagacgcatacaagccgtatagaacagacccacggtggatgcctcggtattaatagtggtaaatttgaataagataattcgctaatttttaatattaaaagcaactgacaaagtttgacgaaggaatgtcaaagcagagttcacaggtgttcatacgaggaatgttataattaaagacgcatacaagccgtatagaccaacccacggtggatgcatcaatattaatagtggtaaatttggataagataattcgctaatttttaatattaaaagcaactgacaaagtttgacgaaggaatgtcaaagcagagttcacaggggtccatacaaggaatgttataattacaaacccatacaagccgtatagaacagacccacggcggatgcctcggtattaatagtggt

SEQ ID NO: 43756 - DNA, 738 bp, Heterodera glycines
  unsure (1)..(738): unsure at all n locations
cactatcggtcactagaaatcactattttggcgcttcgtcactaaaatagtgaaaaatcgctattttggagttttgtcactattttttcactatttcgacattttttgggaaattccttaacaaaaatgcaataaaaccaaaaaatacacccctaagaatcgacaaaaaaaatttcaaaaagcactcctaagaaatgaaaaaaattttctcaaaaaggtattttcgtggcaagaattttaattttaaaaattatttttttatgtacctattttgtttttttgcccttaaaaatcccagccctactcatttgcaatgcaatcagtgaataaaaattatttttgcttaatttttggctgaaaattatgtcactatttcggactttttgacactattttggcatttttactcactattttagttaactatttcgggatttttcgtcactaaaagttgcgaccctacttataatcaaacgaagaaaattcataattacaatttcacaagacaagacagaccaataaatgctaaacatcctaaaataacccactcactccggtaaatactccgatgcgaaggacgagtgactaaatcacaaaactataattaatataaattatttaaaacaaaccataataaaaaaaatatataaaaaaacacaatttaaaatttaattatttaatnccaancataattaaaaagttgaatttatacaacaaataaaaattaaagatggacaa

SEQ ID NO: 43757 - DNA, 686 bp, Heterodera glycines
aatctgcaagaaattagattggcaataagtggttgttcttacttttgggtaatgaattattttttgaagtgagtcaaacaccctattagtgctttgctgtgccgagaaccgcaggcaatggatagctttaaatctgcaagaaattaaattggcaataagtggttgtaaaaaacttgtgggtaaggaattattttttgaagtgaatcaaacaccctattagtgctttgctgtgccgagaaccggcaggcaatggatggctttcaatctgcaagaaattagattggcaatatgtggttgtaaaaaacttttgggtaatgaattattttttgaagtgagtcaaacaccctattagtgctttgctgtgccgagaaccggcaggcaatggatagctttaaatctgcaagaaattagattggcaataagtggttgtaaaaaaacttttgggtaatgaattattttttgaagtgagtcaaacaccctattagtgctttgctgtgccgagaaccggcaggcaatggatggctttaaatctgcaagaaattaaattggcaataagtggttgtaaacaacttttgggtaatgattattttttgaagtgtgtcaaacaccctattagtgctttgctgtgccgagaaccggcaggcaatggatggctttaaatctgcaagaaattaaattggcaataa

SEQ ID NO: 43758 - DNA, 835 bp, Heterodera glycines
tctctctctctctctgtctctctctctctctctgtctctctctctctctctgtctctctctctctctctgtctctctctctctctctgtctctctctctctctctgcctcccctctttctctccctctctatcaattcattctctccgtccctctctttctcttacccacccaataaatcgcttccatcagcgaatgcgctcctttgaaagtgaatgtgtttgccaatttcttttttaaatatatgtctcattcggtttacctcacaaatcagttcggccgtcacggttcggcccaagcgtgtttttccactataactttctataacttttttctttggcaaccaaatccaacatttttggtatcattcgaaagcttaacatgtttagaagctttttctaagctattgcttcgcgattagacaattaccaaaaaagttagttatacaagaaaattgcgaaaagccgaaattttttaagttttttcttaataaaattttttccaggcttgaaaaaattttcgctttttgtaaggctaatagagcatgttaagagctttcgaatgataccaagattattggatttggattacaaataaaaaagctatagtggaaaaacacgttggggccgaacagtgagggccgaactgagcgagtccggtctcattacctccatttgtgatcaacaaacgcgtccgatgatgcgcttaattatagggaaatggtgacggggtgtactgtatgaacgcaccaagcatttcgttttgtgggaaaaagctggtgatgttcaggtgaggcatgcgttcagaaagtccatcaatttgagaaggggaaaggc

SEQ ID NO: 43759 - DNA, 1014 bp, Heterodera glycines
  unsure (1)..(1014): unsure at all n locations
aagaaattgttttttattccctcttttcagctacagtatgactttttgttggctgctcctcccattttacggttggtttagctgggaattgtgcgattttttctccccctgctgggggaggtgcaccgttcctgactgtaagtgcagtgtcaggccgatgccggtgcctttggcagataaatccaccgcaagcaccccattttccaaaaatttccgaggccagcgtcgctggtacagctccacggccaggcctcagagacagcgacgccctctaaggcgcacctttcgttcggcgtgtcggcgccgaagagaggggccgtcgatggcatcccgttttataccccgtagacactcatttgtcagtgagcatctgtgcaatggggaaaaaacagccgacataacgtcgtgctttcctcttcactggctcgaccatatgtgtgagctgaatcagtgaacgctttgacccaaattgagcaaaaattgtgcaaattttgcacgtacaaaaaattacagtcccttaaagttggatgggttggaagaaagggaatagaaaaagagtagagcattcgctatttcttaatccttctatctatgatcatctgctattattctttctgaccattggtcatacctttctccctcatctctcttcgtctctcttttccatttgatctatcttcacatcattttttgtattttttttaattggcaaagcaaacgtttctcagagagaatggaggaagagaaacgagggaagcaacgagagaaggtgcagttttgcttcccatcctcgcctaatcagtaactcataactaatctcctttttcagtttaatgccactccaatgcaggacaattcgtgtttactttcttaatggaaatcacgtaaggttagaaaagcctgaagaagctatttgtttaaattacatatgtaattaacctttaaatctcatttttgacattntatcggcatcaaaaagtagaattatagcaaatttgtgacataaatttaaaa

SEQ ID NO: 43760 - DNA, 1045 bp, Heterodera glycines
gttgattggaatgttggtggattgagtcccagtgattgaaatgctgttgggttgagtcccagcaggagaattgagtcccagcaggagaattgagtcccagtgattggaatgctggtgggttgagtgccagtgattgaaatactggtgggttgagtgccagtgattggaatgcaggagaattgagtcccagtgattataatgctgttgggttgagtcccagtgattagaatgctgttgggttgagtcccagtgattagaatgctgttgggttgagtcccagtgattgaaatgctgttgggttgagtgccagtgattgaaatgctggtgggttgagtgccagtgattgaaatgttggtgggttgagtcccagtgattgaaatgctggcgggttgagtcccagtgattgaaatgctggcgggttgagtcccagtgattgaaatgctggtgggttgagtcccagtgattgaaatgctggtgggttgtcccagtgattgaaatgctggtgagttgagtcccagtgattgaaatgctggtgagttgagtcccagtgattgaaatgcaggagatttgagtcccagtgattgaaatgctggtggttcagtcccagtgattgaagggatgcgccgaaggcgctgaccccgctagtaaccaaaatgacctatttgcaccagtttcgctgcgccgccaattaaaataattataaattacgtttggtactgaattggcactataagatttgaatcggttcaaaaaccggtttatacttgtcggtttttatatggcgcggttcgacttcatacatttatttttagacttagctcgtcaagagctttcgaatggtaccaaatttgtggggattcgatcgtttaaaaaaaggtatagtgcgaaatctctcaatttttcgagtttgaactggttcaaaaaccgattttttggcatttccgcaactcgagacatatttttccattcttagctcctcgagacgaatcgattggtatatcatttgacccattttttcacggagcgttcactatagtttatccac

SEQ ID NO: 43761 - DNA, 886 bp, Heterodera glycines
  unsure (1)..(886): unsure at all n locations
gaaattcggaagtggcccgaagcagcggcaatttcgagcagttcggtctcccgccagccgganacaaccgaaaaggaccggcgtgaattccggtcgtcgtcaagtccaagcagtgcagcgaaggaaggaagagccgagcggtgccaaatcgtccgacgaaggacaggaccgttcgtcagcgcaactcccaccagccggagaaacgcgcatcgatcaaagcggactcccaccagtcggagtgtccgccgcagtaagcgggagttgaaacccgtgttcgtcaagtcaaaggggtccgacaagcccttctccaaccttgtcggtggtgccgttaagcaagcagaaaatcgctgcacaattccctcaagcaccagtccaactttgtcacctctcccccctcccattctcgtccccctttggcgctgatcggatcggtcagcagcatcagacccatcagaacgaacggcaaaaagggcgcaattccctttacggcacagcgagcggagtgagcagagataaaagggacgagagcggtgaagaggagcgggaaccaatcccgcctcagcttggcccaccccaaccccaagcgcgcggcgtgaaataatagattggcgacatctctaattgccaaatttgaacaattaattttttttttgccttttttgcacaaattttctgtaatgttactgttgtgtccgtacacaaactaattcgacccggtcaattcttaggcaaatactggtttttgggaaatttattaaaagtcaaaaaggtttaaaaagaaatgtttacgctcaaaattaagataagcaaagtaaagttaaaaaggttttagtgagtttgatcgcttcaggcagggcacctgagattggaaaattgtgggtagaat

SEQ ID NO: 43762 - DNA, 1414 bp, Heterodera glycines
tccgtttctccccccccccccccattttccattctttcgtttgtttgtccgtcttttctctctctctctctccttttctctctctttttctttttctctttgtcaaagttcaaacaccgcacaaattcttccgtcttctcacattattcttcatttttctgcaggaaacggtgcggtgtcaacacattttagtgctgttgtgctgcttattgttattcacaggcggaaggcaaataaaaaagggaaagaaaggcaaagaaaagcgtaaaattcaaaggaaatgggcaaagtttggacataagcattaagcagctaattaggtaattagtcgcattaattaatcaattgtttggctgtttagaattaatctcaatttcctttgcttattttcgctttttgtttcccttttgtccgactttcattccgatcattcaatccattttctcctgtcataattccataataataaataatattaattttgcgccggcggatgatgccatcgtcgggcggtggcaccccgcaggggcggcaaatgcaaaagggagggggggggggatattgcacaaagagaccaaatggtatttgggacgggagggatcagccagtaagtaagaagacggaagatatatttcctatacttttgttttggcaaaatgccaaaaagcccgccgattttaaaatattgatgcttttcgattggcattttcccacgccatttgctccattcctccgatgaatgggctttattctccgggaaggttcctctcatttgattgcctcgtcttgggaaggatcttatctgttccctgatgagcggacggaaacagcgaacaatggacaaaaagtcgcgcgtcattagacacggaaatggcggggaaaaggggtataatagagggtaggagaaggaggaagagatggggtcggatgattaggagcaatttttttaaattattgaattgcaaaataatgaattaaaaagtatatatataattattttgtaaataataaaaagtgttccaccaaattttttggcaaaaatgattcgagttgttcttcggcagtgtgccatggaaatcatcagtgttgacgtttacagtgtgcgccattgttgcggtgcttcagcggcttgggcaacggcggaatgtccacgtcatcgcacacaccgaacggcctcggcaaaatttgagaaatttcctgaaaattaaaaaataaaggttttaaaaaagaatttttttttatgatgtttttgatttaaaaatatgtaatttaattaaataagcattaaattttgttgaacaaattaaagtatttgggtttcccttgctgtatttaaaattatgtggttacgaccaaatgaaagctttttgatcagtaaacattgatcatactatgctaaggaatgagtcgatcg

SEQ ID NO: 43763 - DNA, 1447 bp, Heterodera glycines
  unsure (1)..(1447): unsure at all n locations
agtcagaagtcagagggcacaaaatattataaaaaacaatgaatttaatcttagtatttcgccgccgacgaacaattttcgcccgaagtatttaaaatcgactcatagagatacaaatcgaattcattaaatatacaaataaaaaagaatagttgataaaattcgcaatttaattatttaaaatattttaaaataaaataattaattataaatcgtgaattatttcgagaaacgctaaatcgatcgaagaaaaactcgaagcaaattataacggaaaatccccaacgttcgccatccgtttcctataattcttcgtctcgttcttcctcggcacacatcgccgccttaaatcggtgataaaattgctttagggccttttcattaaaatattttttaattttattttgcgtttttttaattgacctccaaaaaaccctgtttcatccacgtgatcaccgcttgcatcagcttcatccaaaccacttcgatgcattctcttcggtcataacggtcaaatgtttcgttatgaaacgaatgctttttcaaacgcggcgtcatcagtgacagatcgccagcacttcgagcttaaaacatttattttgtttattttagataaattcaaaatgcttacgcccacggcgtttcaaattcgaattggccatcagaattgtgtcgaccaccgaatgtttgacacaaagccaattctccgcttggaaccacactttcattcggtaatgcatttggccattggcttggcacatttcgaacagtgtctgttcgagttcggcataatttgtgcactgcccaaaggcaattgaaacctaaagaaaaagcgcaaatcaaaattaattttatttagcaaattattgcttcataataaaatcaattttcaagaggacataatttgcttttgcttttaattctgccgctttaccctctcaaaaaagcgcgtcactccatcgcccacttggacggccctggggcagaattgagccaaactttgtacgtcaaaaacctcaatttcgtgcgcttgtgcagcacatctggccaacagacttttgaatagggacctcaaataaaactcattagatgttttcattatttctactttgctaattaggactaattaggaaaataattatttttttcactacattaatttgtttgtaccttttgtcattcagcaaacgaatgacaatttcgttgccaaagtccacttctctaagggccctaaaaccaaaaccaatttaaagtaattacaatatttaattcaactgctgatgttctgatgacctgttcagcgtgcatctgacaagttcaatttcgtattggttcagcagttcgctttggctttggcgctctctgtccgttttcgtccccccatttccatttccattttctcttttntgtcgtgtttggcgcgngctgcacctgaaaactgtgtaat

SEQ ID NO: 43764 - DNA, 1006 bp, Heterodera glycines
ttgtctgccgttttgaaatttttcaacttttcgcgaaaagatttcccagaaaatgcatgggacaaataaaaattaaacttctattatgatcaatttaaatttcctatcagtttcgggtttgctttaaacacgctggcctatgaaaaaatggagttttatggatgtcaaattttgggacttttcttcgacgtggccatcagcgggttgtttcgtgacaaaaacaaaccagtttgatgttattcgaatgagctagacgcgctctacattttcaaatgtatcaacaaagggtctaccgccactccctggcgagatatggcctgtcaaagcagaacggggccaataaatttgaatttttgttaatcttcggcagttgcctttatttcgagcctactctacttgtgcatcttttcccaatatggcactgcttccgaattattgaactgtttcacgactgattgttgagataatttttttttccgattcctttatctccaagcatgagccttataagtgattgttcctatccttctcttgaaaaaaattgtcactaaaaaaaacacgttttctgaatattaaaaacaaaaatttttagacactttctgtcgcgacaacgcgaaatcctaagataaaacccaaaataaaaaagaggaaaaataaaaaacaatagaaaataaaatggggaaaaataaaacataaataataaaaaatatttttacatttattttggaaaaataatattataaaaaactatcgaaaatataattacataaaaatgaaaaaaccttttgaaatgaataacggaaaattgtttgaaaaggaaaagtgcatttcctcaggaatgaaaggaacgaaaattaattaatattaaattgcgaattctgttaaggattgttcgtaaacaaattattaataattaatatattaaagaaattggaattgtaaagggaaaacggaaaagcaaacaattaatggaaaaatggcaaatccaaacggatacacacaaaaa

SEQ ID NO: 43765 - DNA, 610 bp, Heterodera glycines
tgcacctcttctaatcacttttgtacctcaaaatttataaaacgggcgcaaagcgcccgttctaggccgcgaagcggcctaaaagtcccagataattttttaaaaattccaaatctccacaaccagagctaatctaggtagcgaagctcccaaagcgcgaagcgctttcccaagcgccaccctcgcatgcacacacccgctagtttatattaccatagagaaaagttgcatttcgtttcaaaaaacaaaatctcccggccgaaggccgggagcgccctgaatgtagtggaagggtcttacaactttttgaggcgcatctgggaaaaataagggttttccggtccggtggccaactgagtcccggcggctaatttctcacttttgcttgcgtttgaaggcccataactttttttctaaaactctgatcaaaaaatgcccgctgcgagggcaccccgccaaagggtcctctacatgctggtattttttatttttttaatagagccaccccctggcctgcagaaaatggcaactgaagcgtgctcaaaaagtacacttcagtaccaggctaataccgcgtcagcgtttgatctgagagaaaagtgcccagcag

SEQ ID NO: 43766 - DNA, 1503 bp, Heterodera glycines
gctgccattttgagtacaggtgaacagaatgccaatgccaaaatgccaatccgtctaattgcccttccctttgagtgcgtatccttttgatgagcagcagtgcgccgcccgtctgtacgtggccaacgtaatgactgaggttgagctgtccgtctactacaacttggagccctccgtcatgttgggttagcagagggaatggccaaacttttaccattttgtattagcaactatggtgaattgatcattaggaaaatgccaatctctctccccctctttctctatcttttcccctttctatcgctctcaccctctctatccctccctctctctctccctctctctctctctccctctctctttttccttttccctgtaattcaattcgatttgtcgtcccatttgtccaggctggggcaaccaatcggccaaacggcacgtctccgactgggagctgttggcggtgaatgccaacctgtccttctaccgcaaccgccggtacagctcggcccggcccaccaccgcgttcgaagcccagtccagctggtctctgcttctgctcggcgtccgtctccgtcgcaatgcgccgctcttttggctgtctttggcattgccttcgctgtgcttttccctcgtcaacattctctcctttctgctgccccggcctgaacattctgttgtgcttctgctcatcaactttttcctacacggaatgttcattcgcgacgcaattcgcgcattaccaccggcggttggggacccgccacggattggtactgatcgggcacggcttttaactgcggttggggaccctccacggattggtactgatcggacacggcttttaactgcggttggggacccgccacggattggtactgatcggacacggcttttaactgcggttggggacccgccacggattggtactgatcgaacacggcttttaactgcggttggggacccgccacggattggtactgatcgggcacggcttttaactgcggttggggacccgccacggattggtactgatcgggcacggcttttaactgcggttggggacccgccacggattggtactgatcgggcacggcttttaactgcggttggggacccgccacggattggtactgatcgggcacggcttttaactgcggttggggacccgccacggattggtactgatcgggcacggcttttaactgcggttggggaccctccacggattggtactgatcggacacggcttttaactgcggttggggacccgccacggattggtactgatcgggcacggcttttaactgcggttggggaccctccacggattggtactgatcggacacggcttttaactgcggttggggacccgccacggattggtactgatcggacacggcttttaactgcggttggggacccgccacggattggtactgatcggacacggcttttaactgcggttggggacccgccacggattggtactgatcgggcacg

SEQ ID NO: 43767 - DNA, 1033 bp, Heterodera glycines
  unsure (1)..(1033): unsure at all n locations
taaatataaactgtttaagtggtgcagacggatcaggttgatnagcgccaataccctcagattttactattttcgcgccnccacttttttgaattctgacattntcagctcattacgctctaaatataaacagcatcagtgttccggaaggatcgatttgaaatcgccaataacccccaaattacaatttcctactgtaaacttatacagattacatttggatataagaaattgaaatattgagaatatcacaaaagtgatcatgaaaattgtaaattggagattattgggacttatcagctcggtcctccgcaaacactgattcagtttatatttagaggataaggagttgaaatggtggaattccaaaaaggtgaccaagaaaattgtaatcgaagattattggcgattatcagctcggtcattccgcaaacactgattcagtttatatttcgcgaagaatgagctgtaattttgcgaattagacaaaaatgatcataaagtaacaaatgagagaatttcacattctgctaattaggctttaaatataagctgtttaagtgttgcagacggatcaggttgataagcgccaataacctcagatttactattttcgcgaccccactttttgaattctgacattttcagctcattacgctctaaatataaacagcatcagtgttccggaaggatcgatttgaaatcgccaataacccccaaattacaatttcctactgtaaacttatacagattacatttggatataagaaattgaaatattgagaatatcacaaaagtgatcatgaaaattgtaaattggagattattgggacttatcagctcggtcctccgcaaacactgattcagtttatatttagaggataaggagttgaaatggtggaattccaaaaaggtgaccaagaaaattgtaatcgaagattattggcgattatcagctcggtcattccgcaaacactgattcagtttatatttcgcgaagaatgagctgtaattttgcgaattagacaaaaat

SEQ ID NO: 43768 - DNA, 1375 bp, Heterodera glycines
  unsure (1)..(1375): unsure at all n locations
attgagctaccgaggcaaatacgaccattctttggcgccttcaatgtttttgatatgaatatttttgaaaattcttaaactttattaaaagaacacagtcaaaattagaaaatgcaaaggcaaataaataaatatatatatatcatttttattgtccaaaaattctccctataaaaaatatgtttttaacccccccccccccataaattcttaagaaatttaaaaaaattctcttaaaaattgttcttgttcaaaaactctcccctaaatttataattgaatttattttaaaaataccccccacataaatttagataaaattgaaaaaaaaattcgctaaaattttattgttcaaaaatcctcaccataaataatgtttttttaatccccccctccaataaatcccgacgaaattaaaaaaatattctctccaaaattgtttagtcaatcaacaaattcatatcaaaattgagggccatggaatatcatcgaggtgtaatcataatttcaatggattcattttaaattctttcgtcagaatttcaacagtcaatttttgtcgttctgcttcatacaaattgtttggctcaagtgtcaacagttttccaaaatattcaatcgctttttctttttcattaagatgctgataacattttgccaaaaagaaattgttttcaattgaagttccgcgaagcgcttcatcggccttaataattagagaacagattttgtggcatatgcctttttatgcgtactaatcaagatatattaagtataaaaaagcattttacgcttggtctgaagcttctacttgacttttattatgcctttttcgggattttcgtaccttaaatgccttttttggcattttgcccttttggtgcctcttttggcgtttttttttacaaaaaattccattaaaaatgcaataaaatcagggaaaatacacccctattattaattataacagcagcagcaacacaatttttggtattatttctaagacatataaaaaattatggatataaaaatacgcgaaatatggccataaaatatggatacaaaaatcgcggattatgggcaaaaatggcaaaaatatggaaacataaatttttaaaaattgagttgtataatttaaaaattcctcaaatttgctaaatcttgaaaagcgaaatttttgccttttccttatttttgacacaattgagcaactttatggaattttaaaatttagtcaaaatcataagaaaaatttttttcgggtatttagttgtcaaaaaggtcaattagctaatggggtccgttctaatagaggattttcgcaaaaatgccaaaatatgcacaaaaatatggacataatccanaaagatgacat

SEQ ID NO: 43769 - DNA, 1019 bp, Heterodera glycines
atggaattgtgcgaattgagcccgctctgtgccgtcctttgcccaatgtgcggctctttgcgctcattcggcgccaatgccaccggcgatggcttaaagtggcgaaggcgaaaccgaaggaccagaaaaggtcgtccagcacaatgacatcccaattggtgtcgagcagctgaacaatctgaaaaaaggacaatcgttgaaaaataaattaaatttgatttcattcggaaatttcgtttaaaaaggaccaattaatgaattaacagactatttaatgtaccatacatataactaataattattaataatgatttatttattaatgctttagtgcttgctttttggctgtgattttgcatcaaaattccgagttccttgtcacatgtcccaaaataaagggccaaatcagtggcggaaagacggcgtgaccaaatgtcattggcaaagtgacgtttagactgaacaaaaaacatttttattattattttcaatttttaattgccattaactgtttcatcgttatggtgtttgggcaaaagcgcccgaaagtgatggatttcaaggctatggtcctgctcataaactgtgtccaaaacggacacattattgccccgactcgccagcctaaacaaaacacacatccaatttaaatcaattaatattaattaattagctagttaattgattctatcttataaatcccctccaattttgtaaaatatttgtacttttgcatcaatggaaacaccgattggaaatggcttcccgtgtcatggaaaaaggtgaacagaatgtttgtacatcggcacttgtcaattgaaacaaaaagcacaacaaaaatggcaaaaactgatgttttaagttttgccaatgccattttattggccactttaataaaataaaattaatttaattaatattttttatcttttggccattcacttcgaatgcgaatgaatgaaagtgagtaacaaacaaaataaagcggcaaatcagcgacagcttatcggaaataattg

SEQ ID NO: 43770 - DNA, 1432 bp, Heterodera glycines
  unsure (1)..(1432): unsure at all n locations
tttctgtttaaataaagtaaaacaactttttgtgaaatgtgacttgaaaagcaaaacactgacagacatttgtttgtccactccccccctcacatgcccccggggaaaggaaaagggagcgagtggaggggcgtaaagggagcgagcgtaggtacgaaaagggagcgagcaaggaacggaaggatgaaagtgagcgatcggagaggcgtaaagggagcgagcgtgtacgaaaagggagcgagcaaggagcggaaggatgaaagggagcgagcggggggggtgtttgtccgccnccgccccctttgcccctttgcccctttgcctttctttctctacacctcaaaacaccaaacccttgccaaaattgcactcttatccccccaccctttctacctcactttgtttttgtctcccccccccctctttctctctttcttcgtctgtgtttgtctgtctgtctgtcgagactctcgacgcgggggatgactatgactatcgcttgtttacgctccccgtcgccaaagtgacgaccaccaaatccaccaccactccttccatccatcttttcacacaaacattttcatccagggaagctcacgagaaatggccgagtgggcatatgcaatttgcccccgggggtgtttttcagccgtgggatgaatccagtcacaccgaaacgatgaaaagcagcaggtccaaaactgactgatcgctgctatttgttggcactttcgccaccgttggtgccatcctttagcattgattctggcactaatcatttgccatgttaaaactgacaccaatgaatccgattttcgctgattacccatttgctttgcagcaacggctccgattggcctttctgctccgatcggatgaaaatgatgcagaagctggccaaactgaacctgaacgaggcgggccccgcccctccgagcccgtgctcagtgaagacaccgcttgagggcgtatcgacggaggacactttgcaaagactgaggccgaaggaggaccaagcggaacaaagccccacggggacactcgcgcttcataaaagtgctcggcgaggggtcattttcgacggtgggagaagcaaaagtgggaagtgaagactaagaagagaccgttaaaggtgtgttttgcgaaagaagtgaccacgggggacgaatatgcgataaaagtgctgctgaaaagcgaaatccgacgggaggcaaaagtgcgctatgttctccgcgagaaggacattatggccgcgctcacttacgtccacgggggtcacccttttgtcattcgcctttattgcacctttcaagacaacaacccgactttgtgagttggggaggggcaccaattcctgatcagtggatcatttccatcattttggattgacattgatcacaattccctcggcctcggctgattgtcttttttt

SEQ ID NO: 43771 - DNA, 1137 bp, Heterodera glycines
  unsure (1)..(1137): unsure at all n locations
aaagagctcgataatatttaacgcgatcataacatcttttgttcagagttagtttcaggtaactaaaacctttcggtattttttctcgattttttttctaaaaaactaaaaaataaaaaatcgcggcgacggttacgttccggcgacgtttcggcggcgaagtttaatcccgctccggggggaggggggaagtcacggattcgggtactctcacaattaggcgcctctggggtatatgagaatactttccgaaagcaggtcattttcctagccgaaaaaaatttaaaaacaaattttcaaacctagaaattttccaataaaaaacttttaggaaattctttgcaaaaaaatttcaagaaaaaattttttgaaacaatttcagccatttttttggaaaatttttggaaaaaaaaatttcgtggggcaaatggatggaggaaatgaagtgcacccaataccaaatgcaacgcggcaaatgcggcgcggactgtacgcgtgggcattgttgactttagttgataattttattttcacaaagtcggattaatcttttatttttgacgttttcgtccatattagatccaagtttaaaaaaaactaaaaaatatatatataaatttaaggaaatgaaatgtaatatttttaattttaatttgatttacaacagaattgaccagtttacgagcaaaagagaaaagggcttttttgaatttttgggcttggccaaattgcggcgcgcttttttcaaaaaattttcggggaacagggggggggtggggggtccggcggtgccgacaggcgccgccggggaaaattttatttaatccaaattacttcttgaattcaaggatactttcaaattttcaagcggaagggcccaatttcaaggacgtccttaccattcaatgacggatgggagccctgatttatgttactttttaatgaataaataatattaattattaatgtgttagatgctttttctataaataaaattttgtaagttataaattttaatcttttgttttggtatcaaaagtattcataattttactaacgatttattttagcgtaattcagcataagctcattaactgttttttttcaanaaataaatctcttgtctcatgattaatg

SEQ ID NO: 43772 - DNA, 326 bp, Heterodera glycines
atcagtttttactgggagctcaatcgaaaatcataactatatttttaataaaaataaaaaaatcactaccatgtaaatatttattttcgaaatccgggccattagtatgacctttaaaaggataattgttaaattagaaattctatcaatccaataaattttggatgttttaattctgcgccgcaaatgtcgctttaattgggcgtcgcaagggctcccggataattcgacagtgaggacaatccgatagtggataatccgacagtaaaatgcacaaaaagataagaaaatgccatcgccgatcgggaccaatagtgccatgttgt

SEQ ID NO: 43773 - DNA, 1267 bp, Heterodera glycines
aatttaatacttttttagataatgaataagttattctttccactagtgaatctttacaaggataatagccttcaactgatgcacgaaaagctgaaaaaccaacaattggacacttgggaacaactgcaaaatgccattttgaaagaaaaggaagcgaggtaaaaatggggaaaataattattctaattaaaaataataattttaagaaagcaaaaaatggaagaattaatgagccaacaaagaaacaaaagtagcacaaagatagtgaataaattgacgagaaaaagcatcaaaaaccattcgaagaaacaattggagacaaatttggaaaaaggaagcgaatcgtttgaaggtgtccaagttccaatacttaatttggcaaaagatggacaaaaatgccaaacttttctgacagaagggcccaacgacggtaagcaaattagacgagggcaattacatatcataaaatattatttttcagacattggcatggattctgatattgaatatggcaccgagtctaaaatgttgaagccaaatccgcaaaaagagagggtgaaaaagatatacgcatagtagttgtattaaaccctaattaaatgccatttcgttacagaaaatcgactaccattacttctaccggtttgatgccaatgcgatcatttgccgttactgtccgtattgccgaccgacccaaaagcggtttaagccgacgaacgcgttgaagagccacctgaagacgcaacatatgagtgtgctaaagcagtacagaaggagcaactacattttgaaggaggacagcggaaaagagcaaaaagaaggaggaaccatcaaaacaccagcaaaacaatgggagggcagcagcctcaaaaatttagaagacacaactgacgaggccaaattcagaaaatatttaaatttttagaatttttttttcaaattttgcctgcaaatgtccgtcttcacaaaattctataagccggtcgaaaacagaaactgaaacgataataccatcggcatttctcggtctcaaatgtacgaatccgatttttttttgttgtgaaatattattatgagtaatagaaaaagacaaaatttgttacaaaatgcaaaaaaaccgtgtgcttctacgagttctttacgttgagatttcatacgtttcaatttcgaactcataaaaattactacaaaatgcactgaattacagacttttttatgttatttagggtggagtttccggtaatcacccgattggtaccgtgcgata

SEQ ID NO: 43774 - DNA, 931 bp, Heterodera glycines
ttatgtttcgacaaacatcctgtacaccataaatcgattagcaaatttagtagaactatataaatttttcaaaaaatgattcatcttttttatggttagcgcatatgtctctagctttatagaaacggtccccgaatctgcgaggaactactttttagagaatttctatagattattattttgcatgaatccttcgcttaaattcccatttatcttataaagtcagattaaattaattaccccgatttgttttagaattggtccaaacacgcttgctaatagcttttcttttcgaaaagagaggcgaggaaaaataaaggttgcatccaaatgtaatttttttttacattgaagcatttggatggcttgctgtttacagttggctaagtcttctttgcaagaagcagcacaacttttgtttgggccaacgaccccaaaccattcgaatagcaatcgattgggctgactagactccatatttgcaggaatagcaatggcaggtctatcttaaaggcctgacgagttatgtttcgacaaacatcctgtacaccataaatcgatttgcaaatttagtcgaactatataaatttttcaaaaaatgattcatcttttttatggttagcgcatatgtctctagctttatagaaacggtcccgaatctgcgaggaactactttttagagaatttctatagattattattttgcatgaatccttcgcttaaattcccatttatcttataaagtcagattaaattaattaccccgatttgttttagaattggtccaaacacgcttgctaatagcttttcttttcgaaaagagaggcgaggaaaaataaaggttgcatccaaatgtaatttttttttacattgaagcatttggatggcttgctgtttacagttggctaagtcttctttgcaagaagcagca

SEQ ID NO: 43775 - DNA, 1461 bp, Heterodera glycines
cccgcttcttttcatgctgcgcaaatcgctgaagctgcgcgacatggcatcggactcccgcaaaaaacacctttttggagattaataaaaattaaattcaattaaaaattaaattgcgttatataaatgggtgcagttttcgtttccactccgtaccgtttacccaccaaaaattaaattaaaaaaattgctaaaaaattttcaaatatttttatttaaaactttttttttgtacaaatttttttaaagttcaaattgaaaaattacaagtttgagaattaaaaaaatttcttattttttttccttcagtgttcttcttctaaatcgccgtcgggaaaaaactttattttttttttgtaaatttttaaattttcagttgccattaaaattttttatttgggtagaaaatgtgcgcagggcggaagaaatgtatttaaaaatgtaaaaaaatatttatttaattcaactaaaattcaaaaagattggaagaggggtaattgaagcttgcttgcttgtttcccaaaaaataaaaataaaataaaattccattttctaattatttaaatttggaaacgcacttcagcaaggccaaagttggccgtgcccgcctcctccagcccgtacttgtccagcgtggcgcgcacaacctgctccgcggtgtcggtggcgttcaccaacagagtcacatagggccgatgcgggaacagttcgactccgtaaattttcaaactcccacctgttcagcagggtaaacaaattaattcaattaaaaatgggtaattaaaattaaaaaaaaaattaatcagtgcccaactacaataattaattattgtaatttacaaatccgttaaagattttaatatatttttaaaatcctttctaacattaaaaatttttgaaaaagtataaaaaaaatttaaaaccatttttttgaatagttaaagcaaaacagcgaaaagaacttgaactcacaaataaaccaaaactcactatttgtatttcaaaaaattttattgttagaaaaaaaaatttacaagaaaattcaagaaaaaaaaacttagtaattcataataaaatttaaaaaatcgctaggaaattgtttaaattttttttcttgaaattttcttatatttaaatgtttttattttactttctctctctattactctctccccctcctctatctctattactctctctctccccctttcctctcactctctctattactctctcttccactgaccgctgttcatgtgccgtagccggtcgtccagcttctgttcccgacgccgtttcagcaccaattcgggattggacagtgtacgagcaaatggtgccaatgtgccgcaaagcggagaaattggtggcaacaatgccgccgacggtaccgagtcgtacaggtgggtgtttttgtttttgagggctaattgctaaaaatattttcagcagtttcagtat

SEQ ID NO: 43776 - DNA, 1133 bp, Heterodera glycines
  unsure (1)..(1133): unsure at all n locations
agcattcctctggtttgggttcccatcactccaagctccaccgtcaccatttttccaatcattgcattcggttcgaatccactacaaaaagtttcgcttttctccaactcatccctcaaatactctataacttccttttccagtttaacacccgcgacggttgcgtcggttgcgtcggttttaacttcctcttccattcttatgcaattttgcttaagaaagttttgtgagcgtaccgctggggttactccatttttggaattttgaacaattcggttcgctcccgtagctggcgaattatgaaactgttgttgttgctgattccgtggaaaaaatgcgggtgcatttcggttcgactgtacccctgctttattacagtttctcgaaatatggccgggctcgttacaattgtaacaaatagggcgtggcgaaaaatttttagaaatcatttcggaatttctttcaccctggtgcgtatgctggaagtttcgctcataatatggttttgagcgctccccgttttgtatctttgccgctttttgggttgtttctgcgcgcgaagccaacgccataaattcatcaaatgacattccattacggcgatgaagctccaaactcagtgcgagttcggggttattcaaacttctaatcagatgtttgatcgagtattcatctgccagatttcgcgttagtcctggatacgccctgcgtacaagactcgaaattcgatcggccaaatcgtccaggttttcactggattttctgagtaccccattcatcaaatcattgaatgcactcatttctctgcagtccgtctcctccaattgttgtaaaatacttcttttgatgttttcgtaagcgaacggttcgctggccagagcggcattataggctctttcagcacggccacttaattttgcctccaatgattcgatacgcttcttgttaggccaatcaatcgtgtattgactgtactttttaaagaaattgcgaatcaaatcgctgccttcgtttccctttatatccggcagacgatccanaatcatcgcatattcaagtccactcaggcccgcctggtgtaggaccgcctgttgctgtgcattttgaaatggctgctggttcacctgctgacg

SEQ ID NO: 43777 - DNA, 1150 bp, Heterodera glycines
aaaaagcaattaaaaaattttaaactttaataattttcctgcaccgaaggtactcactcggcctcttcgcggcctcgtggtgggccttcgcccccccccctcccacgcccttcagagcacgacaaatatttcaacaaaaattttgaaaaattgactagagcaatcgaacgctaacggacgacctaatggaaaaaaatccccgaaggagagaatttaattaaatccattccttcgggggaccgtgccgggtgccgcggggtaagcagtgctggttcgtttcatcacggcaccgaaccttttggctagtcagcaatcgttgcttaacttgccagatcggacgggtgcgcatgactttctgaaaaaaatatttatgaaacaaaaaaatcgattttttcaagtgtccgtttggggtactcaaacatttatggggagcaaaaatccaacgcagaattaaagtacaggctatagggaagctattcccgaaggattcggtctccccataaatctgggcgcatcggctcggggggactgccccgaaaacaaaaaaatcgattttttcaagtgtccgtttggggtactcaaacaattatggggagcaaaaatccaacgcagaattaaagtacaggctatagggaagctattcccgaaggattcggtctccccataaatctgggcgcatcggttcggggggactgccccgaaaacaaaaaaatcgattttttcaagtgtccgtttggggtactcaaacaattatggggagcaaaaatccaacgcagaattaaagtacaggctatagggaagctattcccgaaggattcggtctccccataaatctgggcgcatcggttcggggggactgccccgaaaacaaaaataaatcgattttttcaagtgtccgtttggggtactcaaacaattatggggagcaaaaatccaacgcagaattaaagtacaggctatagtgaagctattccggaaggattcggtctccccataaatctgggcgcatcggttcagggggactgccccgaaaacccaaaaaaaaattttttggataaaaattatttaaatgaactgactagataatatttaaaataggttatttctcttcctttcagtatccctgcaaagtttggtgcgcttctgatca

SEQ ID NO: 43778 - DNA, 1533 bp, Heterodera glycines
gacgaaaagcaaaccgaaggggaaagcgtcgaaaagcaaaccgaaggggaaagcgacgaaaagcaaaccgaagggaaaagcgtaagggaagcaaaccgaagggaaaagcgacgaaaagcaaaccgaagggaaaagcgacgaaaagcaaaccgaaggggaaagcgacgaaaagcaaaccgaaggggaaagcgacgaaaagcaaaccgaaggggaaagcgacgaaaagcaaaccgaagggaaaagcgtaagggaagcaaaccgaagggaaaagcgtaagggaagcaaaccgaagggaaaagcgtaagggaagacggacggacgacgccttttgacgaccatccaattcatggccattctgtcattttattttattcgtttttatgggctcaatatcaattataaaggtcaaccaattagtctccccctccgacttattcggtgctatgacgaagcgacaaaaatatgggtgtgggcgaagcgacaaaaagcgcataggtctgaatcttcagacccatttgaggtagcaccaaggcttcaattaacgaaatttggagctctaaaactaataatggggaaaacaatcatcggaacagagtggatgagatacataaccgtgaaatttatcattttagcttttgaatccgatccaagatcgcgaagcaccatctatcttcatttataatcaaatgggtcattttgaagttattattcagcctgaacgtctgtcccacaaaaacgagtaactccatatttttatcacttcactcttcacataactcaaaattatttttttaaatcaaatttaaatgaattgattggtttaaaattttgttcataaaacgtgtgattggttaaattttgtcataaaatcaaaatctcaaattacttagggtgtaacataagtttccgcacaactttttttaaagaatttttttatgaatataaatttaaaaaaccacaatcatgatccgaaatatctgacattattattgagaatgagtttgctatttatcgggcaagggataaatcccattagaaaagtatttaaggagttagagttgataatgtaaaaatggtcattttcgaggtatgtatttttgatggctgatttaaagaaaatgaaaagagatacagaggcagagaaaacgtgagtaaatagagcaaagttaggactataaaaaattataagaaaaaattttattacttcaaaaatgaattattggagggccgagtctaaaaatggtctccaaaaacggcatttttcaagaccatcaaataacaaaatgttttaaaagtggttttggaaattccgaatttaattaaactaagtaaattgaccacgctgagtccgaatatggctttagatttggtctctgggttctcaacaaacctgtacagctccaacttcatgcatggagctggagcagtacaagctcagggttaaaagatagatcagatttaaggccatattcgggatctactggtctaatttgacagaaaaccttctttttgtatatcaggttacttttttga

SEQ ID NO: 43779 - DNA, 275 bp, Heterodera glycines
ctcacccaaattttccaagaaattttctaaatttttcaaaaaatccacaaatttttcgacgaaaatctgctaaaaatggctcaaaatcacaaaatttggtcattttttggacaaaatctgttaacaaaccgcatttaaaaccgcaaaaattttcccggcggcgcttatcggcaccgccggacccaaaagcgccgcaaaaaattttttggaaaaaccgcgccacaaaaaaacgggtgtgaaaagcaaaaaaaaaaggcgttcgcccggggggaggt

SEQ ID NO: 43780 - DNA, 391 bp, Heterodera glycines
cgatgggggcgctgctgattgttgatggatgaaaaacgtgccgaaaaataatcaaaaacactcgccccccccagcgttttccccctaatcactttccacaatcggtggcggagagggcggaatatccgaccacccaccaccacgcaattaataatccccttaataacccccccccccccccccccattcccgggcttctcctctgttctcgccccttctggcgagggccgccgttttcaatacatataataatattgacacaacaacaaaaaccacaaaaacaacaacaataaaacaggggtaaatggtggaaaattatatgatgagaggcgagaggggtagaaaaatgggagaaatggtggaaaattataggataagggggggggggggt

SEQ ID NO: 43781 - DNA, 1016 bp, Heterodera glycines
ttttttcccccaataaacttttcatccccccttttttcgcgccgtgaattttttttttattgaattctgaaccggtttgagtagattagagtacaaaaatttaaaatttcgaaatcatgtttcccactctcttctcccaggggtattattttgtaaaaagtcttgttttccccaataaacttttcataccccatttttcgcaccgtgaatgttatttttattgaattctgaaccggtttgagtagattagactacaaaaaatttaaaatttcgaaatcatgtttcccactcccttctcccaggggtattattttgtagtctttttttccccaataaacttttcataccccatttttcgcaccgtgaatgttatttttattgaattctgaaccggtttgagtagattagactacaaaaaattgaaaattttgaaatcatgtttcccactcccttctcccaggggtattattttgtaaaaagtcttttccccaataaacttttcataccccatttttcgaactgtgaatgttatttttattgaattctgaaccggtttgagtagattagactacaaaaaattgaaaatttcgaaatcatgtttcccactcccttctcccaggggtattattttgtaaaaagtctttttttccccaataaacttttcataccccatttttcgcaccgtgaatgttatttttattgaattatgaaccggtttgagtagattagagtacaaaaaatttaaaatttcgaaatcatgtttcccactcccttctcccaggggtattattttgtaaaaagtcttttttcccccaataaacttttcataccccatttttcgcaccgtgaatgttatttttattgaattctgaaccggtttgagtagattagagtacaaaaaatttaaaatttcgaaatcatgtttcccactcccttctcccaggggtattattttgtagtctttttttccccataaaacttttctaccccatttttcgcaccgtgaatgttatttt

SEQ ID NO: 43782 - DNA, 1212 bp, Heterodera glycines
  unsure (1)..(1212): unsure at all n locations
cagctttcgaatggtgtatcaaattaattgtttactgaaaatttcacagagatatgtccancngatctnngaaatgaataatggcgtagtattctataaaaaaaaatttttcttaggaattttacagtgcccagggatttgaattatcccataaacacatcatagggtaaatatctagcaaaaacaaattttttttacacagaatcctagtccatcagacagatgaagcgacttaataaatcgattatggatttgcaagagttaatttctcaactcacactagctaacacggaatttgccgagtgtaggcgtaaaatgagccattatgaattataagcgtatatcttggtccacattgagtgtgtgggcgagattaagtaattttctgaaagagctcaaaagcagctttcgaatggtttattcaattaattgtttacttgaaaattcacagagatatgtccaaccgaatcttgaaatgaataatggcgtagtattctataaaaaaaaatttttcttaggaattttacagtgcccagggatttgaattatccataaacacatcatagggtaaatatctagcaaaaacaaattttttttacacagaatcctagtccatcagacagatgaagcgacttaataaatcgattatggatttgcaagagttaatttctcaactcacactagctaacacggaatttgccgagtgtaggcgtaaaatgagccattatgaattataagcgtatatcttggtccacattgagtgtgtgggcgagattaagtaattttctgaaagagctcaaaagcagctttcgaatggtgtattcaattaattgtttacttgaaaattcacagagatatgtccaaccgaatcttgaaatgaataatggcgtagtattctataaaaaaaaatttttcttaggaattttacagtgcccagggatttgaattatccataaacacatcatagggtaaatatctagcaaaaacaaattttttttacacagaatcctagtccatcagacagatgaagcgacttaataaatcgattatggatttgcaagagttaatttctcaactcacactagctaacacggaatttgccgagtgtaggcgtaaaatgagccattatgaattataagcgtatatcttggtccacattgagtgtgtgggccgagattaangtaaattttctgaagagctcanaagcagctt

SEQ ID NO: 43783 - DNA, 1015 bp, Heterodera glycines
  unsure (1)..(1015): unsure at all n locations
tattgatgggttcncgcgggttctaaattggccaggttccttttttgaaaaactggctcatgaactccaacaataaaaatttcaatattcgtgaataattaaccctcgcatagaagtcaacatcacttttcttgcaaagcttcataggcaataatttaaattgcttttgattatattcaatcgctggaaaagcattcttttatacgttaaacctgcaaaaagcgtccgaaattggttgctgaccattctattccctaagaaaagtctcacacggacgcaatagtaggaacgcaagtagtacttttgacagtcttaaaaatacagcgcactgattcgtgcgatttatcacttttaaaatatgtttgaagtcaattgatgggttccacgggttctaaattgtcaggttgctgctgttctgaaaactggctcatgaactccaacaataaaaatttcaatattcgtgaataattaaccctcgcatagaagtcaacatcacttttcttgcaaagcttcataggcaataatttaaattgcttgtgattatattcaatcgctggaaaagcattctttatacgttaaacctgcaaaaagcgtccgaaattggttgctgaccattctattccctaagaaaagtctcacacggaagcaatagtaggaacgcaagtagtacttttgacagtcttaaaaatacagcgcactgattcgtgcgatttatcacttttaaaatatgtttgaagtcaatattgatgggttccgcgggttctaaattggccaggttgctgttttgaaaaactggctcatgatctccaacaataaaaatttcaatattcgtgaataattaaccctcgcatagaagtctacatcacttttcttgcaaagcttcataggcaataatttaaattgcttgtgattatattcaatcgctggaaaagcattctttatacgttaaacctgcaaaaagcgtccgaaattggttggtgaccattctattccctaagaaaagtctcacacggaa

SEQ ID NO: 43784 - DNA, 1116 bp, Heterodera glycines
gcctaaatcgttcacaattatctttctcctcaatcgctaaattccgctcaaacaggtgaaaagtggtgataaatacgtcgtttaaatatttttacgtcgttttacagtgaacaatcgacctaaaaaaattgccgggtttttgaaaatttttgccgggtttttcaaccggtttttaattggcgtatcccttgacatttagggccaaaattttgcactttttcactcgctggcgacgcccttaaatgaattttcggattttttaatgagtcaccccttttggttattgataaaattcaaattaagtgcgcactttttaactagcaccgtaatggcttataataaattaaggaagtttacatttttaattggcatatttgtgcacataaaaaatgccaatagttctgaacaaaatctatgaatttttcaagttgtccaaagcgagttcattgaacaaaaccagttcactttaagccgaatttgtcaaatggttcggatggaattaaagaatgaagaaaagggaaattggaaagaaagaacaaaaacgacgactaattattggtaaattaagaatgaaaaatgaaagcaatttttttattcgataaaaatttctttgatggctaattaaaaaacatttttaatttttaaatttttcaataaattaatcccattttgtcattttagagcccttaaagaagaaaattctccatcaccaccaacaaaatattagacagtattacgaaccttactagtacagaatgaccgggccaaaagtatggcactttttttgaaatattttaaagtgttcattgaacattaattgacaaattaattactgtttaaagaatcagcgacaatttctacacggcaagaacatttgacattctgtatttaatgctctcataaaattgtctttcgtctatttggtgagaaagcggagagtgattttgattaacacgacagatgaggattatagactcgttcgcccctcctcccccaccttcattctggcattttctcattcatttaattttattttgcatcaattattgggcatcaattactcaaaaaattaaatttaacgacaaaataattaaatttttttgaataatttatttt

SEQ ID NO: 43785 - DNA, 1322 bp, Heterodera glycines
ttgtcatcgtggcgatcttcatcctcctcttcccccctttcctcctgctccttctctgccgacaaaatgttgttgttgtctgtcggtgtgtttctacggctgcttacactctttgcagcagaattgctgccgcccgattgagcagcgaccctttttttagcgacagcatttttcatcactgttcaaaaaaacccattaattggtcagcaacatactacatacactgaaactcaagaacttgaattttctaccagaggtcggcgcctcttgcatttttacaagcgcattttttttaattagcgggattttttgacggtttgtctgtgcgcactttttggtcaaattgatgatatgggttttgtaaattctacctgttttgtttaatttcaaattccaatttttgctaaaaaaatttttttttttttttaataataggaatgtatgagacgaacttttcagtttaataaatttttcgggtcggggaaggatgggacgataaggtggagggaggggaagagaggtggaggtaaaggtaatgcagacaaaattaccagaaagtgatgccgctcggccaccaccaccggcaacagaaaacgaagatgcccgatcagatttcttcattttgcagttgcggtgttgaaccataccttcacccaaagaacattttggtgttgttgttgttgttgtgccatcctccgctgaagtctgttcacaaccaatgatgctgtcagcaatgtttttgttgtgcaacaatttgaattcgttgtgcaaatgttggaatgcttcattgctcagtgaaggcaaagcggctgtaacaagttcaatgccttgcgttttgatattacaaacctaaaaatgattttattttttttaatcatatttattatgcacgcctcgttaattctccgctcttcctcttcgcagatttgagagctgatagaccaattcgtttgatccctgcaaaattacacaaacaaaacaacaacaacaacatatattagagacaacaaattgtgaacaatgtccgcaattgtaaaagagtgtgttgctactgtataaaacgggccaattttgcgtcatcgacacaaaatcggcacgcaagtcggcaattctactgtaccgacccttttcaaggttggaacactattgttgaaaatgcattgaccaaccgatgggcatcccctgcttctcactgacgaccgtgtcattaaacacctaaaaaacgatctgacaatgatcactatattgtggcaaacgaaattttattgcgttgacccttttgattttaaggtccttgatcacgaatcatacatctattttga

SEQ ID NO: 43786 - DNA, 757 bp, Heterodera glycines
cggattcgtcgaaatgaaacgaacttcgaacatttatcttttatgtttgttcgtttttattctttggcaatttctcgcaactgcttttaatgtgtcataacgcaatagaaaaaaagcaagagggcgtcgagagaatgaataatcggcgtggttatcgaattgattaatttagtagtgtcaaggaaaagcattggctgtatgtctgccgatccctcgccaacactttgcctcgcttggaatatgcacgaataatgccaaaattaactcccaaaatcttaaataaatatttcagattttagccaaataattttctgacgagggaagggaacggaaatcgaacgccccgagggggggggggggcaaacaaaaagataatcaaaaagagaaatgctgctgccctcgccattctttctgtctatgccttaacgattaggaaattctgaaagtgcatttaaggaggaccattgggaaaagatttcttccgtaaatttaaatttgaattttgtttacattggaacgcgcatgttaatccatcgcccatccatgtcccccttccccctctctttccccctctctttccccctctctttccccctctctttccccctctctttccccctctctttccccctctctttccccctctctttccccctctctttccccctctctttccccctctctttccccctctctttccccctctctttccccttctctttccccttctctttccccttatctttccccttatctt

SEQ ID NO: 43787 - DNA, 1170 bp, Heterodera glycines
  unsure (1)..(1170): unsure at all n locations
tcgccttgctttggacattttggtcggtgacttcggtcgtttaacgccaacttgcgcagacattctgatgcaacggacaatgccaaaaggacgattcgcatgggacgaggaggacaaaggaacggagaggaaaagcgacggagggacaatggcactcggagggggaggacgggcaacggggcgggggcatttttgagtcagaggattaacacagcagcagaatgacgagatgatggacacaaacaagtacagattacggtataaaacggaatgggacggatacggtaggacgaatggacacggaaaaacgcaaaacaaaagctgataattgattaaaatgataaggtatacaataagtgtgtaaaaggggcgtaagttgcaacattcgtaaaatcaaattttggaatttgtaaacagaaaaccccaattttacggccaattattatattgaccgatatttcttagaatttttaaaaataacgaatttctttttttggagatttttaactctttaattaaaatgttgcggcactgattcttaaattccgttttttcttgtagaaattaaacttattgttcccttcattatatcattcgttcaatatttttattaatagaaaatattcaaaatgatgtgtttttgtttaaaaatttaaataattaaaagcaaaaagatggaaaaaaagaaaagacagaaaagacccaaaaatgtgtgaacaaaaattgatcggatggcttaattgagaagcagctgccaatcagaactgatcacgggcaattccgaccaacaaagtgtgccaaattatttgcggatttgaatgatcaaaaatcaaatagaaaagaaatgaaagaaacacgaaacaacggtggaagaatagttggagacggttatcacttggaaagggaaggatgagcatttggagacagacaatggtgtggtcattttgctgacgatggcacggcacgaaaattcactccccggggaagggaagggcacaaaatcagatgtaattgggaatttcttggccagtcaaaagccggaacatcgaagttggcattgttctgagcattcggtaaaggattagttccattccatctatcagtgctttctcattagcttatcccatgttcatcccctccncatttgtcatttttacttcatgtgaattt

SEQ ID NO: 43788 - DNA, 772 bp, Heterodera glycines
agcatcttctatatcaattaaatgcctattttatttgtctttcttatgaaaaaattaatattctttttgtattataatacaaattttattttatctgataaattagctggagtatcaaaatatatttaatttcattgaaaaaatttgatagttattatcgtcgaatttaattatgtatattatattaaaaataaattatttacttctattatttattatatttttatttaattgctaagttattaataatctttttattttataatttgatttttgcttatcatttagtagagtaccatttaatttacatttacacatcatttcctttcctttttactatttataaatgaatttttttatatgaaaagatgaaaaaaatatttttattggaaaaggttcaccaatttaaataatcagaatttttaataaatttataaataataaatatagcgttaataatttatacgaaaataattatgaaattctttcattttttcctttaagttattgaacatattagtaaatgagaaaccaattattaattgattaagaattcaaatatttatatttaaaatttatattacaaatttctaactaaaatgacttttttaatattcataaaaggtatttttagaaattaataaattgcaaaattaagtgatttacataaataaaataaaaatttttactttttaaatcacattcataaccaaccattcattaatataaaaaaaggcatgactaaaaaaaggaattacttaatttttaattt

SEQ ID NO: 43789 - DNA, 990 bp, Heterodera glycines
  unsure (1)..(990): unsure at all n locations
ctctcccagcacggccatcctctggatgatatttgaaccgtagagtttagtaaagatttaantcgaagaaaattcttggtattttttgtgtttaccattcctcttctttgtgtttttggaaaaatcgctcacattcctgacgaagaacatcgaactgaaacccatacaatgtaaagtaagaatgccgcttttgacttccaaatttactggttaattttggcaatgtctttctgttctctgtgttaccttgtattcgttgtatttggtgatcgcctcctcgtcgctaagtgattcgtcttgtgtcgcaagaaatttcctaaaagtcagcaaagtggtcgtcccaccatctgagtccagtgccgtgtctcgtttattaaatatcggctcatagctgtcggatgccgaatcactgcttgtattaaatatcacaattttcatttctatcaaaatgtaactcacaagcgcccccgtttaagcggttgctgttcatcttcaagccctgaccctctgaatgatcgtttcatcgttccatttgcagcaaaatcggcacgtcttgacctaatagcacaaacaaaatgcacatgcaattacattttatttcagtgttatcaaacctatcaaatgggcgacgaaagtcttgctgcccgactcccctttcgcggctgaatttttcccgtcggcgttcgtctggttcctcatcataaaccatgatttcaagttaagcaatttcgaaaatctatgattttcataatcaatgatagaattaatgactgatatcatattcgcgaccagaagccctgaatactcccgggttgatcttttcataacagaaaaacaattttttgggtggaccccagattctccaggagtattacctcaattttgttatcattcaaggcctaagtgttctctattatgcatgtgcacctttttgcgacgtttttttcaaaaaaccggtgtctatagcagggcgcgtatctgtccttattt

SEQ ID NO: 43790 - DNA, 1306 bp, Heterodera glycines
  unsure (1)..(1306): unsure at all n locations
cgaacagtgccaatgcnatcaaacagtcgccgcgccagtcgaaccagcaattgtgccatccttcgccacccatcggctgccatcagccgacaaacggagagcaaagtcagcagcagtggcattggcagcgcaaataatgagtcatcggcgttcggtttgtcggacattggcaaagggacgagtcgcaaaatgtttttttgttcagagaaagtgccaaattcgtcgaaacggcgttcgacctgtccgagtcagtgcagtgccttcacacctttggccaattgtaagtgcacttccgctgcttctcatcagaatatcccttccccattaaattagcctcaactgaaaaagcggcagcgaatggaatttcacttcggggaaatgtgccaaaaatgcagcaaaatacgggcgaaagagaggacagaaagaaacggggcggggaaggggaaggggcggcggaaggcgaagcaaatgcgcgaggtgacaagcggcgcgagaagggccgtgccgcgaaagacgcgccgactgaggtgagtcacccgcgagaaggggccaagaaaaggcccaattaccaagtgcccccgcccccattagcgtggaatcctccgtcggaagagccgatgccaattcgacgtcgcccaataacgaatcgccggagatggccgtggcatcggcacgctccaacacagcttcgcaacaatcattcggatctgttaacgaccttatgcccgcaacttacgacagctgttcagcccaaaacatgtctccgtcctcctcgcagtcgagcgaatcgccgacggaaacaaacgcatcgccgatggaacaggtcaattgggaagggaatgtaagggaaagcgaggggggggttaaatattgtaggtacagtaggaaagaggtcagtggataaaagaatggggcatcaggtactgtattttatgggcaatgggaaagggaatggaaaaaggtgaattaaatattgtaggggaaggagtcaatggggaagagagagagagtgaaagggagagcaaaagaaaactgtactaattacagtacaccgaaggaaattgaacccattatttttaaaacaatgcccttttcttcttaggatggcgaagtgccaatcgctgactcttttcaatgcctgtggcataaaagggacaaaatnttcaccaaanaaaanccttttntntacctatntnaatnaccatntccganccgaacttttgaaggaaaagaaaacccattaaaaancataattaatacttgtagggataataaatttcatttttaaatttgtttttctttttag

SEQ ID NO: 43791 - DNA, 1264 bp, Heterodera glycines
  unsure (1)..(1264): unsure at all n locations
tcatcagtatcatcttaattttccccccagtgatttgtgagtgatagaaaatagaagaaattcagggattaattcctgaggaatttccaaggaccacgtgcatcattgctacaacggtgccttaatggctttttaatgtcaaaatgcccgacactagcgcatttctttagacaacgaaaattaattcctgaggaatttcccaaagccatgcgcagctttgttagaccgatgccgaaatggcaatataattggaaaaggacagacaacaatgcttttctttatatcagctgatggtttacaaaaatcgaaatacttcctgagtactttccaagaaccatgagaataaatatcgcactagcgccaaaatcgaacaagaacgctaatcatcagtatcatcttaattttcccccagtgatttgtgagtgataagaaaatagaagaaattcagggattaattccagaggaatttccaaggaccacgtgcatcattgctacaacggtgccttaatggcattttaatgtcaaaatgcccgacactagcgcatttctttagacaacgaaaattaattcctgaggaatttcccaaagccatgcgcagctttgttagaccgatgccgaaatggcaatataattggaaaaggacagacaacaatgcttttctttatatcagctgatggtttatttacaaaaatcgaaatacttcctgagtactttccaagaaccatgagaataaatatcgcactagcgccaaaatcgaacaagaacgctaatcatcagaatcatcttaattttcccccagtgatttgtgagtgataagaaaataaaagaaattcagggattaattcctgaggaatttccaaggaccacgtgcatcattgctacaacggtgccttaatggcattttaatgtcaaaatgcccgacactagcgcatttctttagacaacgaaaattaattcctgaggaatttcccaaagccatgcgcagctttgttagaccgatgccgaaatggcaatataattggaaaaggacagacaacaatgcttttctttatatcagctgatggtttacaaaaatcgaaatacttcctgagtactttccaagaaccatgagaataaatatcgcactagcgccaaaatcgaacaagaacgctaatcatcagaatcatcttaattttccccagtganttgtgagtgataagaaatagaagaaattcagggnnatatctctgagaattncnnaagacacgtgcatcattgctacaac

SEQ ID NO: 43792 - DNA, 1129 bp, Heterodera glycines
gaaaaaatcgaccgataaatttttgagtttttcggtttcggtttttttcgggtttttaaccgaaaccgaccgaccgaattaatcaaaaaaccgaaacaaccgaccgacttttttaatgcgatttgttaacagattttgtccaaaaatgaccaagtttttgcaatttttagccaatttttaagaaaattaaggatttttagggtacggttgtgccgataggcgtcgctgggggaaattttgagaattttattttattcatggtttcgagaatttgtctttcgaaatgaaatttaataaaaatcacaaattatttaaaagattttgtggacaaattattttaagttggcaatcttatgcctgttaatctatctaattttatttttaatcgcaaaaatgctaattttaatttcaagaaaagatttggctaaaatcacaacggaatctttaaataataaaaaaaacaaattctttttttttgcgaatacataacaataattaataataaattgcatgaaaacaattagccaagaattaattttggcgactcaacaaatcccttacagggatggtctttgaaaaaaagaaaatcttcaaaatgttttgcataaaatttgtcggcatctttcagttgattggcatggcatcgccgcaggcgcaacaaataaatcactcgttgttgctgttgattggtgatcacatgctcaaacaaaagcacttcatcagtcaaatcattgtgcacacgccacggttgtggaagctgattaaacgtatggcgttgttgctggtgatcagctaccgtaacggaagttttggcatgtacgataaacgagcgacgatcaacaggcgattgggcttgggacaaattcttaacaaattaataaattaattattttgtatatgtaaaaattaaacacaagtggactcagtctgcaacctccagcagatcccacgattcaaccaaatataaaaaaaatgtttcagtgatcatccatcatcagtttcttaggcaataatttttccttacctggtcaatcagcacattcctggtatgaaccgaatgaaatttgagttttatcattgtatttaatgggttaatgcgaagtaatttgctcttttcttttttaagatt

SEQ ID NO: 43793 - DNA, 933 bp, Heterodera glycines
aatttacctcctctggaacggcacggattgaagtaaatccctatagatatatttatttattgatgttttacgattttagagtccgattccattggattgtccaaatttggactcaaaaaaattggtgctcaatgactaccaaaaaaaatattcattcgaacgatcctttgaaaaaataaaaacagagttctaaataattgtcgctcaataagtagacctttctgaatacaacagtgacccgaagggcaccgcatcgaagtgccgaagtagcgcaatcgaacgctgtgtcaccggcacctgtactcaaattttctttcaatattttcggttggctaacatatatatttttaaattttatttaaattaattttaatatttggactgacctaagacaattacacgaccagataaacgaggtaattgagtcttggcacaatggcacattcctttaaaaaggaacaacaaaaaaatattttttttcattaatggcattaattttcaataaaattaattgtttatttatggtcttgacctgatttactggcctttgccaccaatggtaaaaaatctttagacgtgtaaaagccgttttccggtgttagaccatcaaacattggtgcccgtttcggctccggcattccaatgccaataaacaccgctttaacgccttgtttttgcaatctgtctaaggtcaaatcatcacgatgcagagaacggccagtttcaatctttaaaaacaattatttaatttaatgattaaatttgatttcttttatgaaaaatattcagtttttcaatatatttttaaactatttttacttttaaataaatttaatttgaaaaaaagattccttcttaccttaacaccaatgtcttttgccaattgaatttcaaaatcgactacattataaggcagacgaaactgaggaattt

SEQ ID NO: 43794 - DNA, 704 bp, Heterodera glycines
  unsure (1)..(704): unsure at all n locations
ccccgaaaacaaaaataaatcgattttttcaagtgtccgttntggggtactcaaacaattatgggggagcaaaaatccaacgcagaattaaagtacaggctatagtgaagctattccggaaggattcggtctccccataaatctgggcgcatcggttcagggggactgccccgaaaacccaaaaaaaaattttttggataaaaattatttaaatgaactgactagataatatttaaaataggttatttctcttcctttcagtatccctgcaaagtttggtgcgcttctgatcagtttctgaaaaaaaagttaagcctaaactttttggcctgtttaaaaaggaattaaaaatttttaaaaattttattcatctccctttttgatagaaaaagcatcagagtgcctaaactaacatgtaaataaaatttggtgcgtttcagaaccctttctgaaaaaatatttaagaattaattttgcaaaaaataaataaaaacgaaagactcagattttcgaaaatttttttgagccagctagctcggcgctcatttcagtgtaagttagtcctttaccggggagtatccctgcaaagtttggtacgcttctgctcaattagcaaaaaatatgagtgatcgaattttcactaaaaaagttaagcctacattttttggcatatttaaaaagcaattaaaaaatttttaaaattt

SEQ ID NO: 43795 - DNA, 816 bp, Heterodera glycines
tttggttgctaggcctcaatttcagttctggctcaataactcgtcaggagttgattttatcaaaaaatcgtctaagagcttttttgtagagaattttaagcccaatctaatgtgctttatctcatgttttaaccatgagtttaaaaaaagttatgaaattaattgtgattttgaaattaaaaaccataggggggaccccatggttttgcatttcatgaaaaatttttttgctcctaaattagccaaaatgcatttttatggcctaatttaaggtgctgaactcgaatatatactttatttttggtttcagactttttggaaggtggttataaatttttgaaaaatcgtcaaaatttgagccccggaaaatccagtgaaattttgaaaattcataactctcttcgtttttggtcaaatttagtggaataaagtttgaaaaatagcaaaaaattaggagaattttatgagatttatttggaatttctatcttccaaaataaaaaagttattccagaatttctggaaaaattcgatttttcagaaaaaaattcctaactcccttctaaaaaagtattttataaaaataatatactcaaaaaatccgcaattttttgctctattttataaattttattttagctttttatcacttttttgaaaaaagttatagaaataaaagtgattttggaatttgggaccacaggggtgtgaccatgatttttgagaggaaaattttttcaccaaaaatcttccaaaaaacatgtctttaggggttatttgggccgctgatcacgaatacgtgatcagattttacttt

SEQ ID NO: 43796 - DNA, 1086 bp, Heterodera glycines
  unsure (1)..(1086): unsure at all n locations
aaaataatacgcaaaatatctctcccgtacaaaatctgaagagtaaaatattcgaaaatataacttaaaaataatcggccccataacttcttttatttaaataaaatgggaaattaaaataattagtttatatttctatccccgaattaaataataagaattatcgtttccttcgaataacttatgccatggacaagaatcgaatagcaagtagataaattcgaaagcattaaaaaaagaaaattaacttaaaattaaataaattgcgtgagcaaatattaatttcaatttcattttaagaaacttagatttttatgaagaatttaaatgaaattttatttgaaaatttaccccctaaaaaatatttttttaacaaaagtatataaactaataaaatgtattctaaggcatacgtcctttttatggattttatgcttatttgtaccaaaaagcccaatggtaaatgcatttttaggcccacaattggagagaaatttaaacaagtcttcgttattaatttgtagaagcgaaagataaatacgtgttttaatgaaaaattattaactatgttaaatataaactcaaaatagtaaagacaaaagaaaccaaaagtatcttatatatatacttagaaatatattttaaaaaataattgcagaggtacaagaaatttttaacaataaatgaccataaacataatattttttaaaatttttggtaatacatcaaattctaattttgaataataaagaaaattttaaaaagaatacggaagattcctctaatttaaccttaatcgtgtaagacaattttgaacccagaatttctgagtcggattatgcgtgtaattcttgccgtggcatgggctggaggaaagttgtcgcgattaatgaattatattattaaagataataacccctaattatgtaaaacattaaaaaaagaaatatttatgtaacatttgtaaaacgcacacaaaaattaaacaattatttggcaatctgcatcaattatggcttanaataaaaattatanacatttaaaaataaaaaataaaaatgaatgaatttcttttttttaaatttc

SEQ ID NO: 43797 - DNA, 1318 bp, Heterodera glycines
ttttagtccatattttatgtccatatttgccattttttaatccatataatttacaaccctacttataaccctagtgattgctcaatttgacaagaaatttgaataatacagaatgccaaaagatttttaaactttacagcagaaataattgccgattccaagtgcactcatttaacctttatatttttctataagaatcaagtaaagagttggatttccaaaagccgtttagactcctccgattcaaaaagcattctaagtctcttttccaagagaataaatgctaacataggaaattggacattcagaaacaatgaaataagcaattatttcagtcttttgctgctccttattgctcaagcagtacagaataaaatgaattttcctggcaccgaaacgtttagagaaatgccaatcattcaccagcagaagaagcaggaagtggtggacagtgatgacgaaagcacaacctccttctcgtcctcatattcgtcctcctccagctcttcgagttcaacagagtgccaaagccctctgttgaaattgggcggccgcacgctgttcaacaagccgacaatttgcagaaaggttgccattacaaaacactcatggacaaagggcacggcggaggccaatttaaataaaaatgccgttcccattgtatgaaggtcaaaattaatttggataattcggattaagatggattgggcagttcgatggcgagcgccaataggcccataaatttaaaaaaaaaaaattgaaattcggagaattgatggaaataggcattttgatgtaaaagcattacaaatgcgtaattcttgttcttattgcccatcgaaatgtttgatgccattccccctacattctccagcagaaatggcatctccaacacccaaaaaaccgaactggatcaaattttaatgaattgtaaagaaaataaaaacaaatttggattaaaagcgtataactgagtcagtgcagctcatataaaagcaatcgtacaaaataaagcctaaacttggcttagcctaagcctaggcctagtctaaatcttaggcctaagtctaaagcttaggcataccctaagccgttgtacgagttgtcatgacaccaaaaaaccgggcacagacctctcaaaattagtcagatgctggtttatagggaaaatgcccttccggactaaagcaactgtataaggcagaggatcttaatgacttccaaaatttgtttgttcttacactctctccccatctaattaagggaacgccaattagcgccaatggcaccgcttttgccgatcagcaaaacaaaatgt

SEQ ID NO: 43798 - DNA, 1204 bp, Heterodera glycines
gttatgaattttcaaatattaggccaaaatcccgagggccaaaaaattgccaaaaaataaagaatttttaaaaaattccaaaaattatgaaacttaaaacagacatcatattcgtactcagcaccttattttaccccagaaaaatatttttgacccccattttcaacccaaaaaaaattttcgaaaatttctagggggcctagctcgaaaatttttgaaattttccgaacatgaagtacaccgttcgatagagtttaaaaagctctacaattttgctctaaggccatttttggctaaaagcaacccctgacgagttatgggcccgggactcaaatgtcccgctcaggcccaaatttttttctatttccgggaaaaaaccgaaattttttcaaaaaaattaccaatcgatagagcatcaaaaacggttgcttgaaagtggtctccgtttgtctgggaaaaatcgttaaaaaatcataaaattcaaaaaccccaaaacctacttttaggcctaactcggaaaattttgaaaattttcgaaattttaaaaactggaaaaatcgggcttttaaagctctacaatagtcccgctggcacccccttgatcaattcaaaccctgacgtgttattcacccgggactgaactggtcaaagttggtactgaatttctccatttttctgcagcccttcctattataggtagaggcctggatttttttttgttttttagtcaacacttcaacttagtttcctaccagcggacattttttgattagagtgtcagaaaaaaagttacgggccttgaactgcgagcaaaaacgggaaatcggtccctggtactcagttgggcctcggaccaaaaaacctatagttttcccagatgcgccgtctcgagttaccccttgctgcaaaatttcagccccgcagctattcccgaacttctcaaattagtttttgaaacgaaaccccttatcattctaacatatatataactagcgggtgcgtgaaccgtcggctatttagctgggataaagcgcttcgcgctttgggagcttcgctacctagattagctatcgggttgtgaaaagatttggaatttttaaaaaattatcagcgatttttaggccgcttcgcggcctcagacgggcgctacgcacccgttttttaaattcggtgatttttaggctgcttcgcggcctcagacggg

SEQ ID NO: 43799 - DNA, 968 bp, Heterodera glycines
tcgttgagcgttcggatcagcgagtagaatcgagcgcctgccggactcatcggcggtgacgacactccgccgccgccaccggtggaggaggcgggactgccactgtaaaacaccacacgggcgggcgatgccatggcggacgactgctgttgttgcggcgattgatggtggtacgggtggtggtgatgatgatgatgcattattactatttcaacactaacaatttaataaaagtgatcaaaaaggaaaaacgaacggaaataaacggtctgagaatgatcaaaaaattgataaaccggaaaagtgattgtagatgatcaacagagaataataaaatatgataaggaaagaagcaacaaatgttctctctatagcaaaaaataaattaaataacgactttttatttggtttatcccaaaaaagaagacaaaaaatcacatatataacaaaaaagtgctcatttttaacgcgcgcaaaacaatcgaggggaattgttgctggtgatgtgtgtttatttgccggtctcctccttgccctgggggcgcggtttgccgaacgtaaacggaatgtaacggtaccgaatcatatgctaaaatgggaaaaatggatgaaaatgaagcaaaaaattcaaaatgagacatttttgactatgctgaaaaccaagacttcgaatttgccatggaatttttaaatttgaaaaaaaaattgtcaatgaaaacctaaaaattttctaaaattccttaaaaattgtttttattataaaataaacattttcaaaaactgtatgtctaaaaataaaccgaaaaccccaaaaaaacggaccataatctgtcgcttcatcgtcagagtggtgagcacgataaagtacatcaccaaaattggccaaaacaccggtatgtcgaacatttcgaagaaagtgcagccaaagacgacaagagtggacttcatggtggacaacctgacatttt

SEQ ID NO: 43800 - DNA, 784 bp, Heterodera glycines
ttttctctctttttaatggattattatcgttaatcctgagaaaccatcaccgtgttacgaatttttcaatcttatacaaaattccagagggccaaaaaattgaaaaatattttcgaatttttaaaaaattccaaaaattccgaaacaaaaaacaaaggtcaaattcgtgctcagcacctcaaaataccccagaaaaaaatttttcaccacccttttcaagcctaaaaaaatttccgaaaatttctagggggcctagctcgaaaatttttgaaaatttcccttcatatagtataccattcgatagcatttaaaatgctctacaaaaaagttttaagacaatttttcgctaaaatcaacccctgacgagttatgggcctgggactgaaatgtcccgctcaggccaaaaaaaatttctatttccggaaaaaaatcgaaaattttctaaaaataccaccaatcgatagagctcgaaaaacggttgcttgaaagtggtctccgtttctctgggaaaattcgttaaaaattcctaaaattcaaaaaccaaaaaatcgttttttaggcctagctcgaaaatttttgaaaattttcgaaatttttaaacatggttggatagagctttaaaagctctacaaaaagtccgctgggcgccccctggctcagatcaaacccgggcgtgctattcgcctggtactgaagtgtccaaaaaaagtgattcttacgttgcctaacctacaggtcaggcctttgatctgatcaaaaaatttttggctggcaaagttgtagc

SEQ ID NO: 43801 - DNA, 1015 bp, Heterodera glycines
cgagtgttgttctcagtctttggggctcaaacaactagaaaaaacaattcgttcctccccagtctttgggaaaaagcaacgagatgaaatgtcgacttcgaattgaagcgacaaaattcctatccccgtgctgaaacaaaacggcaaaatgagcttactcagttgagtccaggagcgccacgttgaacaaaaattggggagaggatgtgctcgaacctcttcgacttgtccgggggttgtaattgaccacggcgtaaaagacaaaggcacaacgattgagaaaactcctaatcaaaatcaattcaacaaattaaaataatccaattttattgaagtccgaagcagatgaataatatcaaaataaattaggagaccacaatttgaagatgagaagcaaaaagcacaaaattaccaattacataaaattacggaaaaatgtcatcggggaaagtgaacaattaaccaaaaataatgagaacaaaatgccgccaaatttaaaatatttaaatcaaaaatgaattgtctttataacacattcggagcacacaactttaaaatttgggagagatttcggaatttggatgaaattaatgttcataatcgtatcaaaagtatcgtttcgcttcctgttgatcctctcgctaccaggttttgcaattgctccagcaattgctgcatttgttgttgaagcgcattaatctcatcttgcacatcttctccccatccaagccgacgttccaattcgacgagttggaaggcaatgtcgagcctttgttgtaaaattgggaattgcgcttgctgaggcatggcggcacgtccaacttcgccttccaatgcgagaatttacacaatgacttcaagaacttgaggggtgagaattggtcgtaagaaagcatttcccattaatttatttcttggggtgaaaaaatgtgattattacgaatatatatttaatctgacagaatgtttcacgataaatcataaaattatttataaatgaatgtttacgtagtgt

SEQ ID NO: 43802 - DNA, 1002 bp, Heterodera glycines
aaaaaaatagatagccatttttttgggtatatctattaaatttaaaaatatttgaaaaataaaatgcccacggcgccccgcacttcgttttcatgttcgagagcgtttgtggcatagaaaatttctcaaaaaaagagatgccatttttctggaatatgtattaaatataaaaattattggaaaaataaaatggccacggcgcaccgcacttcgtttcatgttcgagagcgtttgttgcatagaaaatttctcaaaaaaagagatagccatttttctggaatatctattaaatttaaaaattatttgaaaaataaaatggccacggcgcaccgcacttcgtttcatgttcgagagcgtttgttgcatagaaaatttctcaaaaaaatagatagccatttttctggaatatctattaaatttaaaaattatttgaaaaataaaatggccacggcgcaccgcacttcgtttcatgttcgagagcgtttgttgcatagaaaatttctcaaaaaaagagatagccatttttctggaatatctattaaatttaaaaattatttgaaaaataaaatggccacggcgcaccgcacttcgtttcatgttcgagagcgtttgttgcatagaaaatttctcaaaaaaagagatagccatttttctggaatatcaattaaatttaaaaattatttgaaaaataaaatggccacggcgcaccgcacttcgtttcatgttcgagagcgtttgttgcatagaaaatttctcaaaaaaatagatagccatttttctggaatatctattaaatttaaaaattatttgaaaaataaaatggccacggcgcaccgcacttcgtttcatgttcgagagcgtttgttgcatagaaaatttctcaaaaaaagagatagccatttttctggaatatgtattaaatttaaaaattatttgaaaaataaaatggccacggcgccccgcacttcgtttcatgttcgagagcgtttgttgcatagaaaa

SEQ ID NO: 43803 - DNA, 1213 bp, Heterodera glycines
gtcaaaaatatgcaaaagaatattttttcatggattctacgtagtctaattagtaggaaaaacagcttctttttggtatttgcatataaaagttggacttttatttgcatattttcagattttttgcatattttgccatttttcgacaaatattctcagatttgaatatccttagggaaaaaatttgattatgcctaaaataaatccaaatctgaatggatgcgcgagtgagtcaacagtgagtttcactgccgaaaatcttgagaaatttttgatttgcaattgcaaaaacaactgataaaatttataaggaataaaatttcctaattttcaattttttttgtgcttatttggtgcatatttcacgactttatttgcatatttatgcgcatattttggctacttttcgtgcatatttttgacattcctgattttcatattgaaagtttggttatttttggcaaaatctgtaaaagaaatcagggcaaaaaaaattccccggcagcgcctgtcggtacccgcaggcacctttccctaaaaattcgctcttaataaagttattttggacaaaatctgttaacaaacccaacaaatttcaataattttcaaccaaaaacttatttttttcttaagaattggacgaccaaaatgatgaaaaaaaaaatgcaaattatgggcgcgcttgccaatggacacttcagtacgcgcttttttacttgaaaaatgtcaagcgtacgtatatttccaattttctcatcgttttttgcctttttaatcggttaagaccttttttaaacggttttttgtttgggagctaagagacatattttccaaaaattggctcaaattcgccagaatttatacacaaattgcactcaaatatttcgtctctgatcgtttcgtcactgttcagttcgttactgagaaataattatttggctaatttcaataaaatactcttataaagtacgaattagtttaaattctctttaatttagttttgggtaataatattgtaccacgggggagcaccatttttcgaaaaaaatatttgagattttaaaaagtcagaaaataagtttttaaggttttcgagttcgctgatcacgaatttaagtgttgtcctaaatgatattgctctgagaaatctggagattttctgctgctgttttctgctcaaacccagcaaaaatttgatgcaaattgttgtctt

SEQ ID NO: 43804 - DNA, 974 bp, Heterodera glycines
  unsure (1)..(974): unsure at all n locations
gattagagtacaaaaaattgaaaatttcgaaatcatgtttctcactcccnttctctccaggggtattattttgtaaaaagtcttttttcccccaataaacttntcataccccatttttcgcaccgtgaatgttatttttattgaattctgaaccggtttgagtagattagactacaaaaaatttaaaatttcgaaatcatgtttcccactcccttctcccaggggtattattttgtaaaaagtctttttttccccaataaacttttcataccccatttttcgcaccgtgaatgttatttttattgaattctgaaccggtttgagtagattagactacaaaaaattgaaaatttcgaaatcatgtttcccactcccttctcccaggggtattattttgtaaaagtctttttttccccaataaacttttcataccccatttttcgcaccgtgaatgttatttttattgaattctgaaccggtttgagtagattagactacaaaaaatttaaaatttcgaaatcatgtttcccactcccttctcccaggggtattattttgtaaaaagtctttttttccccaataaacttttcataccccatttttcgcaccgtgaatgttatttttattgaattctgaaccggtttgagtagattagactacaaaaaatttaaaatttcgaaatcatgtttcccactcccttctcccaggggtattattttgtaaaaagtctttttttccccaataaacttttcataccccatttttcgcaccgtgaatgttatttttattgaattctgaaccggtttgagtagattagactacaaaaaattgaaaatttcgaaatcatgtttcccactcccttctcccaggggtattattttgtaaagtcttttttccccctaataaacttttcataccccatttttcgcaccgtgaatgttatttttattgaattctgaaccgngtttgagtag

SEQ ID NO: 43805 - DNA, 1213 bp, Heterodera glycines
  unsure (1)..(1213): unsure at all n locations
tacagatttntggtctaaaaatattgcnnctccctccttatctccgtaaaaaattttcaaaaatatttcccttaaaaaatgaaattttggtttcttcccaccttataacaagatgcttgagtgttttcgtcaatttcatctgatccgtcaaggcagtcatcctctccatcacaacgcctaaattaagtgtaaaacaattttttattgaacaatttaagacacgagttaaattttcattattgagaaaaatgccaaaaaagagaaaaattaaaaaataaaatgtaatgaaaattaaaaacaacaacgaaattccatataaatgggatcaaattaatcattaattaatttttgctatattaaattccgaatttaatccatccctaccattccaacggaatgcatcgcccgttggcacattggaattggcttccattgcgcggacacaatggctcaacaggctccatgatatcgcgaatgcaggccaactcgttgttcggattcactttgtagcctgaaaaaatgagcaaattaaacgtctttttttggcatataattaattaattatgataaaattaattaattaattaattacctaattatgtgttctgacttattgttaaccaaccaaaaatgattctttattttcaaaggtgtcctgatttttcatttttgtaaatgattgcataatccattttttgttataatttaataaattattcttttttttttacattcatctcgccccaaaattaaatgatttttttgttttttgaaaggtaaggattttttaattgacccattaatgcatgtcaagaatctcaagtctctcaatttggattcaaaattcaccttgtttgcatgcacatttcctcttcaacggagccgactgatcactgcttggcacggcaaagcaaaagtgtgcacaattgtggccaaggcacggatgttttagatgatcttttagaaaaaaaggaaaattcatccaaaaaaatggttggcttagcatttagaagcctatttaaagtaatctaatgagggtaattaacgagggatttttattaaggaaatgaggttttatttgagcattaaatttaaaaaatatatttttttgaaacattcgataagactaagtaaatcatattaattgttaaatttaaaaaattcgaaaagggagaatttctttcggtattttttctttttaattttaatttaa

SEQ ID NO: 43806 - DNA, 1134 bp, Heterodera glycines
acatatatcatcattttgacaaaaattgcctaaggacaaaacgccaaaaaaccccactaatttaaaaattttgccgagattttcccttgtaaaaatggaagagccgatctcgagatagaaaagaaactttcagaaaacaaaagagaattcgatagagagggccaaaaaactagcctaggtaaaatttcaagaaaagttacccacaggaaaaaattttttcccatggcaacaaatttacaaaatcacctactttttaaggcaaaaaatggtacttacacgtaaaaaaattgataaattaaaaagaatgagtgattgtgggaatgaagcaaagcgaaagcgcaaggaatggcgccaggagtacggtcgcagggttggttcaaccccaaaaagtgatgaaaattgaacaaatttattttattttaaaaacactgcatttttcaggactaaagcagaccgaaaccgtgccaacagcagatggagaggggacatcgacccaagccgccgaaagtggaccatcaacgtcagccttggaccttcgtaagtcaaaaaagtcactaattttagaagcaaaaattaaattaaggccctcgttcaagcccaaggccattgtcagcgactccgatcaggcgccatgagcgtgtacggccaacaactaccgaaaaagcaacacacatggatttgacaacgatggataaggcaacagacgtggatttggcttatgaggacgccgcgacacaaaccaagcaattggacaaacagctgaaagagcaggaacaagtgatcagctttcttcaacagcaggtccgcaacagagacgcactgatcgctgatctgcgccgtcgattggaacagcaggcgaaggaccagccaacacgtaaattctgcagaatttttagagccatttatcatccaaattgtttttagcttccacacggcgcaaaaaaaatgcggctacattggagcggacctcgcggagaaatttggccgagaaaatcgttgatgtgatcgatcgagaccgctcccgatcagtgagccgatgttcgctgcaaactctacatcgtgaagtccgccacaaattcggacactacacaccaatggagaaggaacaactcctacaacaacaaacaatccatg

SEQ ID NO: 43807 - DNA, 1410 bp, Heterodera glycines
  unsure (1)..(1410): unsure at all n locations
gacttattgtagagttttggaagctcgatttttccaaattttaaaatttcgaaaattttcaaaaattttcgagttaggcctaaaaaacgtttttttggtttttgaattttaggattttttaacgatttttcccagagaaatggagaccacttccaaaacatagtttttcgagctctatcgattggtgatatttttgaaaaaatttcgattttttcccggaaatagaaaaaatttttggcctgagcgggacatttcagtcccaggcccataactcgtcaggggttgattttagcgaaaaattgtcttagaacatttttgtagagcattttaaatgctatcgaatggtgtattttatgtttggaaattttcaaaatttttcgagctaggccccctagaaattttcaaaaaatttttttgggttgaaaaaggaggtcaaaaatatttttctggggtattttgaggtgctgagcacgaatatgacctttgttttttgtttcggaatttttggaatttttttaaaaattttgaaaatttttcattttttgggcctcgagaatttgggctaaaatttgaaaattcatatctggcctaaggtttgaccaattttgattaaataaagcattaaaaatggagaaaaatcaggagaattttatgggttttatttggattttctagcataaatatgaaaaaagttattccagaaattctggaaaaattcgaatttccagaaaaaaattcagaactcggttctgaaaagtcattcttgaaaagtaaaatactgcaaaaatccgcaatttttagccctattttataaattttatttcacctttttatcacatttttaaaaatatatacaaaaataaaagtgattttggtgttcgggaccacaggggggtgaccaggatttttgagtgaaaaaatttttctcacaaaaatcttccaaaaacatgtctttaggggttatttgggccgctgatcacgaatacgtgatcagattttacttttgacatcgttaagacctgagaatccctgtgtgattggggattctgagggggggggggaaggggggcaggttcgaatccggacggtgtacataatttttctgtgcatttttacgttatttacagtgatttaaattaatttaaaatattttgttgagttaataaataaaaaattatatttaaattaatttttttgatgaataaattttataagtttaaattaattatttttttaattgatagaatttcattatttttttaattaaatttgttaaaaaaattttcattttaatttaatgaatttactaatcactgttgtaccctttttaatcactgttttacctttctaatcattngtacacctcttctaatcacttttctacctgttctaatcatctttgtactgatt

SEQ ID NO: 43808 - DNA, 976 bp, Heterodera glycines
  unsure (1)..(976): unsure at all n locations
gtgaaaactggagaagaattgtttagccaaggcgtcagatctccccttatcggtaaaagcaaccttttttataaacaggtatagtattgctttttgttttgacaaatgaattaatatagccaaaacgtttcttcgcagaggtcgaatttagtaatttgttctccccgttcttataaaacttcgaggtttcaaaagtaattttcttagaaatttcaacatatttttccaattctttcttttttaatgtctccaaagtaattttcgataattaattaatttctgaatgtgttcaggcaatttgggctcaaaattgctttggactaatgggacatattctctaattaaaaacaacaaaaattgaataattttatgaaacattgaatcaatctcagtgcaatctgaaaagaaaaaattccagttaatcgaagaaagaacagagttaatcgctaaataattagctctacgaaaatcgaaacctttttttagaattttcttagaagtttttagcttaatttcacatgaaatactgttatgatcactaaggttaaagggagggccaacaagcacatttgatattaattgtttattatttgtaaatagaaaatcaagaaaatttcccctcttgtcggtgagataactaattgctgaaggctaaaaccatgaaggaatgataaaaaagtttttctaaagatttgtcggtcagattttttgagacatcaaaatgccattttagactaggaaagttaaaatcgccaaaaagaagacaattgtttgattgttcaattaaaagtgataatacttctaaaagttctaaaaagtcttcatatttttcttgtgttactggcctataaaccaaaattaagcgaaatttttggtcggaaaacggagaaagaatatctatacagcttatttcagcatttttgattttcggtattttgataatttcaaaanggtatctgatttgagatgatgaagg

SEQ ID NO: 43809 - DNA, 1731 bp, Heterodera glycines
  unsure (1)..(1731): unsure at all n locations
attcatggacaaaactttggagttttgccatgatcatcctccctggttgcttaagaaattttacttttttttttatttcaggttaagttttttaaaataaagaaaattataaaaagaaaatttttaaaaaagaaaaactgcaaaaattttcttttttcaatgttatataagtcatttcttttaattcttgtaaatgagatcaatgttattaaatatatcatgacatctactccttttttatattactttttttaaatttccttatttttcctttttatttgccacttaataacttattttttataaccgggttaaaaatatatacaaaattatgaaaaacaggtttacgcggccttcacaatattattcagctcttatcattgttcttctttcaaaaattttcatttttgcataatatccaagttttgctctcgcttcttattaatggaagataatcttaataatatataagaattttaagcaaatttatcatttcaaaataattgattgtaaatttaaatctttcaatattttataatatttattttaataaggtttaaatattttagtttttagatgtattaattgtttgtgctgtaataaacttactgaagccttttggctttcactttttaataaattaatttcataatgataatatttttatgaatattttattttattattttttaaatttaaatttaaactattttatcagaccaataatatatcgagcaaactaaggtttgctactttagcgaaacgataatttatgtctttttaattttaattaaaaaatgagacaaataacgaattgttttatttatatctgatataaatcaaatcacaaataaaaatgtcacaaaggtgacgatagaaaaaaagatcatgtaaatatacatgcgataataaaataaatcttaaatcagaaattataaattacaataacctnntagaaatattgcataaaatgnaaatcatagtatgaaaattggtgattaattttataaaaatttttcaagaaaatcaacacattgaatttaaatttggaggtctgtttataattgtttacgcaaaacaaaaaattcaaacaaaattaataatttatatacttaatcattgaatctataaatttgattgctcattttgtggacggttttcatttaaaaataaaatttaaattttcgcttcctttcgaatctattgcaaaattcatattaaagtacatcactttaataacgccaaacgtgaagtactctcatttcggttatcagattttttttacttcgattttattgattgggtaaagaaaatatatttattaaaaatttatattccttttaaatttttcgaaaattcgtcaactttcgtcgtaataaataatattgcaaataataatcatgccgaattggacaagcttgttcacatcgcctttgttcaaaatagggttaagccccgaccctcggggagcaaaatgtcggtgaacggggaggaaattccccgaaagaatttgtcggggatggctggaggaatttgaaaaatgtcggggtgcaacaccttcgtctgggaggaaattttcataaaaattctaaaaaaacacaaaaagaaaaagtccagaacaaaaaagtcttaaaaactcatttcaagatacttccatcttatttcaggtgcaatttacaactttcataattccccgaaacatgtcggtgcttaaccctagttcaaaacatt

SEQ ID NO: 43810 - DNA, 984 bp, Heterodera glycines
  unsure (1)..(984): unsure at all n locations
cggattcattccgcccgttaagcatttgtacagtcggcattgtttacatgatgataaatctttttaagaaaattttatttttatctaagattaatttaattttttaattactttcaatatggaagaaattctttcaaatttagcttataaaaaatgcttatccaattaattcattcaaaaaggcaaatttaaattttattattattatttatttattttaatatttatatttgcgctttatttttccctttttcacctttgcactctccgccttttttgcagttgtattccttcatcaacgaaattgtgcgacgaaaaaaatgtttacaacctgaaatttctaaggcattctaaattcttgtgtttcaatttttccaattaaatggtttaatcccaagtttaattaaaaattaaaattttattaaagaatttaattttttggaattttgtcgctttttcattttattggtccattaaattaaagttaatgcaatttaaattaaaattgaaattttattaaatagtttaatttttggaattttgtccctttttcattattggtccattaaatttaattactttcacaacatttggccccataatagaaatattggcacgggcaattgcacaccgaacattttaagagataaagtgactttttgccagtgataggattcatcttttaaaattcataaatgccatcgaattattacaaatatgaaataataattaaatttaaaataaaataaaaagtgaatagggcaaaatgaatccataatataaaaaaaatattatttgttatcttatgagagaaatggaaatggaatatggagtaaaataagctgatgtggatatcnaattgattttgtcgtgaatgaattanatganaaaaagaaatttacaaaattctacttatgggatttcttttttttaaattaagcaantttataatttaaaattataaaatattattagagaccgcgg

SEQ ID NO: 43811 - DNA, 1000 bp, Heterodera glycines
  unsure (1)..(1000): unsure at all n locations
caaaatgtgagaaaataattggaaatataattttaaaatataagaaattaaaattcaaaaggtcgaaaaataatttaaaaattcaggaaaattctgaaaaatgagaatttttgatttatataaaaaaatgatttgcctttaatacgcaaaatatttaaataatagagcagccaaatgcggcccaacaacctctgccagcagccggaggagcacagcaccaacaaactcaaaatgccaatgccgccgactcccaacggcttgtccaacggacggaatgccggaatgacattcgaaagcattgtgccaaactgttggcacagctgaaccagggcgaaatgctcactgacatggttttgaaatttttggatggttttactaattaacatattattcgttaaacaaattatgtgcaaactatttttgaaataatgtactgttttggaattaaaatgtcacagtagtcaattaaattaacggtctcttcagcaatttatttgtgaaaattgcacaccaaaattaggctaattaagctaaataatggactaatttgaaatgattatgtttttgtgtatacacctacctatccgataattaagaaggatagaataattgatattagttctcctaattccaatttttcgtgttctttaattaattaattgcattaattatatgcaaaatcggaagtttatataggtaattagcccataatttgtggccattaaggacgcattggactgtctgcaagatgccggctttagtgaaactgagagtttggaggcacaatgtgcgcaagccgtgtgggaattcaaagtcgaactgactcaggtgtggcaaatgatcagtcaatcgataactgaccgggaattatattcggctagtcgagactttttanatctctgtccaccgaattatgctacatccaattgattanataatttggacactaattggctaatatttggccaaatttgctcttctttaccagacatgcgcttcg

SEQ ID NO: 43812 - DNA, 821 bp, Heterodera glycines
caggtccatttttcggagttgtttttgtttggcctcgaaatcgatactcgtgtgtccgtccttccgtccgtccgtccgttcgttggtcggtcgccccgctttcgcttggccactcatattcccccacttaagcctccctcttcaccccccccccctccctcccttgtccccggcttcacctgtgcgctgttactgacagccgccgccgccgataagtttaggctttgtcatcggtggcaccgccagctgtatggcattccggctttaatgatagcatttgcatacgccgtcccccacgagtgggcgttacctgtgtgctactgcaaaaatgccatcatcccttctctccactggaccacccattaattgctcgattatctttcgcctctctcttctctctgcccgtctgtcctgtgctgtcattattggttttataccaattggctaatgctaatgattttgtttggaaacatgcttttgctcgtatacatattctttcgtcattgcgcatccgtttacttttccttatttttttttaattaattccctaattaatttatcttaaaagttcaactgaagtgttcggcaataattggaattgtataatttttaacttatttttattaattattttctaatgttatttatttgcttccatcttttagtttccaatcctgcattttgcttcacctgttttttgagcaaaataaaaaaaaacttcccgcaaaagcaggaatttgcgcgacacattcacattattattatgcatgagtgttattattacttataattattggatgatgatgcttatgaattatgat

SEQ ID NO: 43813 - DNA, 920 bp, Heterodera glycines
  unsure (1)..(920): unsure at all n locations
tcaactnggagcagttcaaagagaagctggaacacaccatccacggccgagaccagaggcatntggtgccctcaagggtggcatcgaaggacttaccatgcgctggctgaaaagcatggtcgacgaagtcatcaaatggtggatccgaatcgcctgtgtctactcaaccttcttgttcctgcgtgacattgtccttccatgcacactcgcctacttgttcaaccctgttcgggtcacatttctcagcttaatgggagttcgacgtcagccgcttcaaccaatgctcggcaaaacgctacgacaggaggaagtgccgcttcgagaagttctccgatcacctcagccacgcacttcaccgcaccgttctctgtcacccgtccacctggacgtgatcgctcgcagtgcccgttaccaacaaactcgagcgcaaagcgatgcaaatctggcagaagtcgacaccccgttcggacgacgaacgcgacgaagagaggagcactgaggaccacgaggatcaaggaacagacgagcccaccgagaaggaacagattagcccccacgagaacgaatgatggatgaacccgatgcctcgggaatgtcgaaattttcgtaaaatcaaaatttgattttagcgttaaaatgatgtaaaaaagggggtgataaggggatggtatgactgatcgatttccctcccgtgtttgtttgtttttaatcccttccccgcccgttcctcatcctgttcctccccaaatctccctccgccgcaaatttgccccacttttttctcccgcaatcgcaactgtgcgaaattgtacgctcatttcccccccccccaataaaaaatcgtttgttcgccaattttgccccctccaaagtctctgggaagcaatttgtagtgatcggcccattttaattgtaaattt

SEQ ID NO: 43814 - DNA, 743 bp, Heterodera glycines
  unsure (1)..(743): unsure at all n locations
aatcgatggcaaagagaacggcggcaaatttttcccctcctatggacaacaccgccccaaaaaaattcttgacttcctttgaccagcttcaaattccccccgaaattgacaacgacagcaccattcccgactacgcaaaactgcttattaagcaattgcagtcgctgttggccaccgcgtcgtctctggttcaatctcaagtgacggcgaatgacgcgattgaggaggaccgcagacaacggaccgttgtcatcaccaatgtgccggagttccaatccgggaaaggttcggaacgtggggaggcggacagagcactggtcaatttgattttggacacagtggacctcgatcaaaccccagtggtgttccgtgtcggcatgcgaacgcctaacagagcgagaccgctcaaaatggaatttcccacaaggcatgcggctcgacatgtgctcagaatgaaaggcaaggctctggctttgaatgctctacatggtgcgcggatcagggaaagcatgaccaaggagcaattggccgaacgtcggaaattaattgagcagtgcgcaaagaaaagaaaagaggacgcgggcgattggattatctacgcgaatcaggtcatcctgcgcagtgacattgacancaattcgtaaactttttaaatttttcatgtcaaatcaccccaaaatcatataaattttacaaaaaaaagttttgcttttttccgnttgggtagaaaatttttataaaaa

SEQ ID NO: 43815 - DNA, 955 bp, Heterodera glycines
  unsure (1)..(955): unsure at all n locations
atatttcaatataatttagaaacttctcgagaacgagcccaccagttcatttttgtttgagatcacgcattttacattgacatgtttaattggttgtggtggtggtgctcttttcgctgatcagcgagttttgtgcggcggcgccctgacgttttaacgctttttttttgcaccattttaggtcacaaataaattaaatgaaagagtggttttttgctgctgctactgctgctgttgcgctgatcacaatcattaatcatttattgagaatcgtcgttttgtgatcagaaattgttgtttttttcattcatcataccccccccccccctcccaattgggaaaaggaggacgagggcgaatcggagagaatatttaattaaatttcaatttaattaatttgtttttttcgttattttgaacaaataaacaaatgatgaaatttaatcaaattaagaaaaaatgatttttaaagaaacaaacacacaaacaaacaaaaacaagcacaaagattaatttgcgaaattttttttgtccaaaaataaataaaattcacatgcagaaatctgtacatacatattttcgtaactttaatgcaaataaaaatttaatttataaaaaattgcgccaagattttcctgttttaaaatttgagttttgctttttctgctttaaaatttgcctttgcttagtgttattgacggaatttgaaaaatattttggcctctcttatcataagttgctatgatgacaatcaaaagttgcacattcactttttgtctccggtattcaaaagatcgaaaaaggatgacaactagtaaaaaaaaattcccacagcattttcggctcccatggccattttcgatcagccattacaanaatgcacatattaattaagcaaaacaaacatttaaaggataaataanaccaaattttatgcaaattttacccaaataaa

SEQ ID NO: 43816 - DNA, 1027 bp, Heterodera glycines
  unsure (1)..(1027): unsure at all n locations
ctttttttttataaactgatcagaagcgacccagatttgcgaggggcatcaaaaagacaaggaaaagcactgctatgattctactcccagtaattctgaatttaaaattttntattatttttaaagcttcactattttatttttttagcaaaattaattcataaatattttttcacaaactgctctgaaacgcaccaaattttatttacaagttattttaggcactcagatgctttcactatcaaaaagggagatgaataaaaatctaaaaatttttaataattgtttgagtaccccaaacggacacttgaaaaaatcgatttttttgttttcggggcagtccccccgaaccgatgcgcccagatttatggggagaccgaatccttcgggaatagcttccctatagcctgtactttaattctgcgttggatttttgctccccataattgtttgagtaccccaaacggacacttgaaaaaatcgatttttttgttttcggggcagtccccccgaaccgatgcgcccagatttatggggagaccgaatccttccggaatagcttccctatagcctgtactttaattctgcgttggatttttgctccccataattgtttgagtaccccaaacggacacttgaaaaaatcgatttttttgttttcggggcagtccccccgaaccgatgcgcccagattaatggggagaccgaatccttccggaatagcttccctatagcctgtactttaattctgcgttggatttttgctccccataattgtttgagtaccccaaacggacacttgaaaaaatcgatttatttttgttttcggggcattccccccgaaccgatgcgcccagatttatggggagaccgaatccttcgggaatagcttccctatagtctgtactttaattctgcgttggatttttgctccccataattgtttgagtaccccaaacggacacttgaaaaaatcgatttttttgttttcggggcagtccccccgaaccgatgcgcccagatttat

SEQ ID NO: 43817 - DNA, 1165 bp, Heterodera glycines
  unsure (1)..(1165): unsure at all n locations
ggtccaacttggctttggaaatggcttgtcttctggaaacccacctaacttgtgccgcgggcggaagatttcaaagggcacgacacttcggtgaattttcggtttatttagattaagacacgatttgcattccatattttttcagtacgtcaacatcgatcatacgacaggctctcgacacttacaaagatgtccaactttctcgcggaaaagtaccaagtggtcttgaggacttcgtcaatcggattttcaatcaaaacttggagctgaaagaatattctctggttgttggcttttcctcggacacgcgaagaattgatatgattgagagaactgttaacgctgtttcgaaggacggtgggagtacaacgacaattcttatggacacattgaacaagctgtacgagtctcatttggacgtcgaatttcatgaccaagttctcgggttgataatccgttttctggagtgccaaaaagagccgaattatttcgccttatcgcaggtaaatatatgtgtggtcggctgtttgttttatcccagtgattttagtgtttggttgaacttaaaaaagctcaatcagtggccgaattgttggaccgtcttcttgtccaggcaggcgtgcctttttttgaatttaatgccctaatcaaaaagatatttttgatgtttgcagaacaacgctctgatggcgtatcagttggcatttgatctttatgaaaatgcaccgcaggagtttttgaaccaaatgaagatgcatctctttccgagcagtccatccaccgaagaaccaaagacagagacaaaaacgcctgaaaaggaaaagttggaacgaattttgagcggcgtggagaccatcaaacatcacatgcaatttctcataaagaacaatcacaccgatatgttgatattgaggcagctcaaagacgcttcacgtgtgaattgcacacataatgctgtggtaattgccaatggattaatgcattgcgggaccacttgtgatgactttctgaggtaagaatgtctattcctttacaaaagcagttacatttgaaaatttagggagaatttggattggatttcgaaggggactaattggaataaatttaatnccgtggcatcttggaagctcattcacaaggcatttttgattttatatttggttat

SEQ ID NO: 43818 - DNA, 952 bp, Heterodera glycines
gggtttgaaaagtttatggggaaaaaaagactttacaaaataatacccctgggagaagggagtgggaaacatgatttcaaaattttcaattttttctagtctaatctactcaaaccggttcagaattcaataaaaataacattcacggtgcgaaaaatggggtttgaaaagtttattggggaaaaaaagactttacaaaataatacccctgggagaagggagtgggaaacatgatttcaaaattttcaattttttctagtctaatctactcaaaacggttcagaattcaataaaaataacattcacggtgcgaaaaatggggtttgacaagtttattggggaaaaaagactttacaaaataatacccctgggagaagggagtgggaaacatgatttcaaaattttcaattttttctagtctaatctactcaaaacggttcagaattcaataaaaataacattcacggtgcgaaaaatggggtatgaaaagtttattggggaaaaaaagactttacaaaataatacccctgggagaagggagtgggaaacatgatttcaaaattttcaattttttctagtctaatctactcaaaacggttcagaattcaataaaaataacattcacggtgcgaaaaatggggtttgacaagtttattggggaaaaaaagactttacaaaataatacccctgggagaagggagtgggaaacatgatttcaaaattttcaattttttctagtctaatctactcaaaccggttcagaattcaataaaaataacattcacggtgcgaaaaatggggtttgaaaagtttattttggaaaaaagactttacaaaataatacccctgggagaagggagtgggaaacatgatttcaaaattttcaattttttctagtctaatctactcaaaacggttcagaattcgataaaaataacattcacggtgcgaa

SEQ ID NO: 43819 - DNA, 1269 bp, Heterodera glycines
cggtattgtgtttatttcctttcaattaattaatcatgtctctaataatggtcataatcacacactccattaaccatccatccctctgtttatgcatctttaccgcgccgttgtccaacagcagcagcacaaccaaagccattggcaccagcgatcgcttagcccagtgatggcggtgggcaacggaccaatgcccggcgggggtgaatctctgatgggactgagacgaagttcaggtgaaaacggggggagggggaggaagacaatttggtatttaaatgggaaaccaaaagcaattaatggggggggggggtggataagcgatgtgaaacgcataacgggacgcgtaaatggatcaaaaataatcgaattggcgaaagagtctgctgaccaaagaatgtatacattcgaaaagtaattaatcttatcgcataatgccaaccgttcattttgacaagagttgtcgtgcgagatcgatgagtccggtgtcgctgaaagcagcttcatctttgtcaagccgataaatgaaaagactcactcacaaatcttccaaagaacgcgaccttttgtatataaagtcaaaaagctacacatttcaaattgttttttttattgtttttttttgtaatttttgttgaataatcctttgatctcagcttggataatgaattttaaaaatgaaagcaattcgaagatgttttattgcctcttttctttctgttgctggcaaaacaaaaccatttgtccaatcgatccgatgcttttcccttccgttgcttcttctgatcagtgaaagcgccgctaatcgctcatttaattaacttcctctctttctactgatcttttacaaaaacacaaaagcattcattatttatttttgtttttattcatttctttcgaatttgataattttttattttatttcgttttgttttttccgctttttctttggtgtggcggacgacgaacatttccacccatctgttcttgttcttccgcagcgttctttcattgcttaaatgtggtcataaattggttgggatttttatttcgtttaattttttaactttattttaaagataaatacacaaaatatataattttcaccgaaatatttggttttaatgtcaagcaatatcaataaataaaaaaatcatttgagctttaataaaatatttatgaaaatattgttgatttatatcatttagtgattagaaatgaccaattaaaggtatctctctaatagaaatgattcatataattttgttg

SEQ ID NO: 43820 - DNA, 922 bp, Heterodera glycines
  unsure (1)..(922): unsure at all n locations
tttctgctcaacagtaataggaatcccaaccgcattctcagaataatancgccgatactaattgttctggaatttgtttctctgcgcgtttgtttgggaaaaatttggaaaattggctatctctttttctgctcaacagtaataggaattccaaccgcattctcagaataattacgccgatactaattgttctggaatttgtttctcggcgcgtttgtttgggaaaaatttggaaaattggctatctctttttctgctcaacagtaataggaattccaactgcattctcagaataattacgccgatactaattgttctggaatttgtttctcggcgcgtttgtttgggaaaaatttggaaaattggctatctcattttctgctcaacagtaataggaattccaaccgcattctcagaataattacgccgatactaattgttctggaatttgtttctcggcgcgtttgtttgggaaaaatttggaaaattggctatctctttttctgctcaacagtaataggaattccaaccgcattctcagaataattacgccgatactaattgttctggaatttgtttctcggcgcgtttgtttgggaaaaatttggaaaattggctatctctttttctgctcaacagtaataggaattccaaccgcattctcagaataattacgccgatactaattgttctggaatttgtttctcggcgcgtttgtttgggaaaaatttggaaaattggctatctctttttctgctcaacagtaataggaattccaaccgcattctcagaataattacgccgatactaattgttctggaatttgtttctctgcgcgtttgtttgggaaaaatttggaaaattggctatctctttttctgctcaacagtaataggaattccaaccgcattctcagaataat

SEQ ID NO: 43821 - DNA, 569 bp, Heterodera glycines
aatcattcgctttttgacatttcactttttggcatttcgcgtctttaaggctttattgaaaacatgaaaaaatccatgtgacgcattttgcacaacactcatttgtcagcaatgggagtgagcaaatgcttattcaattaaaagaatgggatgagcaatattttttcatttcaaaagcaattcggaaagaatgaaaagcaaaaggaaaaaatgtgaagtttgcttcatattttgttcacatattttcagcggaaattttgaaggaaaacagaaaaaacaatagcagaataaaaagagaccgactaaaaaaacaccaaaaatcgcgaaaaagccatgaaatatgcatttaattccttttattaaggatttttagagaacaaaacatgtaaaacttgattataaaagtaaaatgatggttatttaaatgattaataaaattttatataattcttttgattaaggaaatttttaaacctaaaattttttatcaagaaaaaaaaattaaattttggcaatcaatttttgagaaaattatttcaattcttggagtgtatttctgaaaatttttc

SEQ ID NO: 43822 - DNA, 758 bp, Heterodera glycines
aaatcttaattttaacaaaacatttttttaataaattatcatattttttaaattaaaaaacatttttgtttatttttagcaaatattttggggtgcattacggttccccccgaaaaattaaaaaaaaaaattataaacattttggataaaatgggtaatcgaatttaaaaaccaatttatagtgaagcttgtcgtttttacagtagaaaattagtcaaaattacattgaataaagacaaaaattttaagccgttttcaagacaaaaaccacaatttttatgtttcgatctagtaatatctagggaatttgggggttcggcgctgcctgttaaaattttttttgaaattctaaagaattttgtttttcctaagtccactctggtgcatccaaaaattttgccgggacttaatttcgccgccgaaattttttttttaattttttgtttggaatataacaatgaatgcactttatcatatgcttagggaagaggatgacaaccccaatatgaacattcacgcgtctgtgccgtattgatggtttcatcaaagaatgccagaagccactccacgaacaaagtggcatttgtattaatttaatgacttttgaatttattatagtcatactaaacctagagaaacaaaaaggaaaattgaaaataaaatgaaagactttattataagaccttcgtgctcgagagtctcggctagtaaaaatctcgggctttttgacttttagaaaaccggcgctttgtttcagt

SEQ ID NO: 43823 - DNA, 1179 bp, Heterodera glycines
tataaaaagtcaaggaaataatctgtcataattgataaatagatcaaaaaacgaaaggaatgaaaagaaaagcaatataaatgtaagtagccattagctgtagaaaatacaacagattaaatattatatatattttctaattactataaagctattgaatgttcattaaacaaataattaaaataaattttaaagttatgtaaatcatctttaagaattattgaataaatgtaataacttcgataatttgatcaacttattacaaattctgctaaccataaattaaataaaactgaaaatgatttaatattgaaataaaatatataataattaataaaagaattacaaaaataaatatttaataaatcatttaaaccgtggtgagtcgaaagacaaaaagtgcaaatttggcgaaggacaaaagtgcaaaatttgctaaatttttgactaaagcaactcataacttttcacagacacaaccgaattgcacactcttggtatcatacgatagcccttgaattgcattattagcttactaaaatcaaaaaatctattaagtttttcaaaagttctagccaaaaaaactgaaaaattgtaataacttatgaaaaacttaataaaattttttgaaatttatcaagcttataacacaattcaagggctatcgaatgataccaagattgtgcaatttggttgtgtctgcgaaaagttatgaattgttttactctcaaattttcactttttgtccttcgacatagcacccatttagacattgtgccgcaactccgttatttgaacgaaagtacgaatgacacttctgttttatttagtagcaaatttaatttctaaagaaattttatttaataaaattatttttaaagttcaaaactacagatttacaaaaaaaaagtttaagtatatttacacacagaaaatttttggttttcatatttttatgtgatgttaaatcgattggtcgaattttaaataattaattaaaattataaaattattttatttttgaagaaatttttttattatcttttaactttttaaaaatattcacattttaatgttgtcaatttattttataatttggatacattttttggtttttaaattaaatcacgttgaagtgatatatatctttactatattgtgttaatcattaattttatt

SEQ ID NO: 43824 - DNA, 1153 bp, Heterodera glycines
  unsure (1)..(1153): unsure at all n locations
ctgagcagtgatcgaatggaacagatcatgacgcatctggcgattgagtttagcggtcacaaaatggaaagtgccaactctgaatttaagattcacaatcactgacgaaattcctgaagacaaacatttaaattgggttttgtttgaattctttttgattgcgagattttgttaaatacaaagtcttcatcgccattcacaatcagccccggccatgttaagggcgtataaaaattaccgtaatcccccagccaccgtagcgaccacagtcgtaccagtcaatatcaaaatggaattgaccaactcgctcatttggcttgcccgaaccataacagagataactcgcgcaataaacaaaggcatacaaacttgagctaaatgggcattttggaaagaaaatcaaaaagaaacacagaccgatggactcagttaaaagaaaaaggaatgccaatgccaaccaccgccaataaagctcacagtaacgcgaaaggcacaaaatgagcgaccaacgggaaatgttgggtgtttttcgggaagaatttccaacgaacccttggcattccttttcagatgaagcatcgcccactctgaaaaatttattactcgcaattatatgtatttattataacctttttaatccccttgaaaaatgtctctttccttttgcatctccccgcacaagcatttcagtctttttattgtacagaattaaaaagggtatttattattttaagcacatttaaaaataaaaaagtgagcgagctttttaatcaaaatcaaaattgcaaaaaattttaaatgtttacggataattttgtcagaatcaaccattttcatcaaaaggtagatattttgtagtaaaatttagagctcgaccttgatctggatctaaattgttcgcgtgggggatcgctctgatcagtgatcatgaatctgacattatttttgaccatccctaaaaaggatgggggggggggggcggtaaataaagnnnccgcttnttcntctctcctttcnccccccgnttnntnnnnagcccnntcttcgtccctctttatgatntttnntatgtatgnttattatattttcgtgccccatttgaattggaagtttgaaaacgatttttaatataatttttgccggagcgctgcag

SEQ ID NO: 43825 - DNA, 1215 bp, Heterodera glycines
  unsure (1)..(1215): unsure at all n locations
cggcaagcattttgggatcagcacatttcaatggacaattgggatgtaaaatttattaccatttgttcctcgtccatctcggaacgcgaccgtccactcctcacaccaatcgccagttgcctttccgccctttccgttacttttgaaggcattataatacaattaccaccaattgattcaaactcaaatgcaacacgttgttcagcaaactcgaaaagggagtttaaaaaatttcaattttttatttatcatttttgataaaatttgataaataaattgaaaacaaaccgaagaatatgcatttatccgatcaaaaatgttgcaaagcaatgttgccagttgttccatcctaaagcaattgcttgtataaaatttgtttggataattaaaggagcaagggcgtagccagaactaccatactttttttttcgccaattatgggaattttgtggtccaggcaatgtcgataaacaccgcctgcaaatctgtttccatcttttaattacaaaactttttaattttttcggagggggtatgggggggggctatagctcctcgttcagtcatcgccctgacatggcccttgcagaagacgtaagaccaactttgtttttggcttcagctttaccaccagcggagcccatttgggcatggggcgaaactggtgcgaaatattgcgaattcatgggccaactaaacgatgactttcatgttgaaaaaatgcatcaaaagtttgaagaacctttaaaatgagtgggttttcatttcactttgatctgttgaatttttttgagttcatggtaaatgagacaatgtttaggaacataaaaaaagaaattggccaaaaaattttatttttaattattaaaataaatcgtaattagaataagttctgacctcatttctttgtgacttcgaaacatcaaattcaaccatatttgcagaaaaaacttttgaatgatgttcggcccaaaagggactgctgtccgaaatcagttggcgaatgatatgtcccgttcggtgttcaggataggcattgaatactcgctgtaacacatttgtacatccttaaaagggcgatatttttacttatccaaattgggtggattaggtccccctccgacggtttaatgaaaaaaaaaaaacaattgagaatttcgtatttttcaataatgttacaaattgttgaatccgnttttgcacttgttttgatcg

SEQ ID NO: 43826 - DNA, 1166 bp, Heterodera glycines
  unsure (1)..(1166): unsure at all n locations
taatgtctttgtgagttcggcacagatcgagaccgagaatagaccatggaaagagcagctcgagctctacaaaaagctgtggtcagaaaaaatcggcactttaggagcggttttattttctgagaaaattccaaatttgtagaacaatttcccttatgtgaaaaacaaattttcaatttctcttaatatctttgtgagttcggcacggatcgagaccgagaatagaccattggaaagagcagctcgagctctacaaaaagctgtggtcagaaaaaatcggcactttaggagcggttttattttctgagaaaattccaaatttgtagaacaatttcccttatttgaaaaacaaattttcaatttctcttaatatctttgtgagttcggcacggatcgagaccgagaatagaccattggaaagagcagctcgagctctacaaaaagctgtggtcagaaaaaatcggcactttaggagcggttttattttctgagaaaattccaaatttgtagaacaatttcccttatttgaaaaacaaattttcaatttctcttaatgtctttgtgagttcggcacagatcgagaccgggaatagaccattggaaagagcagctcgagctctacaaaaagctgtggtcagaaaaaatcggcactttaggagcggttttattttctgagaaaattccaaatttgtagaacaatttcccttatttgaaaaacaaattttcaatttctcttaatatctttgtgagttcggcacagatcgagaccgagaatagaccattggaaagagcagctcgagctctacaaaaagctgtggtcagaaaaaataggcactttaggagcggttttattttctgagaaaattccaaatttgtagaacaatttcccttatttgaaaaacaaattttcaatttctcttaatatctttgtgagttcggcacagatcgagaccgagaatagaccattggaaagagcagctcgagctctacaaaaagctgtggtcagaaaaaatcggcactttaggagcggttttattttctgagaaaattccaaatttgtagaacatttcccttanttgaaaaacaattttcatttctcttatgtctttgtgagtcggcacagatcgagacccggatagacattggaagagcagctcgagctctac

SEQ ID NO: 43827 - DNA, 944 bp, Heterodera glycines
tcatttgaatttcttgaatttgttggcattttaataactcccacatttttagtttgtttaattactggcgtaattacatcaaattgaatggagtcaactgcgacttggccttggtgttgtccattgcccggttttgtggtcgcttctgcatgcaacaactaaattaataaacaaatatataattaattatatccgctttaaatatatattcgactaaataaataaatatccgatataattaaaaataaattaggattaattgatttatgtattacaagtttgacaggttcatccgtggttggaatgtcaacaagtaccttgatgaaagcaggaatttaaaagtattttattcaaattctcatacttcttcctctgttcggctgtcttcaatctccacattttggcaatccaaaatttccattgtattcgctcgtacaatacaaaccttagaatgataattaaagtaattaaaatctatatctatatttttgtttaaaaatttatttaattgtttttttattcaaattaattacagataaacgggcatttccgttattccatgttctgagcttcagcgttccgtcattttgaagaacacactaaaaagcaattaatttatgtcgtttataatttaattacattccaaattaattaattattttatttatgcctgaattgtttcggacaccaaataggcgggcgcatttttgtgcaactgtgccaatgcaatatcaccatctaaaatagcgcatttaatgacaatcaataaacctatgtttaattaattaattaccaaagagtgtgttggctgcatctttttgcttttttctgacaccaatttcccatgcattaacatcgccagccaagccttcagggtttgcccatttacaaccaattgcacgctttgaaaaatcacaggacaatttcctaaggcacattaattt

SEQ ID NO: 43828 - DNA, 411 bp, Heterodera glycines
ggtgagaattgaatgaaagaaaatagtatgtctttcatagaaagaaaggatggaaaagcggccattatttttgtaacattctttattttagcaaataaatatttatttttaaataattttattctcaattaaaatgttttttgttcgatggaggcggagtgtttccctgtcccaacaattttcttctgctgctaaagcattcgcacatttcacttttaaaattgcaggtgctaaccccataaatttcatttcttattcaatttaaattttattttttatagaaaaaatcatcccagggcagaaaaatgtctgcactctattccaatacactaatccaaattgtcaaaatggtggtcagcagattcaggcaatttattatgttttatttcactaaaataaaccaaaaatttg

SEQ ID NO: 43829 - DNA, 971 bp, Heterodera glycines
tcttcggttaagcgcctctttttgattcctctggcaatcattgttttttctcctttttcctccgctcttttttccacattttgttgttgcttctcagacttctttttttcttcttcgtccttttttgccttctcttctgcttccttctgtgctttttcgtccgcttccttcgccgccttctcttccgcttccttccgtgattttcttccgcttccttccgcgtctcttcttccaatttaaatcgattagcaaatttagtcgaactatataaatttttcaaaaaatgattcatcttttttatggttagcgcatatgtctctagctttatagaaacggtccccgaatctgcgaggaactacttttttgagaatttctatagattattattttgcatgaatccttcgcttaaattcccatttatcttataaagtcagattaaattaattaccccgatttgttttagaattggtccaaacacgcttgctaatagcttttcttttcgaaaagagaggcgaggaaaaataaaggttgcatccaaatgtaatttttttttacattgaagcatttggatggcttgctgtttacagttggctaagtcttctttgcaagaagtagcacaacttttgtttgggccaacgaccccaaaccattcgaatagcaatcgattgggctgactagactgcatatttgcaggaatagcaatggcaggtctatcttaaaggcctgacgagttatgtttcgacaaacatcctgtacaccataaatcgatttgcaaatttagtcgaactatataaatttttcaaaaaatgattcatcttttttatggttagcgcatatgtctctagctttatagaaacggtccccgaatctgcgaggaactactttttagagaatttctatagattattattttgcatgaatccttcgctttaattccatttatcttataaagtcagattaaataattaccc

SEQ ID NO: 43830 - DNA, 670 bp, Heterodera glycines
ttcagtttggaaaaatatttatgttagttatattcgtccacttctagaatattcccctgaatcttggaatccacaactaaaatcgcatattatcaaaattgaaaaatgtcaaaaatatttaactcgaatcgctttcagaaaatgttgtcttccatatattccctatgaccaacggctccaattttttaaattagctactcttgaaaaacgaagaaaaatttttgacctcctaactgcttacaaaattttacatggttttacacatttggacccaaattctctgtttaaaagaactaacctaaatactcgaaataagtcatttttccggttaaatgttaaattacaatctaaaaaatcttccaaatcttttgttaacagatcagtcaaggcctggaatgcccttgataaaacgttaatgtctagctccttaaacacctttaaaaaattattagaattgactcttgattctcaaagcaccaatgtataaagcaattattaacttttgaggcatctcactgactctgacttccattttttttttttcattattgtttgttttaacctgtgatctcactcgatatttattcacttactctgagactactttactgtgaacagtcatcagagtaagtggtctccgcccttctgatggcaatttttctttatcgat

SEQ ID NO: 43831 - DNA, 1163 bp, Heterodera glycines
tccgcctgagaaagtgctcctcctcttctgctgctgctgctgctgttgatattcaattggcaattccaatataaattcgttgttttttaccttttccttggcatcatttcgctcaaatggcatttcggcccaacttttgtccttttggagttcgacgtaccgtccgaattccgacgggggtggcgaacggtgaggggacgagggactgccgagcagacggattttgtgttcgatgacgtgaggcattgaaattatacaactcgaaaaaagggtaacggtgaaagtgagaagaatgggacaaaaaatgaggtgtgagtgaatgagggaaagttgacggggcggcgagggataaataaataaatgttggcgaattttgggacggacaccgccgcccaacgcaaaacaccgaccgaactcaaagaaaagcccattgtcaacgccccctcaagcgcaacccatcgaaacgttctctttgcaccccgtctttgccttttgcattctctcccgacaatgagcagaaaatggcggaaaggtaaataaacagcggagggggaaaaaggaaaaaaggaggggaaggagcggataaaggggataaaccaaagccactggggagacaatggcattaatggggggagggggcaacggcgaagatggcacttttacaaaaaaataaaaaaggatttgtgagcaaatacatatattgtgcgtaaatgatattctcccttctaaaagcattcctttctcaatgctcgtttttttggtacagaatatgacaaattcggttccccccattttcagtgaggcaacgatttgcaattatttttggattttaataaatcaaagattattaatttagcattaatgtatccattaaaaaacacagttctttatgttatacaagacgtgacatcccttcccaaattgcatttttcgtttgtttggtccgcgtggtaaacggtcgcccaattcagataaaaattccctgtgtaaatggatcagcgcttacaaatcaggctcaatgattttgatttttcaattatttttttgtgtatttctcggtcctcttctcccctaaaattcccccccccccctttcacagttttttcccctcccccgccgtccccttttattttttgttcccccccaattcgcccccccccccc

SEQ ID NO: 43832 - DNA, 1453 bp, Heterodera glycines
acatttatttgttcggatggacgaaggagggatgaacaaaatagtgaaagcgaaggtatttcttccgctcaaataattccaagaaagaaaggcttggtgttcgcgtgggttcgattccacccgccaaggactaacatttggccatttcttgttcgattgagccttctgccctcccttccccctaaccccgcaatgcttccttttttcgggggatggcatttgttttttcatttgacttttcccccccccccctttttttttctccgcccaaattttccatttccatttctgtattgagaaacatttttacgagtccctttctcatttaatctcttcccgatttccaatttttggtcttttgttcgctaattgattgcttttccttttattgtctctcattatgccctcctctttactcggcttgtccttttcatcgtcccccgctcgtcgtcgttcaaattcgaacttccgccaccattccctcccctcccctttgacttctctctcccaaaattccgctaatttagtgcgccgtctctccaaagcgttcttccaggagaaagatgagcagcgaagcggtgagtcttttttggggaatgccaagcaaaacagagattaatttgccgactttttgaagcgaaaaggtgtaatttataatttactctctccgcctttttctttcccttcgcttttcccttttttcggtgccaatagcgcctaattcatttgctgtcgttgtccgacatttgagaaaaaagggaaaacaaaaagaaggaacagaaaggagctactgctaagggtgggaagaaataatggaaatttgggaaggattgcgaaagaaacagtaaaagtggagaaaagaatggagagacggcgagagagagagacagagagagagagagagagagatagggggcgagagagggaaaagagagcgggacagagagagagaggcgagagagagtaaaatgtgcagagacagtgccgaaagatataagcgttgaaaagtgccgttgagcttcctctcccgctcagttgcttgtgtgccaatgccaatccgtcttttttctccgtgccgtaatcgatttgagtggtgacagagaaagaaaggaaaaagggaagggaaaaggagaaaaatgcgccgggagagggaatgaatgggctaagtaagtgagttttgctgccaccgatgcatctgtcaccccatccctccgcctgccttttgaccaaattcttccaaatcgggcattccttctcattattattgctctgccgagcttttgtcggcgttgccatttcccccggcccataagccaaaaatggtgccgttgtcgccctcactttcgccgcccttggttggcactttttgttgttgttattccgcgttttgtcaatcaacaaaatgcataaaaacagagcaaaacgcaaaacgaccattccttggaatcattca

SEQ ID NO: 43833 - DNA, 1312 bp, Heterodera glycines
acgatcaagaccagtgatattccgatcatagtaaattgatcgaagattgggacaatcgatcagaaatgttgtgaaagtgcttgcgagcagtccacgcagtcgtatattgctactataaatttggaaaaattactatggatgcaaattttagataaaaatcgcaaaatgtgtacaaacaaaaaaatattaaagatttttaggtggaaaaaaagcgacaatcgatttttattgtttgacaaaataaacaaatcgaaataaatataaattattttaaaacaagattttggtcaaggaaaaattaagtcttagaagattaattttgaatttttttagtgttgaatttttaaatatttcgattcttataaatgttttttcgtctttaattgcatttttgttaagaaaattttatgaaaatactaacaaaaatgccaaaaataggtacaaaaacatattatttttgatcattattttcttaaaatttagtgatttttttgtagtgtaattccaccccccccccaccctaatgatcagagaagccaaaaaattggatgttttttttcattttttcatgtttcaattagtagagatttttcaatttttaatcaatttttaaaaattatttatttaaatttcagtattttatatataggtatatattatatatcctactgatcaatgagagatggattttcggtgatttaagagcgttttactaaaacgtacctgctatacaacttgtggatgttggtgaagccgatcagaggaagaaaattgtggatgaacagtccccaactccgctgattccccttcccgtcttccattagttgtaaagtgattcccattttgaaaagcggcataaagcgattaagcaatgagaacacagagttgtcaaagtaactgaacgtaaattcttctcattaacgccccgattcgttcttaggaaattttggatttttgccataaattagaggcattcctattttgacatttcgaaccaattcggcattttgaaaaaataccaaaaattcaatatacagaaaatcaacccataagaaaggagccctgataaatttctcaaaaagttgtaaaatgaaacaaaaaaattttttttaataaaaataatttaatattttttctttaaatacaaatcgaactttctttattgaaaacttatattacttatatttttattagtcaaagaaatgatgaaattatattcttttgtaattaaataagttaagtcatttacatcgattttaatttattttaattgaaaaaagcacattttccaaaaattttcgcttattttttt

SEQ ID NO: 43834 - DNA, 752 bp, Heterodera glycines
tgattgaaatgttggtggattgagtcccagtgattggaatgttggtggattgagtcccagtgattgaaatgcagaagaattgagtcccagtgatataatgcaggagggttgagtcctgttgattggaatgttggtgaattgagtcccagtgattggaatgctgttggaatgttggtggattgagtcccgttgattggaatgttggtggattgagtcccactgattgaaatgctgttggaatgttggtggattgagtcccagtgattggaatgctgttggaatgttagtggattgagtcccagtgattggaatgttggtggattgagtcctgttgattggaatgttggtggattgagtcccagtgattgaaatgctgttggaatgttggtggattgagtcccagtgattggaatgttggtggattgagtcccagtgattgaaatgcagaagaattgagtcccagtgatataatgcaggagggttgagtcctgttgattggaatgttggtgaattgagtcccagtgattggaatgctgttggaatgttggtggattgagtcccagtgattgaaatgttggtggattgagtcccagtgattggaatgttggtggattgagtcccagtgattgaaatgcagaacaattgagtcccagtgatattatgtaatgatgattgaggcctgttgtacgtaatgttggagaattgagtcccagtgattgcaatgctgttggaatgttgccggattgactccc

SEQ ID NO: 43835 - DNA, 1077 bp, Heterodera glycines
cccccccccctctttcgttctttcgctcctattcagccacttaacccattaatttatgcgaatggcgcaaaacttagcaattaaaagggtcagtcactcattcactgagacgccatttacttatttagaagggataaaaattaaaatggcaaaaatctccgttgcccattcaaaatgccaccattcctcccccactccttctttcccccctttccccccacctctccgccaactctccgcccattagccacactgccaatgtgccaaaatccaagaattttaagttacttgacacattcctcccatttacttgcggttgcccgggtgagtgtcgccgtaggccaacaacagaattttggggggttgggtttgtttctccggaagggtttgacctttctgccagtgagttgactttgttccgctccagctgaatgaaaaaaagctgtcacctctcgacgacgaagtaaagtgagaaaggacaaatgccaacaaaatatcagtccattgtcaaggcaaaccgtcgtcaaaatgccaaatttaaattttacatggcatttcatttcattcttttctcctcccccgccccccaaacacttcggtcgcgccattcattcagcgccatttccctttctttctgatgctcatctcaatatccaattgacttagtgcacgcgagggtaaaggtgagaacatttgggacgaggaaaagcggggggaggggggtaaagggttcaggagaagccattagcgacttggcatgggtttgggtgtggcatgggtcggctcacattcgtgtgtccccagcgtattgaatgctcacttagtgtgttttgttcagtgaatgtgtcacctttttgtgcccacatacggtaccaaaaagagcagccgaaattatggcaaattgcccaattagcacattaatagcagcgcataaatttcgtacaattgccgcttcttctttggatgggcgggggggggaaggatcgccggtcgctatttgcttttaatgccaataaaatgcttcaagtcgggatttttctcgctctctaatgggttaatggcacctgtaaaaagaaa

SEQ ID NO: 43836 - DNA, 1079 bp, Heterodera glycines
  unsure (1)..(1079): unsure at all n locations
tcagtgtgttatgtgcctgccacaacaaccgctcaacgacgcacagacgccaacacagccgttaggtcgccccacgagcgtgcaccncacattggcgcagcgaccaacaaaagcgaggcagcccgccaccgacacattgccacgcagcagccatacacaggcttacccatgtgcagcactgagcggtataccacagctcccaacgtatggaagcaccccaaaaagcatggctcgtgaggcagctgccccgtaatgttgggcagcgtccacaagtcagctcgaacgacctgtgcccgtcagcggacgggggcatttggtggtgccaacgctagcccaacaggacagcaggtaggtggtgaataggaatcacttgggtaatgatccagcagcaggttcacctacagctaccttgttacgacttttgcccggttcaagccactgcgattaaatcggttccagtctgcataccgaccgaagccggaacactaaccgtccccgaatttctcgaaatggctcagtcccgggcagcgacgggcggtgtgtacaaagggcagggacgtattcagagcgagttgatgactcgcccctacaaggaattcctcgttcacggacaataattgcaatgtccgatcccaatcacggcaaattttcaccggtttaccaacccctttcggggaaggacaagcacgctgattttgccagtgtagcgcgcgtgcagccccggacatctaagggcatcacagacctgttattgctcaatttcgtgcggctgaacaccgaaaatccctctaagaagttgtgcccacagaagcaatgagccaactatttagtaggctagagtctcgctcgttatcggaataaaccagacaaatcgctccacgaactaagaacggccatgcaccaccatccaccgaatcatgaaaaagctatcaatctgtcaatccttacggtgtccgggccgggtgagtttccccgtgttgagtcaaattaagccgcaggctccactcctggtggtgcccttccgtcaattcctttaagtttcagctttgcaaccatacttcccccggaaccggaagact

SEQ ID NO: 43837 - DNA, 1068 bp, Heterodera glycines
  unsure (1)..(1068): unsure at all n locations
aaaaatggtgtaagtaaaaatcgtaattacgctcaaaaagctcctcaaacattttagcgctccaanttccttctacaatcgcctttatacatcccattatgaacgctaaaattatcagagtgccgaaaatcgcatgtgacctaagcctagcaaaaaatggtgtaagtaaaaatcgtaattacgctcaaaaagcttctcaaacaattttagcgcttccaattccttctacaatcccctttatacatcccattatgagcgctaaaattatcagagtgccgaaaatcgcatgtgatctaagcctagcaaaaaatggtgtaagtaaaaatcgtaattacgctcaaaaagctcctcaaacaattttagcgcttccaattccttctacaatcgcctttattcatcccattatgagcgctaaaattatcagagtgccgaaaatcgcatgtgatctaagcctagcaaaaaatggtgtaagtaaaaatcgtaattacgctcaaaaagctcctcaaacaattttagcgcttccaattccttctacaatcgcctttatacatcccattatgagcgctaaaattatcagagtgccgaaaatcgcatgtgatctaagcctagcaaaaaatggtgtaagtaaaaatcgtaattacgctcaaaaagctcctcaaacaattttagcgcttccaattccttctacaatcgcctttatacatcccattatgaacgctaaaattatcagagtgccgaaaatcgcatgtgatctaagcctagcaaaaaatggtgtaagtaaaaatcgtaattacgctcaaaaaatctcctcaaacaattttagcgcttccaattccttctacaatcgcctttatacatcccattatgagcgctaaaattatcagagtgccgaaaatcgcatgtgatctaagcctagcaaaaaatggtgtaagtaaaaatcgtaattacgctcaaaaagctcctcaaacaattttagcgcttccaattccttctacaatcgcctttatacatcccattatgagcgctaaaattatcagagtgcccgaaatcgcatgtgatctaagccta

SEQ ID NO: 43838 - DNA, 936 bp, Heterodera glycines
ctatctctttttttctacaccgttgtacatgggggggtttccccaaaaacgcattactatctgcggttgagccctacaaaatgtcgggttgaaaattgctttctcagaagaatagatattctcagaaaaatggctatctctttttttctacaccgttgtacatgtggggtttccccaaaaacgcattactatctgcggttgagccctacaaaaggtcggtttgaaaattgctgtctcagaagaatagatattctcagaaaaatggctatctctttttttctacaccgttgtacatgtggggtttccccaaaaacgcattactatctgcggttgagccctacaaaatgtcgggttgaaaattgctttctcagaagaatagatattctcagaaaatggctatctctttttttctacaccgttgtacatgtggggtttccccaaaaacgcattactatctgcggttgagccctacaaaatgtcgggttgaaaattgctttctcagaagaatagatattctcagaaaaatggctatctctttttttctacaccgttgtacatgtggggtttccccaaaaacgcattactatctgcggttgagccctacaaaaggtcggtttgaaaattgctgtctcagaagaatagatattctcagaaaaagggttatctctttttttctacaccgttgtacatgggggggtttccccaaaaacgcattactatctgcggttgagccctacaaaaggtcggtttgaaaattgctgtctcagaagaatagatattctcagaaaatggctatctctttttttctacaccgttgtacatggtggggtttccccaaaaacgcattactatctgcggttgagccctacaaaaggtcggtttgaaaattgctgtctcagagaatagatattctcagaaaaatggctatctcttttt

SEQ ID NO: 43839 - DNA, 1649 bp, Heterodera glycines
gggttgaaaaagagggtgaaaaatattcttttctggggtaaattagggtcctgagcacaaatatgatgtttattttaagtttcagatttttctggaatattttaaaaattctttattttttggtaattttttggccctcgggattttggcctaatatttgaaaattcattgctcagtgaaggtttggtcaatttaagtgaattaaagctctaaaaatagagaaaaatcaggagaattttatgggatttatttgggttttctaacatcaatatgaaagaagttattccagaaattctggaaattttagatttttcagaaaataattcagaactcgcttctgaaaagtcattctgtaaaagtaataaactacaaaaatccgcaatttttttctctattatataaattttatttcacaattttatcactttcttacgaattgttacaaaaataaaagtgattttgggattcgggaccaaaggggggtgcacatgatttttgagtgaaaaaattttttcgacaaaaatcttccaaaaacatgtctttaggggttatttgtgccgctgatcacgaatacgtgatcagattttacttttgacatcgtttagacctcagaatccctgtgtgattggggattctgaggcatcatttttggggggaggaatgaggcatcacaatttgtaaattttttgtttttttttctaagcaagtcatggtttttacggcattttaaaaacgcatggtgaagtttggctgtacctgagaaggtatgcgctctctacattgcgaaacttgggcatgggccgaagccgactgagtgacgaagtgaatttattaatttttttagctttatccacgacccgaggccccggattttttttttgccattttttttaagctcaaaaccgactgtctatttccgtcgataatacccataacaaatgaacggtataaactattcaagccgacctcattaaccctattttccgactttggaatttggcaatactatcgaccctgatattctttttttggcattatgcagaccgattgcaaatgatttcaaataccattagccaaaattccggaaccccgaagaagcttcctacaaaagggcggaatgcacttaatttaaaattaaattttaatgcttttttagatgctaattggtctacgtgaaatgtcggctaaactccgttccgacatcaagcataatggtccgtgtagcattgatttatgcaaaccaattagtgtgctggtcggctcctccattagcatgcttttgtttggccacccgctgaaagaggtaaataattagcgattttctgaagcaaatatatacataactcataattgtggtttattaataaatttattaaattaataatatataattaatagagactggctggccgattcaaaagattcgatcttattgaaaaagccaaaaaaacttcaattaattcgtggtaaatttttatgcttattatttattaggaagacgtggatgattttttgaaagtcaaagcgcaaacgaccttgcttttcttgttgttctcatggtaagattttgaatatttttgaaatataaacaagcaaatgaaattgtaccgtaattagagagatacgatcgctaattacaaaaaagagac

SEQ ID NO: 43840 - DNA, 769 bp, Heterodera glycines
ttgagcaaaattatatcaaaaaatattttcatttgatggtttttttgactaacgcccattatgatggtttttgactaacgtcatagcaccgaggaggcaggggctttcctgtttttggatttatgcatatttttattccaaagtttttggattaaatatccaatttttggatttttgggtcacttagtgattttttgagctcgagatcgatgccatctcagattattcaggatttctaattttattaatttacaattttctcgaaattaagaatttacaggtctcttgaatttcacttgacagtttaaaatttgtaatttttatgctttatttgagcaaaaaaataaaaacaaaaattgtttaatggattcataaaaacagtgtcagatgctttgttacttttacaataagaaaattgtgcaacggaaagaagattactgtataataataatgatagagaattaaattttatggacatgcctagaccgtaaattgaaaatgtacaagaaaacccaggtccaggaaaaacccaagcgtatgaaggcctagtttttttatcggtattttttaaagttaagtactggaccttggacgcaattcagaagctcgaaaaggggaatttggaagtcgaaaatctgtaattcctttgcatgcgtgcataccagagtagccaaatctgctgatttatcatcattttgctgttttcaacaggtcaatggatgggttttctttgaaatgtttttaaagcgcaaaattgacctaaaaatta

SEQ ID NO: 43841 - DNA, 739 bp, Heterodera glycines
  unsure (1)..(739): unsure at all n locations
aggaatatgtgccgtggtgccccgccacatcgacggcacagcttttccccccgcccctcccnccaactccagtggcattgtgttgtgtttgtgagtgtgttattggattaggttttatgtgagcaaaatgtgccgtgccattatccgtgtccatcttccgatcctatctttgcgtcaatgttgtgctgcttttgccttccgcctccttttttgttgtgtcaacaaatcagagtatggcacgggcacacaacacaattaggccacttttttggcttgttaaggataatatatttttttgagtttacattaagcattcccgctgcttttttatgtttgtccaaaaatattcttatgaaaccggctggtaaatttttaaaattataaacaagtttaagttttccaaaaaatctattttttgagtttctgtttttaaaaaaggaggatttagagtaatagtgaaaaatagatgtgtcgtaattttaaaaatatttcggcataaaataaagaaaaaatgcattatttttgtgggtggcgtcaatggccaaattgactttgatacccaatgccgaatttttgggggaaagtggcttttaagtggttccacgcccaataataatatcaataataataatgaatgtctcaagcgagtaatacaatctttatggccgactggcaatgataatacaataatgcgaaattggaaaccattattggcaccaacctctccccaccccccccc

SEQ ID NO: 43842 - DNA, 1193 bp, Heterodera glycines
  unsure (1)..(1193): unsure at all n locations
cctcaatttttcgcctccgttctgagatacgaaagccgcatcattagagacgcgcctttgccttggccaatgtctccggcaaaaagaacaccaaaagtgccaattctgccagtgtgagtgcaattgccagtagagccggggacgggttgaactcgccactttcccgggcaccgatcgagaaaaaggcgccaatggaagggccaatcaaaaaagccagggagaaggagccaccaattaaagcctataaataaacaaagattaactagaaatagcaaaaatttaaataattgtaatttaaattaaattaaataatgtaaattaaattcaaagttcgactctctttttggcatttgctcattaactcaccatgcctttgccccgctcttccgttggcataatgtcagtgacaattgcgatcgctaccgaaaccgacgctttgcttaagcctccgatcagtcgagaaacaaagaaaattgaaaaactttcggatgacagtgaccaaagctaaatttcaagaattaatgaattaaattttaataattttattatttttacgcaatatgaaatcagtgagccaatcacagcaaccaaaagaagcgattttcgtccatgcaaatcggacaatgagccaaaaatgggcgatgagagaaactgcagaaatgagaacagcgagccgagaattccttttaattaattatttcatttttaataaaacttaaaaaatatttcgtccatttaattaattaattcgatttaattaaattgcctttttaatttttcttanattcaaaaacaaagaatgtacctccaaagaaaacaccattatttcgttcaattgaaggaacgtttagaaaagtttgaaggccatgcgcaacagaatcaaacacagcaaaaattggatcctcaaacaaattaaattataataataaaaatatttattaaaattacagatttaattttgtgtcgttttgaaaaatggtcgattagtgacggaaacaaaggcaaaatgagcgtaaatgcgagcagatcaagcaacaaaatgacggccaacagcggaaggggtttcaatgcacgcgtcagcatactgtaaaaggagggaagaacgagtagagtactgtaattcattttttgtataaattgggaagaaaatcctaaagacactgtgatgaaggaactctccaaatttacacact

SEQ ID NO: 43843 - DNA, 985 bp, Heterodera glycines
gtcattcattccattcactcatcttgattattcatttacccctctttatatttatttatttttgttagttcgacgcttagaaacggaccgatcgatttcgtcatttttatttgatcaatgaataaattatttatcataaattatttgaacaataataattgattttttccacgtatttctttggttgggaataaaaatttaaattatttaacaaataaataataaataaaataaatatttctcttttatttgctcatcaaatcatcgtcgatggcacttgtgccaacattcgcttcagctttttgttccctccaaccattgccatttcctccgacgcccttttctcttcagaagcagccgcatttgcagcaacattaaacaaatcctttaaatttatttattttaatccttttttaattatcccaaatttgactctgctcatgtcctccgcaagttttgtgatgtttttacgctgtaaaagtgcacaaattccgagcccagaaaagccaagaagaagcattgtacagccagccacgtggtaataccatccgttttgaattgcttttgcgttttgccaattctgaatgccaaaacaaaaaaagtgaaattctcccccctcccctcccctttttatgccttccctatttaccgttattagaacaataagaccactgatcagaaggatgaggccgcacacaaaaaggccggccaaaacgagaattgtctgcggggaactcggcacggatttgcgcagtcggcgatcactctcaaaaagggggggggggggagggggtgaaaacggaggcaattgaatggcatttggaattaaacgaatgccatttggaagtattttccaattaaaatgcgtttatgtacttctgtgaattgcggcatctcttcccacatcagcgaatcgtgtcgaaaaacggaataccgtcgtttcagctaccgtaattttgttcttctgagttttaattgcggacga

SEQ ID NO: 43844 - DNA, 903 bp, Heterodera glycines
  unsure (1)..(903): unsure at all n locations
ccggcccccgggtaccgtccttgcctcggctacaggtaactccgacgtgttgctccgggagtattagacgcgaattatttatttatatttttacatataattcgaaaaagaaaaacggacgacggacgaaataaggaaaaaaagcaaaaaatttcgtcggggaaatcaaaagatcgattttttattttttttataagtttaattgatttttggtttttttgagtcccgctatcgatttgcgaagtcaagtctcgagctcgggaatttttggtctcgaacagcactagtaaattggacaccggcaaaattacttatttatgatatttcagaaacagacatcaccactcattcggataaaataaacaaattgaccaatgctgttgaccaaattgaggtttcaatgatgagtgcagcagaggtgaatttaaaattaaatttcgagaccaatgcttttcatgcttattaattagcccaatgccttttaacaaacaattggataatatatacttagggttatgaaatgtaacaacccttttcagcaaagagacatctttttcattgtcataatttttatgaaattttatgaaatttttactaattttgcaggctaaaagggaacagaatgataaaaaacctcaaaaactttttttctaaaatggtattttaaaattagtggtcacttacgggttccctctacgacctaaataggtatttaattccaaaattttaaaaaatcctggcaaaaaatcgcctaaaaaataaaacaaccgaaaatacgtaaaaaaggacgacaaaaaaaacatgaattttattctgctggaaatttgttttcattaaatgagagtgatcaattanactgatcggctgattngattgattgtttactcaaaaaaatcgcattta

SEQ ID NO: 43845 - DNA, 1167 bp, Heterodera glycines
  unsure (1)..(1167): unsure at all n locations
gatcagttatgtcttgtcgcgcactgaagacgaccgtgccaaaaaaacatttcgcctccaattcatntcgtcttcctgactactcgagagtatttgggcaattcgttcgttgcaaaacctaaaaaaccaaacagaattcgacttatgcgataagcaaatttactgtagaataatacagtccctacttatacaaagtggccattgtctgagaagcttttgcaattttcatcacgcacatttgtaatgtacccaaagcataagaatctttccaaaagttgtctggacttatccctaaaaatggaaaattaaatcataaataaaattaaaggacctggtgttgcataaaggaaaaactgatggaaagatttgttcggcaaaatccaacgcatctttcccagtgaatgtttctgtgaatgttcgcaactggcgccggtgagtggacaatggcatactctcgtgaaaatttttgagggccttcctccactgaaaaggaatgttgtattaagggttaacacttaaattagtaacaaactttttttgtcgcttcaaattggtctttctttacaccgcttatcgaaggcgtatcgcaaattggtgttggcatattctcaaatataaataaagataaaaagaataggtaattaagagggtaaaagtccgatgtcctttcattctctccggttcatcaaattcaaaaaataaaatagagctcaatatttcgtttcgaaaataaattttgttcaatcttctcattgaaatattgtaataccgtgaattctctttttctgttttcttccaaatccaaatacctaaagttttgaagtcatagcaacgaagcaatatggctcttgtgcataatttcttctacaaaaataatttaaaagaaataatttattcttcgcttaaaacttcctcgcctttgggcatgttttcgtgttgcttctccaattcagtgattttttccataatttttgaaaattgatccgcaaaagcttaaaaattaaatcaattatttaatttacaaattttatttttgttttaatttctcgccgccttttgactggtcttctcgctgcttctccaaatctctggttttttccaaaatttttgacaattgatccgcagtggcttaaaaatttaatcaaataaattaacatattttatttt

SEQ ID NO: 43846 - DNA, 1172 bp, Heterodera glycines
  unsure (1)..(1172): unsure at all n locations
taaattaagggatacgaaggcggtgttccggaggaatctctcgactttttccgctcgccaatgtttttgctcagtgaacgcgctgcgtccacagaagaacccttggcgagtgaagcggcgcgtccgtctgaaaatgaacggcagcggaaggcggcggtgatcgcctgtcattatcaggtgatcaaagggaccgaaaatggcgagagaaaggcgatggcatttgttgtgggagttaaaacaaaacctgatcaggtccaaatcttcttcaacgatttgattgtttgtgcctctgatcccgtgccgctccattggccttcgttttgtgtcccatttgcccgaattttcgatttacgtgtgtttgaaagacccgagaaggtccggtgatcaagattaaattaatgttacagactaaaggttggtcttttttagattcgaattcgcctgatggagcgtctgtcacgaatggcaaaatggcaggaaattggggaagttttcttgcctttgttagctgaccataaaaccggcacttctgctgacgataatcgtaaggaagaaggatcgctggttggacttcaatttgcctccaccgtacaccggggaaggtgggactgaaaaagccgggaccaaatgggggaatgggggtggggtcagccgagagcactttttgtttttttcagtttcaaggacagtttgggctgtggcgggcaagcgccatttatgcaaggacgattattctgtgcactcaaatcaaccagtggaaaaagaggcgaaaagaatgaggaaagaaagggacaaagagaaaaggtaggaaaagggaaaagcaatgaaagagaaaatgatcagaagtcaaagggagatcggaatgaatgaaaagttgaaaagagtgattggaataaatttataaggggacaaatatttaaattcgtaaagcgcaaaaggaaacgattgaatgcatgaaaagcataaacttccaaccccttttcgttttcttccgctgtttttgctttttctcatttcccctcattcccaaaaggtcactgccaantatttgtcgtcctcttttcccttcgcttttcccccgccgtgccattctttgctcttctcaaattctctcttctgatttgcgtctgaacgcattggaaaaagcgtggattgactggagcagtcggcct

SEQ ID NO: 43847 - DNA, 978 bp, Heterodera glycines
  unsure (1)..(978): unsure at all n locations
aaaaaaaatacatttggatgcaaccttattnttcctcgcctctctttcgaaaagaaaagctattagcaagcgtgttgaccaaattctaaaacaaatcggagtaattaatataatctgactttataagataaatgggaatgtaagcgaaggattcatgcagaataataatctatataaattctctaaaaagtagttcctcgcagattcggggaccgtttctataaagctagagacatatgcgctaaccataaaaaagatgaatcattttttgaaaaatttatatagttcgactaaatttgcaaatcgatttatggtgtacaggatgtttgtcgaaacataactcgtcaggcctttaagatagacctgccattgctattcctgcaaatatgcagtctagtcagcccaatcgattgctattcgaatggtttggggtcgttggcccaaacaaaagttgtgctacttcttgcaaagaagacttagccaactgtaaacagcaagccatccaaatgcttcaatgtaaaaaaaaattacatttggatgcaacctttatttttcctcgcctctcttttcgaaaagaaaagctattagcaagcgtatttggaccaattctaaaacaaatcggggtaattaatttaatctgactttataagataaatgggaatttaagcgaaggattcatgcaaaataataatctatagaaattctctaaaaagtagttcctcgcagattcggggaccgtttctataaagctagagacatatgcgctaaccataaaaaagatgaatcattttttgaaaaatttatatagttcgactaaatttgcaaatcgatttatggtgtacaggatgtttgtcgaaacgataactcgtcaggcctttaagatagacctgccattgctattcctgcaaatatgcagtctagtcagcccaatcgattgctattagaatggtttggggtcgttggcccaaacaaaagttg

SEQ ID NO: 43848 - DNA, 1236 bp, Heterodera glycines
ctgtttttgtcataactgttacaatgttttttttgccccccaagagaaggaaaaacttataatatctatgtttagctactatataaatgaatatcccaattagaaaataaaaacaaagcgaaaccttcagtttggcaccgcctttttatagcttcaggcaaagtaaaccctaatttttttttcattcaacgggcttttgcttgtttatatccaactgttttccgcttcatcaacacaattcgatatgagaaaagtcaattgatgcagacatcgcccgatgcatcgctggtgaagtccctcctctaaagaagcccaaatatcgtgccgccgatgcgagaattcttcgacttttgcaggaatacaatgccatcaacaataacccggctatccaaaatgaccacaattaccatgccaatgttaatcccgataatatcatcaatttgctcgttggtattctcgaaattatgaaatgcgcccgtaatttttcaatgcttgttatttttttgttgttgttaacacattgataaatatgttatgttattaattttaaacattttttcggaaaaaatcagtagaatctattttggacaaaaacagcttgccgtactaaactgaccctcgtactaaaccgaccctcgtactaaaacggccgtactaaaacggccgtactaaaccggccgtactaaaccggccgtactaaactgacccggtccgtcaaaatgtcgccaagccaaaaaataatgaaaagtcgaataatgattaaaatttaagaattttagtaaatttaatgaatttatttgtaaaattttgtagatataattcacaatggatcgaaaaaagactgaaattcttcaaaaatgtcgtaaacgcaaattcttggataacaatgacagcgaaaacgaagggaattctgagcaccgcgaacaaaacgccgaaaatgatggatgcgatgacgattttgaagaagaacgcgccatcatcaacttcgaactactcaaaatggaggcatttgtctttggtctgaaggtgggaaatttgctagaaaaggatgaaaatttgtcaaaggctttcggtacacacacgaaaaaaacgaccgatggaggtgcactgtgcgtggctgccatgcccgcgtgacaattgcggacaaagtgacagcagcatgtccgggtttctcggacaaaaagagcacaatcatttacctgagcccccgaaacaaaatgttgggaggcatttaat

SEQ ID NO: 43849 - DNA, 884 bp, Heterodera glycines
  unsure (1)..(884): unsure at all n locations
tcaagggccgactcagtccacaaggatagaaaaagaaatagggattttggaaatatttttcaaatttcacgggacaaccccgtactgaaaaattccaagaaagtgtgggtttccctgatatataatttcaagggccgactcagtccacaaggatagaaaaaagaaatagggattttggaaatatttttcaaattttcacggacaaacccgtactggaaaattccaaggaagtattgggttccctgatatataatttcaagggccgactcagtccacaaggatagaaaaaagaaatagggattttggaaatatttttcaaattttcacggacaaacccgtactggaaaattccaagaaagtgttaggttccctgatatataatttcaagggccgactcagtccacaaggaagaaaaaagaaatagggattttggaaatatttttcaaattttcacggacaaacccgtactggaaaattccaaggaagtattgggttcactgctatataatttcaagggccgactcagtccacaaggatagaaaaaagaaatagggattttggaaatatttttcaaattttcacggacaaacccgttctggaaaattccaagaaagtattgggttccctgatatataatttcaagggccgactcagtccacaaggatagaaaaaagaaaatgggatttttggaaatatttttcaaattttcacggacaaacccgtactggaaaattccaaggaagtattgggttcactgctatataatttcaagggccgactcagtccacaaggatagaaaaaagaaatagggatttttggaaatatttttcaaattttcacggacaaacccgtactgngaaaattccaaggaagtattgggttca

SEQ ID NO: 43850 - DNA, 968 bp, Heterodera glycines
ctgatgtgtgatcctggccactgcggtgtttgggcgcaacatagtcccgtctcgatcgcatgcgatggggcggagacagagcgtatgcgctgagacccgaaagatggtgaactattcctgagcaggatgaagccagaggaaactctggtggaagtccgaagcgattctgacgtgcaaatcgatcgtctgacttgggtataggggcgaaagactaatcgaacccatctagtagctggttccctccgaagtttcccccaggatagctggagctcgttaagccagttatactcggtaaagcgaatgattagaggacttggggacgaaatgtccttaacctattctcaaactctaaatgggtatgaagccagggttgcttgactctgaacccaggcgttgaatgtttgagctccaagtgggcccatttttggtaagcagaactggcgatgtgggatgaaccaaacgtggagttaaggtgccaaagtgcccgctcattagaccccataaaaggtgttggttgatatagacagcaggacggtggccatggaagtcggaatccgctaaggagtgtgtaacaactcacctgccgaatcaactagccctgaaaatggatggcgctggagcgggccacctatactccaccgtcattggcttgtacacgtgcttgtcgcgtagtctggccatgacgtgtaggagggtcgtagtggttgcgttgaaggctttgggcgtgggcccggccggagcttccaccagtgcagatcttggtggtagtagcaaatattcaagtgagatccttgaagactgaagtggagaagggttccacgtgaacagcagttgaatgtgggtcagccgatcctaaggcaccggctaacgccgtaacacactacggatgacgacttttctgtgcttgcgcagttggtccatccggttgaagaaagggaagtgggttaacattcccacgccaggctagg

SEQ ID NO: 43851 - DNA, 1089 bp, Heterodera glycines
atgcgtggcaccggtgctcagttggaatgggcatgcgtggcacccgtgctcagttggaacccgagggcttggcgaatgggcatgcatggcgcccgtgagcagttggaacccaagggcttgcgaatgggcatgcgtggcacccgtgagcagtgggaatgggcatgcgtggcacccgtgagcagtggaaatgggcatgcgtggcaccggtgttcagttggaatgggcatgcgtggcgcccgtgagcagttggcatccgagggcttggcgaatgggcatgcgtggcacccgtgagcagttggaatgggcatgcgtggcacccgtgagcagttggaatgggcatgcgtggcacccgtgctcagttggaatgggcatgcgtggcacccgtgctcagttggaacccgagggcttggcgaatgggcatgcatggcgcccgtgagcagttggaacccaagggcttggcgaatgggcatgcgtggcacccgtgagcagttggaatgggcatgcgtggcactcgtgagcagttggaatgggcatgcgtggcacccgtgagcagttggaatgggcatgcgtggcacccgtgagcagttggaacccgagggcttggcttatgggcatgcgtggcacccgtgagcagttggaataggcatgcgtggcacccgtgctcagttggaatgggcatgcgtggcacccgtgctcagttggaacccgagggcttggcgaatgggcatgcgtggcacccgtgctcagttggaacccgagggcttggcgaatgggcatgcgtggcacccgtgagcagttggaatgggcatgcgtggcacccgtgagcagttggaacccgagggcttggcttatgggcatgcgtggcacccgtgctcagttggaatgggcatgcgtggcacccgtgctcagttggaacccgagggcttggcgaatgggcatgcatggcgcccgtgagcagttggaacccaagggcttggcgaatgggcatgcgtggcacccgtgagcagttggaatgcgcatgcgtggcactcgtgagcagttggaatgggcatgcgtggcacccgtgctcagttggaatgcgcatgcgtg

SEQ ID NO: 43852 - DNA, 1088 bp, Heterodera glycines
  unsure (1)..(1088): unsure at all n locations
tgtcattgtttccaaagagatttctattaccagattgcccttctaagagatagccatttttttggaccgtccataccccacatatactcaaacggcccgaaaatcatttttagagcataacaactgatgacagccactgtcattgtttccaaagagatttctattaccagattgccaaaaaaagagatagccatttttttggaccgtccataccccacatatactcaaacggcccgaaaatcatttttagagcataacaactgatgacagccactgtcattgtttccaaagagatttctattaccagattgccaaaaaaagagatagccatttttttggaccgtccataccccacatatactcaaacggcccgaaaatcatttttagagcataacaactgatgacagccactgtcattgtttccaaagagatttctattaccagattgccaaaaaaagagatagccatttttttggaccgtccatacctcacatatactcaaacggcccgaaaatcatttttagagcataacaactgatgacagccactgtcattgtttccaaagagatttctattaccagattgccaaaaaaagagatagccatttttttggaccgtccatacctcacatatactcaaacggcccgaaaatcatttttagagcataacaactgatgacagccactgtcattgtttccaaagagatttctattaccagattgccaaaaaaagagatagccatttttttggaccgtccataccccacatatactcaaacggcccgaaaatcatttttagagcataacaactgatgacagccactgtcattgtttcaaagagattctattaccagattgccaaaaaaagagatagccattnttttggaccgtccataccccacatatactccaacggcccgaaaatcatttttagagcataacaactgatgacagccactgtcattgtttccaagaganttctattaccagattgccaaaaaaagaaatagcatttttttggaccgttcatacctcactatactcaaaccgcccgaaatcctttttagaaattaacaactgatgacagcc

SEQ ID NO: 43853 - DNA, 1387 bp, Heterodera glycines
  unsure (1)..(1387): unsure at all n locations
attaaaattcggccgttagcctctcgatttaatataaattagcaggtcttttcggcccgcttccgaccttccaccgacgttcgtctcgctcaatcattttgacgtattccggtgaaatctcctggccctcctgtggttttccgtaaatcaaattcctgaaaagtttaagaattttataaattttccacccttctcgccctctgttagattttcttcacctgtagtcttgccaatcgagcaagccattcttcagctgctcctccttgtaatttttccatgtccgctcaacatcattgttctgtaaaaaaaactttattttatttttaaggattagtcagatataagaaaataaattgaaaaatttaaaaataaaaaacgaaatttataatcaaaaatttcaaattaaaaaatttcaccgaaattaattaaaataaaaaaattataaacccaagaagacagtcaaatttttcaaaaaaaaaaaaattaaaatctttcagctaagttaaaaaaaataaattccctcaagtaattaatttttttttcttanatatacgcaccacataacgcttctgcatgaaattgatgtgctcncgtagttccaactcatccacttgaccgtccgagtttaggtccatttttggcactaattttctgntaaatatttaatactttttttttgttgtaattttcgaaaattacgcgagtcgttctttgctcttctccggcgtcaactcctcgtactgtctggcctcgtccttgccaaggaactgttcatggtcatgcttcgggtcggtttccttgccactcttcaaaaatgaaaatttcttaaaaaatgttcgtaaaatattgaaaaatgtcatattaattatttaggaatttatgcaacaaactttaaatagttttaaaatttaagcgattgtttaatttaattaaattctataatatctctggttattcaattagagtaattattaattaggctcggattttgtcgaatggatgacggattcgtcatcagcgacctcgaaaaccctttgaagaataaaaatttgccatccatttttcacaagtctcaattaaaattgtcaaaatatttttttatttttcattattacctgtgaatttgtgtcgctacgttcatcgatttgttccatgtctcccagggctttgattgcgttcagtcgagttcgaatcgctcttttgtagccggtttccataagactggccaattcgagggatggtggcgtttgaagatttgaaaataactgcaacagaattaattacataataaaaaaagaatcgtctccttcgaattcattttatttgcaaatatttataatttttctgttttcacaaagttttgagtaaaaacgaacacccaattttt

SEQ ID NO: 43854 - DNA, 1246 bp, Heterodera glycines
  unsure (1)..(1246): unsure at all n locations
ctgaaatttttcaattctaaataattattacaaaaatatatttggattatatatgtgaaaatttaatttttttttaataattgtttatttatttatgaaatgagtttggtttcaattttcgcaaattaaaaatttaaaatattatttttctagttttttaagtcccacctcgcagccaatcacatattggaaaattcagaaatttaactattttatagtcctgatttttgacaattttaagaaaatctattaatcaaaaattctttaaatttttattttttactcatttcaaaaacaganttttgattcaagagaattgtcttttgagaaaattgtttaaaaatttgtatttgcatattttatgtatattttgggcctcattaggcatctatttttagggtttttttcgtgactaaaaatctcatcccatttttgctcattttataaaatgttcgagcacaaaaatttttacgtgataatgagcaattcaatgagaaagccgatagccgagctcaaattggccaacaaaatgaataagtgatagtaaaatggtaggccgaaatagctccacgttatactaattgccgaggtaattatggcgcacaaattgagcgataatggagggattagttgcttgccaatgcgaatgttctcagaaagctaaaacgggaaaggtcaatttctttaattgcttcagtacctgcttcaaaaatttttaggatgttgcttaaaatttttgaaaaagagaagcaaaaattattgatacaaaagagcaaaaaaaagaggtcgttcccgaagaaaatttttttgggggcaaatcttagaatcggagctttttatgcttttgcaaaaataaaagttgggaactctgtttaaaaaagcacaccgaaaacaaagaaaatgctttaacagaatcaattctcatttgacatttgaattgattaaattttgaaaaagagcaaatgtaccttttaaaataaaacttatttatttaatttctattttaatttaaattaaatttgaaaaattcaaaattgcctggtagcgtaatgataggctgtgttggccttcattttgcatcattttttgataaatttttaagttatagcggcaaagtttcatgaaaatggccaattccacacttcctgccaaacacttcacagctgttgtaattanattggcaagcggtcgggcactatgaggagatgtagtgaaagcaatgtaaatgcaaacggtcaactaaaac

SEQ ID NO: 43855 - DNA, 1249 bp, Heterodera glycines
atttttaattcctcttatttatttgacctatttatattttcatagggaacatgtttcgcgcattgggggcatagccagaaattatcaaataatgatgtaccgaaatgcaaaagactgtgctttttacacctgctacaaatctcgtaatgacagggacagtaatgacaacacttaattttatgtgggcagttcatttttcaatttaattttatttttggttgctatttatagaaggggtatataaagggagtgaaaggaccatttgattgatacacaaaaatgcaaaaaccgataatcgtaaatataattgctctcgctaatctcggtaccggaattaaactaaactctctgacgatcaccgaatgcgaatttaagtataaccctagaaaattcaatgccgcggttatcaaatgtacaactcctatcaaagccacggcattattatgggaatccggaaaaatgatatgtctggggacgaaaagtctgatagactgtgaaaatgctattaaaaaatttatagaaataattaagggttcggggtgtccgggggcttcttacaccggacacacggttgaaaatattgtttcgacctttaaattcggacgtgaaattgaactgaacgagtttcgaaaaaatcgtcgtgcattttatgaaccggaaatattttgtggtttaaatttcaagcggggtaaaagcatgacagcgttaattttctggaccggtaaagtcgtaattacgggaactaaaaacaattctgaaattaaggaaatgtatcatcatattctcccctatttgaaaatggctcaaaagaagttagggagacgataaaaaaattttcatttatgggacggtcccccaatttatagttctgttggctatttattttgttatcgattacttcgcgcggcgccggcattgcggcgccggacgggcggggagggaggggagaggtgataaaaaccgcacggttttggctaattttcaaaaagaatttttaatttcaggatccgaaaaatcatcataaaaaaattcaggattgagaaaataaaaccggcccaaaaggtttgggatcaaaaagatttaaatttgcaaaagaaaaaattgaatttccttcacctgtcactttggtgacaggtggatgattgatgaccttccgcggcgctgcgcggcgcggagaggggggagtgaaaaaaaatcgccagtgcggatttgaggaaataaaatctacaaggcggcagacttcaaagaa

SEQ ID NO: 43856 - DNA, 1065 bp, Heterodera glycines
  unsure (1)..(1065): unsure at all n locations
aaggaattggatgcgctaaaattggttgagaagctttttgagcgtagttacgatttttacttacaccatttttttctaggcttagatcacatgcgattttcggcactctgataattttagcgttcataatgggatgtataacggcgattgtagaaggaattggatgcgctaaaattgtttgagaagctttttgagcgtaattacgatttttacttagaccatttttttaaggcgtagatcacatgcgattttcggcactctgataattttagcgttcataatgggatgtataaaggcgattgtagaaggaattggaagcgctaaaattgtttgaggagctttttgagcgtaattacgatttttacttacaccatttttttctaggcttagatcacatgcgattttcggcactctgataattttagcgctcataatgggatgtataaaggcgattgtagaaggaattggaagcgctaaaattgtttgagaagctttttgagcgtaattacgatttttacttacaccattttttgctaggcttagatcacatgcgattttcggcactctgataattttagcgttcataatgggatgtataaaggcgattgtagaaggaattggatgcgctaaaattgtttgagaagctttttgagcgtaattacgatttttacttagaccatttttttaaggcttagatcacatgcgattttcggcactctgataattttagcgctcataatgggatgtataaaggcgattgtagaaggaattggatgcgctaaaattggttgagaagctttttgagcgtagttacgatttttacttacaccatttttttctaggcgtagatcacatgcgattttcggcactctgataattttagcgttcataatgagatgtataaaggcgattgtagaaggaattggaagcgctaaaattgtttgaggagctttttgagcgtaattacgattattacttacaccattttttgctaggcttagatcacatgcgattttcagcactctgataattntagcgctcattatgggatgtataaaggcgatt

SEQ ID NO: 43857 - DNA, 1087 bp, Heterodera glycines
  unsure (1)..(1087): unsure at all n locations
tcggcacaaagtataaattaattnaggagaaaaaactggttgcttccccgaaatctaaacccaaattacattctgttgtcccaattgttgactgtgacaaaagggtgggagattaatgaaaattgcatatatttaccaaacgcacaaataaatggcgcacatgtcttttatttctatgcttgtttaggaacagaaacatttaattgttttatttagtgtctgtattttattggaatatatcttccagaaagttaaaaaatttgaaatgtgaccggaaatgccaaaaatttcaatctttttaataattaagggaaaaaaattttcatttaaaagatttttttatttttcccatgatagtctgctaatatgaagactgatttacataaatgtgatttgtcggcacaaagtataaattaattaggagaaaaaactgttgcgaaaagaaatctaaacccaaattacattctgttgtcccaattgttgactgtgacaaaagggtgggagattaatgaaaattgcatatatttaccaaacgcacaaataaatggcgcacatgtcttttatttctatgcttgtttaggaacagaaacatttaattgttttatttagtgtctgtattttattggaatatatcttccagaaagttaaaaaatttgaaatgtgaccggaaatgccaaaaatttcaatctttttaataattaagggaaaaaaattttcatttaaaagatttttttatttttcccatgatagtctgctaatatgaagactgatttacataaatgtgatttgtcggcacaaagtataaattaattaggagaaaaaactgttgcgaaaagaaatctaaacccaaattacattctgttgtcccaattgttgactgtgacaaaagggtgggagattaatgaaaattgcatatatttaccaaacgcacaaataaatggcgcacatgtcttttattctatgcttgtttangaacagaaacatttaattgttttatttagtgtctgtatttatttggatatctcttccagaaagtaaaaaatttgaaatgtgaccggaaatgccaaaaatttcaatcttttttata

SEQ ID NO: 43858 - DNA, 1273 bp, Heterodera glycines
taatcactgttgtccctcttctaatcacttttgtacctcttctaatcacttttgtacctcttctaatcactttttacctcttctatgggaaaattttttcctccaaaattgcttaaaaatgacttttctgaggaatatgacatatatttgagatgaagaaaaaattttttgaaattccggcttttttggccactgggaatttagtgctatattcaaaaattcataactcgggatagggagggtgaatattcacaatcaaatacttagcaaatgcagaaaaatacgatgaattttatgctttttatttggtattaaaataacgaataagaaaaaagttattccaaattttctaaaaaatttcgaattttcagaaaaaaattcataactcccttcatattaggggtacaggtaaaatttaatcatccaaaaatccgtaatttttagttctacaaaaaagttattttcactatttatccatcacttcttcaaaaaaagttatcacccgaaaagttgtttcgaatttcctgacccaaggggagacccttttggttttcagatggacaaaatttttcttcaaaaatagcctgaaaattatttttctgggctatttttggccactgatcatgaatataacatttattttgagtttcatatttttcttctggcgaaaaagtggtctgatcactgttgtaccttttttagtcactgttgtacctcgtctaatcacagttgtatctcttctaatcacagttgtacctctcctaatcactgtggcccttttttcatcactgttgtacctcttctaatactgttgtacctcttctaatcactgctgtacctcttctaatcacagttgtacctcttctgatcactgttgtacctcttttaatcactgttgcacctcttctatcactgttgtaaatcatttaatcacttttgtacctcttttaatcaccgttgtacctctcctaatcactgttgtacctcttttaatcactgttgtacctcttttaatctccgttgtacctcttctaatcactgttgtacctcttcaaatcactgtcgtacctcttctaatcactgttgtacctcttctaatcacttttgtacctcttttaatcaccgttgtacctcttttaatcacttttgtacttcttctaatcacatttgtacctttttaatcaccggtgtacctcttctaatgacttttgtacctcttctgatcactgttgtacctcttctaatcactgttgtaccttttctaatcaccttt

SEQ ID NO: 43859 - DNA, 1229 bp, Heterodera glycines
cccccccgcccttcagagcacgacaaatatttcaacaaaaatttttaaaaattgactggagcaatcgaacgctaacggacgacctaatggaaaaaaatccccgaaggagagaatttaattaaatccattccttcgggggaccgtgccgggtgccgcggggtaagcagtgctggttcgtttcatcacggcaccgaaccttttggctagtcagcaatcgttgcttaacttgccagatcggacgggtgcgcatgattccactgttccaagcaccccaccaaaagcaaaacgatataaccaaaatataaggaaaaattttttaaaaaattttttctccatcttcctttttgatactaaagcatcagagtgctaaaattaagttgtaaataaaatttggtgcgctttagagcacttcctgaaaaaaatatttatgaaacaaaaaaatcgattttttcaagtgtccgtttggggtactcaaacaattatggggagcaaaaatccaacgcagaattaaagtacaggctataggaaagctactcccgaaggattcggtctccccataaatctgggcgcatcggttcggggggactgccccgaaaacaaaaaaatcgattttttcaagtgtccgtttggagtactcaaacaattatggggagcaaaaatccaacgcagaattaaagtacagactatagggaagctattcccgaaggattcggtctccccataaatctgggcgcatcggttcggggggactgccccgaaaacaaaaaaatcgattttttcaagtgtccgtttggggtactcaaacaattatggggagcaaaaatccaacgcagaattaaagtacagactatagggaagctattccggaaggattcggtctccccataaatctgggcgcatcggttcggggggactgccccgaaaacaaaaaaatcgattttttcaagtgtccgtttggggtactcaaacaattatggggagcaaaaatccaacgcagaattaaagtacagactatagggaagctattcccgaaggattcggtctccccataaatctgggcgcatcggttcggggggactgccccgaaaacaaaaaaatcgattttttcaagtgtccgtttggggtactcaaacaattatggggagcaaaaatccaacgcagaattaaagtacagactatatggaagctattccggaaggattcggtctccccataaatctgggcgcatc

SEQ ID NO: 43860 - DNA, 800 bp, Heterodera glycines
ttccttttaagcagtgccgatgattactacgcgctccgtttgctgtacaatttgcccgtcggatttgcaattgcgctgctcatttaccacttggcttggtaccggatcaacttcgccgactccattctgatcaacccgttctggaaggagttcgtcaaatggctgatgatcgtctctgccgccctgtcctattcgcttaatcccgttggtggtggtgatgttctccaacaactgatgcttgcttccacactaatggtcacttcgttttcagttggtccgtgcttctctcggctgtgccctgttcgccggactgggcagcaccgggcaggggtcagttcagtttatgggcatggtcagcacggttaccccacatttgcgccccggacatctgcgcataatgtccaaaatcggattcaaaatggttttttcaatccatgatagcctaaacagctttttcacttaaatttaatgctgttcaagacctctaagatgtaagtttgaatccaatttttgatataaacacaaatgtctgggcatgggtcggcacaacggcgcgcattcactcacaatcagtgaatgattcattccaattttcagattactgtccgtttttgtggtcgaaaacttaaacaaaggtggtgatgaacatctcatcctcattttcaacatgtttattatgtaatattcacattatttcaaaaggacccattgcgaatgtcatccaaaacttcaacatttccacgatgataacggtgtgtcacttgcagctccaagcgcgcataaccaaaagtcgaattgaa

SEQ ID NO: 43861 - DNA, 1099 bp, Heterodera glycines
  unsure (1)..(1099): unsure at all n locations
aaaaaattttaagagaatttttgattattaantttgacgtctttgaatttatttgacaaatccaagacttaaaactgggagaagcaaggggctgtggctgggggcctaaaatttgggccacattggagaattaattctgatttctgaaaaagtcccagaaataactattttttctttccataccttcttgtagagctcgagctgctctttccaatggtcttatcccggtctcgatccgtgccgaactcacaaagttatggagtgaaatgtgaaatattgttttcaccacaaggcattttttctgaaaaccggattcaaaaatctggggtttggtataaccgttttagaaatagcgtagaaaacagcttcgatatcaagaaaccaagtcaagtccagaaaggaatattttaaaacgatttcgttttgttttggcattatgataccgaataactttcggaaattatggaaacaaaattggagaaattcgaataattttttgactgcaaatttttttccttttttgaattgggttcaaaaaaattttaagagaatttttgattattaatttgaagtcttgaatttatttgacaaatccaagacttaaaactgggagaagcaaggggctgtggctgggggcctaaaatttgggccacattggagaattaattctgatttctgaaaaagtcccagaaataactattttttctttccataccttcttgtagagctcgagctgctctttccaatggtcttatcccggtctcgatccgtgccgaactcacaaagttatggagtgaaatgtgaaatattgttttcaccacaaggcattttttctgaaaaccggattcaaaaatctggggtttggtataaccgttttagaaatagcgtagaaaacagcttcgatatcaagaaaccaagtcaagtccagaaaggaatattttaaaacgatttccgtttgttttggcattatgatacccgaatacctttcggaaaattatggaaacaaaattggagaaattccaaataatttttttgactgcaaattttttttcctttttttgaattggggttcaaaaaaaattttaaagaagaatttttt

SEQ ID NO: 43862 - DNA, 964 bp, Heterodera glycines
tgtatccaacagagaagcatagaatgtcatttacggtcctcccctgactcattaaaattccaaaagccgatttgacggatcttttttctaaaaattcaacaaaaggactaactattatttcttcccgtgtatccaacaagagaagcatagaatgtcatttacggttcctgatttactcattaaaattccaaaagccgatttgacggataaaatttctaaaaattcaacaaaaggactaactattatttcttcccgtgtatcaaacaagagaagcatagaatgtcatttacggttcctgatttactcattaaaattccaaaagccgattggacggatagaatttctaaaaaaacaagagaagcagagaatgtcatttacggttcctgatttactcattaaaattccaaaagtcgatttgacggatagaatttctaaaaattcaacaaaaggactaactattatttcttcccgtgtatccaacaagagaagcatagaatgtcatttacggttactgatttactcattaaaattccaaaagccgatttgacggatagaatttctaaaaattcaacaaaaggactaactattatttcttcccgtgtatccaacaagagaaccagagaatttcatttacggttcctgatttactcattaaaattccaaaagccgatttgacggataaaatttctaaaaattcaacaaaaggactaactattatttcttcccgtgtatcaaacaagagaagcatagaatgtcatttacggttccctgatttactcattaaaattccaaaagccgattggacggaaagaatttctaaaaattcaacaaaaggactaactattaattcttaccgtgtatccaacaagagaagcatagaatgtcatttacggttactgatttactcattaaaattccaaaagccgaattggacggataaaattttctaaaaatttcaaaaaaa

SEQ ID NO: 43863 - DNA, 624 bp, Heterodera glycines
caattatcataacagttatgcatgaaaattgcgaaaagtcgaaatttttgaagttttttcttaataaaatttttccaggcttgaaaaacttttcgtttttgataaggctaatagagcatgttaagagctttcgaatgataccaagattgttggatttggatgccaaagaaaaaagcttaagtggaaaaacgagctggcgccgaaacgggagcgccgaaacacgagcgccgaaacgcgagcgccgaaacgcgtgggtcccgtaactagcgcctatttattcaaataatttaatggaccttcgctgtcttcacaattgtgtctctgtggtcgctaaattccgccccgggcgccaattgcgggtttaatgagccggatgtggcgaacaaaatggttgtgtccaaatcgccaataattccggaaacagtttgtgccgcgttgatgcacgcctgcgtgccttgggagccttcgctgagaacggcaacaatttcgcggattcgctcttggataagcaccgaatgttgtgaaagttgctgataaacgcgcttaatggagaaggaggaaagaaataaataaacactcaaaacaaaggcatggccaaaagaattttgaaattatttccaaaaa

SEQ ID NO: 43864 - DNA, 1132 bp, Heterodera glycines
ttttttagaaagaatatcgtgaaatattgaagacgcgccccggttgggtcataaaattgtgctaaattcggattcgaatttcatttgcccatccaaaaaccaatcaaaatgcttctgctgctgttattgttgtgtcaagaactttgaaaaattcaaacaccaatcgagtgcatatccgatgaaagaaaagaaaatgtttggatacaaaagctaagaaaatgaaaaaaattaaaatatttttctttaaatttattaatcaatttacacgccaaactttgagattttgattatatcactgtgaacacattaaattttctttaattgtaattaaccacaattctttgaataaccaaattttaaatgcacagaaattcaaaatgctttttaaaaatggaaattgataatctgccaattcagaataagcctttgcaatcgaaagtttgtattaaatcacgattaaattatgtgaattatttgtttcttaatctttatctggtaaaaacagtaatgatcactttacatagattttaaataaaaaaataataataaatttccctaaaatctcccaaaattcactttttaattcttttgaccctcacaaatgtgtttcctttttgccaacattgaaaacaacagtttttggcgttttgtcaccgtcgtcaacagggcttgaattttttccaaattttcaagacggatttttttattttcttcataaattcccttaactctataaatttcggctcttaatgaaatgcttaaaaaatctgcatcgactttgccaaaaattggcattttttcttcatttccgatgccaatatttggcgcacatcccccattcaaaaagtcgataattgctgtggcactcattcgtttttcagggttaatgtcgagcatattctgaaatggattgttgggtcaatttaataaacaatttaaaattataagctaattctcaaatattgaaattagaaacattattactaatatttaaaaaaaattttattttattttttattttatggaagaaaccattattaaaaagaaaacaacgttctttgaactattttttttattcttatgttgtatctttgaaaaattttgctaatcttttttatgggctgtttcgcta

SEQ ID NO: 43865 - DNA, 1044 bp, Heterodera glycines
  unsure (1)..(1044): unsure at all n locations
gcctggcagggtcaccccttcagaaatgngacccgaaaaaaaatcagaaaatacactctcctacagaattagaaaattttntctcaaannaagatcatcaaaattctatattttttttnttttaataaaaaatttaggtttaaaatttcccttaatcaaaaatgatcaaaattagacgtattcaatttttttattttgggttttcgggaataaattaagttttcagcattttggtgactattacgataagattttataagataacatttgtcaatatattttcatttaactattgtccattacgcccaaaagtaatcaaattttataatcttgatattattcatagcactaagtgttttgttttatcccgcaaaaatttataaaatacataagggttctcgaatggatattaagaattaaatttttagttgcttttatacaaaggtatagcaaaaaaattttatttatgagcaaaatattcacgcgcgctcttcgccgacaacaataataatttgataattcagtttttcgcaaataattaaaagcaatcgttttttaaagagtggccaaattgaatatgaattcctgttcgaaatttgcataaatcatgtcttcgttgttgaacagcataacgaatgggaagtagtcactgagagatgaagcatttgccaaaatgtacaagccgcccgcatctgaacaaaaaaaacataattcattttccataattataaaatggtaaattctaaaaaataaagttttttaaatttctggtggaccgaagtggcagttttttctatgaaaatttcaggaaaaatttctgaaaatttttcaactcttcaacgatttttgtaattattttttgaaatttaaaaagttgttatttttttcttgaacttgagttttcttcggaagaaatttacgtgaccggaaaatgcgtaagtgatacaaaataataatgttctgtagcattatgtactgtagtataaaagaagaattttatgagataccttctgaattctgagccccgggctcaattcaaacaaa

SEQ ID NO: 43866 - DNA, 1058 bp, Heterodera glycines
acgaaatttaataatattttagcctttttttcttcaaattttaagtcgcattattatttttgaaaaaaagatttttcaagtcactgaaaaaaaatttttttttttttgatttttaggaaatttcttttaaactttgaaggaacaaaattatgaggaaaaaattttcccacaatatgacacattcattcccaaaatacccatagtccccttagattgtctccccccccccgttaaaaaaataaaacgcacaaatcgggccttattgtagtagctgactgcggcataatacggtgccaaaattggccaaagaatggtgtatttgatggcataccaagcagcccgagtggtcagatagcggaaggcgtaataaactgaaattaaaaacggaaatcaatgtaataggtgtactatttttttccgtttatcgtcccattttacaaccatttgtgggttaattaaagttgaatccaaattaataaatgcgttgtgaaacatagtgcaaggagttgatattttttgtataaaattttgttggcaccgtctcaaaaatggttcggcgtgaaaagaaattctcttatatacaaaatttttaaaatcaaagaaaaattcattaaatcgtgaaatcaaaaaaaaaagagtcggacttaattcagaaccaaaaacatacctcgaactaacgcgtattgaacaacggtgtaggcaaaaattgcaaaaaactgcactgcataaaagaacagttgagtccatgtccattgatcaggacgacgccttaaaatgcattttccaacgtaattgatgttacaaaaattagatattataaaattgaatttttggttgaaaaccggagtttaaatcattatttaccaataattttgccatgtgccagttgggtatgtcaagaatggtggcgatgccgagcgtggtatttgggttgctggaaaacgacgacaaagccgaggatgcacgtagtcatgagagccaatgtgcggcttgtaggcggctgagtcggaataggtgtacctcgtctcatagggactaaaaaaactcgaaattaattt

SEQ ID NO: 43867 - DNA, 987 bp, Heterodera glycines
aaaaaaatccccgaaggagagaattaaattaaatccattccttcgggggaccgtgccgggtgccgcggggtaagcagtgctggttcgtttcatcacggcaccgaaccttttggctagtcagcaatcgttgcttaacttgccagatcggacgggtgcgcatgattccactgttccaagcaccccaccaaaagcaaaacgatataaccaaaatataaggaaaaattttttaaaaaattttttctccatcttcctttttgatactaaagcatcagagtgctaaaattaagttgtaaataaaatttggtgcgctttagagcactttctgaaaaaaatatttatgaaacaaaaaaatcgattttttcaagtgtccgtttggggtactcaaacatttatggggagcaaaaatccaacgcagaattaaagtacaggctatagggaagctattcccgaaggattcggtctccccataaatctgggcgcatcggttcggggggactgccccgaaaacaaaaaaatcgattttttcaagtgtccgtttggggtactcaaacaattatggggagcaaaaatccaacgcagaattaaagtacaggctatagggaagctattcccgaaggattcggtctccccataaatctgggcgcatcggttcggggggactgccccgaaaacaaaaaaatcgattttttcaagtgtccgtttggggtactcaaacaattatggggagcaaaaatccaacgcagaattaaagtacaggctatagggaagctattcccgaaggattcggtctccccataaatctgggcgcatcggttcggggggactgccccgaaaacaaaaaaatcgattttttcaagtgtccgtttggggtactcaaacaattatggggagcaaaaatccaacgcagaattaaagtacaggctatagggaagctattcccgaaggattcggtctcccataaatctgggcgcatcggttcggggggac

SEQ ID NO: 43868 - DNA, 1663 bp, Heterodera glycines
ttcggttccccgaattcgaatttgcaattgggcggataaacttccgcctgaataatcgaattttcactgtcgaaaacgatttctgctgactctacggtcgcaatttccgttttttcatcgatttgtgccaaaaatgccgacaaatttgtgatttgggcgaccactttgccgttttcaacttttcccactgattcttccactttaacatttcctttcacagtttggggagaaatgaccacatcttttccattccactgatcaccaacaccaatttcgatgaggcgggttgagcggggttgaatttttgtagaaaaaataacccgagcagaattgctatcattttgggatatttcctcaaattcaatcatttctttgttcgctgtgtcgtacagaagaaatcctaattttgaaagtgaattggtgccaagaagcaagtcgtagccaaattgtgcggatgttatgtgaaagcagatcggtatttgactgcaaccttttcgtgtgatcggaattgttaccactccaaaacatttcaattgttgcccatttacatcggcaattcgtgctgacgttcgagagaagtccgatttcttgaggtctaagcctcgttctttgatcaattcatacagaaatcctgctccaatcagtgaaatttgggctcccccatctaacattgctaccgtttgggtgccgtatgtctctacgttagtcaccaaaatttttccgacccggtcctttcctttagacatttcagtctgcgttgcttcaccaagttcattttcgatgaaactcgaaatttcggatgtcaatttcactcctcggcaaaatgcatcggggggtttgtcctcttgcatcactatgcaattttgtttgaggaaattttgggattttacagccggatatgttcttatggcatttcgctgattgtatgcattgtttcgcagtgaaatgttatttgctcccgtagcaaattgttgcctactcctatctgctacggtgtttacgtctcgctgtagcgatcactctttgacattcatgcgatatatgacctggttagttgcaaatatagcatacaactccctttcgtgtttgctggggagtgatttggtatcgtcctctttggagtataatcgggttattacaattgtaaaagtctaggtttggattgtggggagttggggggtgggtgacggacgatcgttgcgctggtccaaaaacaatagtttgggatggctttgagtcgaattgacctaaagggtttttcgggcatcgcgtggcactgagttgtaacgtcatctattcatatctctttggtcctatttaaagtgtaatatgcgatattttttaattaacaaccaattaaaaattgggttattgatttattcttttgtgccaaaaatgattgtctttgtgattctttttgtttatttttattttttgtcattttacagtgcatcttttgtaatcctgctattgctagtcattcaatttcttctactgttcttccattggctggtgccctcgtatctaatggaggggaccatctcctacaacaatcgtgtgtgattttgtagaaaactcccaaaacttttgactccaacgtggagatgtgttgtggtatctgaggcgcttttccgtgtgcccttaaaaattccagagaatcttt

SEQ ID NO: 43869 - DNA, 859 bp, Heterodera glycines
ttattttcaattttttggtttgtatactcgtgccgcacctctaaagaaaatacgattcctcatagttttttttttaaatcgatacatattttatcattttttaaatgaaaatcctaccaattgagcttaataatcgcaaaaaccaacctttttcgttgaaaatctcgttaacaaattgcacccaaatttttaaaatttcccccggcggcgcctatcggcaccgccggaccccttctttcccaaaagttttttgaaaaagcgctccgaaaaaaagtgatgtgaaaatcaaatctgaatttctattaatattcgatgatttagtccaaaaatgattaattgtttgaaataattgaagaaaatttgtttgaaaattttcattaatttaatttattataaaaaaccaaataattttgtattattttcacttgatataaattaatatttgaatttttttttaaatttttaaaattttttgaatttttaaaatttcccccggcggcgcctatcgggaccgccttacaccttctttcccaaaagttttttgaaaaagcgctccgaaaaaagtgatgtgaaaatcaaatctgaatttctattaatattcgatgatttagtccaaaaatgattaattaagtcctatgccgttcttggcactgtgccacgcggagaggcggagaaaactccaaaatttgaatcaagcacctctcgcgtgccattccgatctcgtgccggaactgctacgactgttacagctgctgatgcaatggaactgcatgggagtgttctcgagatgcaatatgaaacaaatgacaaacaaactagaaatttttaaaaaattagaggaagtgattgacgatgttaa

SEQ ID NO: 43870 - DNA, 763 bp, Heterodera glycines
ccacaattacaacttgattaactaccgatatcattaaaaacatatatattaaaataactggtgcgtgaactgtcggatctgcgaatgtgataaagcgcttcgcgcttcttgagcttcgctacctaggctgtgaagcaattcaaattgatcgaattggttggagagatttttttgaatttttaaaaaaattattaggagtttttagtccacatcgaggctcaagacgggcgcttcgcgcccgttttttaaatttgttaaactcatacgggtgcttcgcgcccgttttttttagcttgttaggccacttcgcggcctcagtcgggcgctttttagaaatattttcctaaaagcatgtcatgccggaaacttcttttctaattttatacattacatttttattgccttctttattcaatactaatcttttaattaagaatggatctgacacctgaacaagaacgcgagttgtataacgcctactatcgtcccaatgtcccggaggacctcaccgaagcagaactgtcgcatgaaactcatttggaggcgtttaatcgagcaatgtaaatgcgtcttgcattgtctacaacatatttgaatgccgcgccacaggacatcaccattactctaccattcacaccggaagtaatcagaaataaaaccatttttatgccttcgagctgcgattttttaagcatttaacaccataaattgaaaaattgagccatataattgagtacttttacgcttacgccaacataaattt

SEQ ID NO: 43871 - DNA, 1001 bp, Heterodera glycines
  unsure (1)..(1001): unsure at all n locations
tctttaaccggtttggccttcattttctgtctttgctccaccgatttttcgtcacttttattttctgtggccaaacaaatctttgggagacctaaaaagaatttttattcataaaatgcataggtatttggtaattccattaaaaaatgcgtttcgcctttttcattttcctgctccaactctttggcactggtgttttgctggtcgccgcagtccaagcggaaatggcattttcgggcgaagatccgccgatttcaaagagaattgagtaaacaaaactgattaatggctttaaatcaggaatcacacggacggcccatgcaattctcataaaacccataaaattttatggcatcgccaattggcacacttttgctgatatttttaagtttctctgttttttttaatgtctatttttaaatgctaaataaaaatgggatttaccagcagagaacggcaaagacgcgggcacaaactgtcgggagcgattgctggcggactgatcggaacgggcgccgccgttggactgaacgcataccaaaagaacaaagcgaagaacggctaatgagagacataagacaaagaaaagaaagagagtactgtatgggtacggtatggacggattaattacaatgatcgatattcaaccaattagccaattactaagcaacgaaacaattgtcataatgacatttcctgaaataaaacaaatggaccaatttaattgctatacaaaataagccctttaattgaatttatctttgaaaaaggtagaaagtctgctttaataatacccaatttcactaattgcccctgaactgacctcttcttcttctgtctgaatcaaagttgtttcacagctttccgatcaggtggcgattggggctaaatttcagcgccaaatgcattgattttattanattgtnncggtatagttttttggatttatcatttttanaataatggaaatgatacaaattattgaaaaataaaattgaacc

SEQ ID NO: 43872 - DNA, 1303 bp, Heterodera glycines
aaattccgaaatgttcaatcaattggtcaccctcaccactcatccattgatgtacgtccggaatgtattcttcgcttgtgtcgttgcagccttcgccgcggcagatccactgacgagggataagagtcattttcagaaacaatttcaataaagaaaagttttattaaattttctgtaagagaaaaatgcgtcaattttcgctacttaaaaatctcatcaaatgggtcagcctgcgaaagaagttgtgtgatttttcgtgcatttttgttgtttttttaaatttttggtgtgtgacttcaaaaacaggaaggattccaattttcaagccaaaattcttgagagaaaagtgctgacagaagaggaaaatgggggaaatagcacaaaacataaatccaagtacgttcagaccagtctaatttatacattaccgtatatactctttttatatgccatggtatattatttttcaacctcttcagaaaggggtatataattggaggccggcagattaatatggagactggcatataaaaagagtatatacggtatatgtcgggatgtgacggggggtcagtggcaaaactcatacaaaagtcaactcaatattttaaatattttacaaaataatgcctacgcttctacctaagcctagtctaaagctaagcaattgtacgacttgtctttttgtacgagtttgtcatgacactgtggcgacataccgatttcagtgattgtaacaattttactaaattttctgtaaaaaaaacctttggagaagagacagacacacaaataaaataaaagcacaataaatccattttcggatggaatagaaaattttcacagagaaaaaaatggtggaataaatgcaagtacttcatgaagcatgaccaagtgtggtttatatgtctacatatgtatttgtggttttgatgtgtctttaggaaattttgtttttgtgggtctttgacaaaatactaaaaaaaaaatgcacttaaatttcgtttcggactcaatgcacttaaccaagaaatcggtatggtttttccaatcaaaagccatcctcagtttcttaagccataactttttttttcttactttgtccaaggctacatttagaacaaaagagtcaggcttaaaagcggccctgaactgaccaaatatgcttttcgactttttgctcgaattcgggttagacataggtcaaaattaatgtcatattcgtattctccgaccacccgtactattaccaaaagtgcaacagagtggacagaaacaatgtttgttattcagtatatttaca

SEQ ID NO: 43873 - DNA, 1457 bp, Heterodera glycines
tttgatgcaatggttccgttttgactccaaaaatgaaaaacttctaaatggtaaaaaagtgctaattagtgcttaattgtccttccatgctaatactttaatttaatttactaattagcatctgctaattgttctgctgttgtggaggtccccgatgttgatccatcagcattcaaagtgatgctgggctttgtttacgcggacgatttgagcgaattgaacggagacaatgcaatggaagtgctttatgccggtgaatttattattttttaaaaatttaattgaaaattgtgttagccaaaaagtataacatcactggcctgatcggcccacctttacaaattcccatctccgaattgcgcaatgttttcttagcctatgcccaggctctcctcttcgaattagatgtgagaaggtcaaaataaatttaattttattatttttagattttctgaagatccaaatatttttttttgtataattttctgtaattaatacatttaaggattttgtcagcgaatgtttgcggtacatttgtcaaaatgcagccaaattgttcaaatcaactgattttttgcaaattgatcaggaaatgttgtgctatttttttgaacgcgatcagttgttgatcagcaatgaatgtgaactttggaaagctgtaattttaattaaattttgcattttattttgtttttcatttttgctttaggcacttcgttgggccgacgaaaaatgccgacaaaatggtgttgaatgctcaccggaaaatcttcgtgccgtcctcggcccggcattgttcaaaatacatttgccaaacttccatgaagcggatttttcaaaatacgttggtaaaaatgtttgaaatcggataattgaaagtttttaagctcggaattaatttccttttaatgtttgaaattaatccaacttttttaaaaaaataaaattattttttctgcatcgactattttgttgtacatcgatgaaaattttcgctgcgattttaaaaaaatctttggaaatacgtagggaccaagaaaaaatgtaatttattaccaagttttaccccaaaaaattaaggatttttggttttcaaatatttttgtggcaaatgaagagacctgactgtcccacgttttcagctaggagttgtagagggtcttggaggggttggtacgaacatggaaaaaccaaaattttcaacaagaattgaaatttaggttagaaatatcagaattgaaatagatgacagattcgtgatcagcgacaaaaactttttttcattttcaagaaattaaatactcccaaaattgaaattagtgaatgtaagctgatgcaaggcgatctgtttcaattggagaattttattttgtcctagaagtcccaaaccaagtggaaacttttttcttgcttctctgcacgtagtgagaattggcacaaaaatcgctattttaata

SEQ ID NO: 43874 - DNA, 1840 bp, Heterodera glycines
  unsure (1)..(1840): unsure at all n locations
caatttttcgggccacgaatccgcttttaagctgccacttttcaatcctgaattctgtttggccggctgtgttctttttttaattggacgactggtgacccgcatttggttgacttgtacgtcattggttgctcctccgtaaaatcttccatttcagcactttattgccgagtattattcgcttttacgggggttggtggttctttttagactgtttcaattatcatggctaatatatttttaggcgacgtcgaatcgaacaatccccgtggcattcctgaggtagattgcctgctttataaatgatcagttttgcttgttttagcgtgttacgcacatcatttgttcaaattgggtagaaaatgaggcgctgattttacaggcgctgacgactgtttgttattttttgtcgaatagttttgaaaattatgtaagttcagaatttcgccgaacggatgccacgcaaaatgaaaaggatcgtttccctcaattggcttaacgacgcaattgcaaagagacaagtgactgcgccaagtaaagcttgccatttgccgaggtaatcaattttttgtttatacaatttaccattttttttttttgttaatagcatttggagttcaacacgatacaatccaaaaacatttgcaaaagtaagtggatttcactagcatataactgtaagcaaaacaattggtgtggagaagtttccgaaacgtcgtcggctgaaacgtcatcgtgacaaaacgtcgttgtgccgaaaaattcccaaaaagttcgaatactttggttgaaagctctccatatgatttattagggttcgagccccgcccccgcccccgggggcgggacaggttttttgggctcacccccgcccccgtgactctgacccccgcaacccccgcccccgcgaccttcacccccgcgggggcacgggggtgaaaatacacccctaagaatggcatattcgtgggaaataaggcaaaaaatttagacaattttgaatttttttttagctatcttgagaaattttaagaactaaaataaattttatttgttttttattttatttgtggattggtggatagtgcttcaatactaacagtacttttgtcatgagttcgattccggctaacgttttcctttaatttatttattttttctgattaatacagggtttctttatgttcttgtttctaagaaatgttctgatttgggggtaatgccttattttcatctaaagaagaaaatttctgaaaaatttggctaatttctaacaaaattcatataaattcttaaatttntcccggcggcgcctatcggcaccgccggcccccaaaattcctatattttttcttaaaaattatcccaagctcgcgaattttgctcattttttgtacaaaatttgttaacaaattgcattcaaattttcaaaaaattttcccgtctcccactcccttctcccaagggtattattttgtaaagtctttttttccccaataaacttttcaaaccccatttttcgcatcgtgaatgttatttttatcgaattctgaaccgttttgagtatattagactagaaaaaattgagaaattttgaaatcatgtttcccactcccttctcccaggggtattattttgcaaagtcttttttgtccaataaacttttcaaaccccatttttcgcaccgtgtatgttatttttattgcattctgaaccggattgagtagattagactagaaaaaattgaaaattttgaaatcatgtttcccactcccttctcccaggggtattattttgtaaagtctttttttccccaataaacttgtaaaaccccattttt

SEQ ID NO: 43875 - DNA, 745 bp, Heterodera glycines
  unsure (1)..(745): unsure at all n locations
gttgatgcgcgaattttcaaaattgctttttatgtaacagagagagagaaaggaatttggtgggggggggcgaagggatcgcatttgggagtgatttgatcctctctctcaccaccttatccaagatgttcgttcataatttttggaattgtgcccttcccattatcgtacatgcgataacacaaccccctaatcttatgggggtcaaacaatgcgacgaatgcaaaagtggggagaaagaagggattagcaaattgggggggggggggggggagggaatgggcgaaggactgacttatgggggacaaaggatttgagttgcattaatttactgaactgcgagggcaaacggagacagcagagtttggcaacacccattcaaagagataaaacagactgatgaatgaaattgaaggcaaaattcgattaataaccttttttattgggggaaagaaaaacgcaatgctcgcaaattgtcatggtaatttctaacaaataagagaagtgatcggaaatttgaaattttgcagatattagctttttataagatattttagtgtaacatttcaagtaattttaataattacgaactgaataagaaatcggctttttcaatttaattataatcaaaatttgttaattaaaaacatttacaattattagcaatagtaattacttattgaatataaaaatggtcgcatattctccanatttcaaacctatttgtttcccccattgacctgca

SEQ ID NO: 43876 - DNA, 911 bp, Heterodera glycines
cttgaccaaaaaatagctatctcttttttctcatttttttaccgcaaacttggtaccaacagttgccttcttttgtctggccttatcaaacaatcttacgatatttgaaacgcaaacaaaaaaaattcttgaccaaaaaatggctatctcttttttctcatttttttaccacaaacttggtaccaacagttgccttctcttgtctggccctatcaaacaatcttacgatatttgaaacgcaaacaaaaaaaattcttgaccaaaaaatgtctatctcttttttctcatttttttaccgcaaaattggtaccaacagttgccttctcttgtctggccctatcaaacaatcttacgatatttgaaacgcaaacaaaaaaaattcttgaccaaaaatggttatctcttttttctcatttttttaccgcaaaattggtaccaacagttgccttctcttgtctggccctatcaaacaatcttacgatatttgaaacgcaaacaaaaaaaattcttgaccaaaaaatagctatctcttttttctcatttttttaccgcaaacttggtaccaacagttgccttctcttgtctggccctatcaaacaatcttacgatatttgaaacgcaaacaaaaaaaattcttgaccaaaaaatagctatctcttttttctcatttttttaccgcaaacttgctaccaacagttgccttctcttgtctggccctatcaaacatcttttttttgaattttttacggaaaaaattggtaccaaaaatctatctcttttttctcatttttttaccgcaataacagttgccttctcttgtctggccctatcgaacaatcttacgatatttgaaacgcaaacgaaaaaaattcttgaccaaaaatatggctatctcttttttctcgtttttt

SEQ ID NO: 43877 - DNA, 935 bp, Heterodera glycines
  unsure (1)..(935): unsure at all n locations
aaaaattttttgcctaaattttatattatattgttgaattgttgnaaatgcatctgttgtctgccgttttgaaatttttcaacttttcgcgaaaagatttcccagaaaatgcatgggacaaataaaaattaaacttctattatgatcaatttaaatttcctatcagtttcgggtttgctttaaacacgctggcctatgaaaaaatggagttttatggatgtcaaattttgggacttttcttcgacgtggccatcagcgggttgtttcgtgacaaaaacaaacagagtttgatgttattcgaatgagctagacgcgctctacatttcaaatgtatcaacaaagggtctaccgccactccctggcgagatatggcctgtcaaagcagaacggggccaataaatttgaatttttgttaatcttcggcagttgcctttatttcgagcctactctacttgtgcatcttttcccaatatggcactgcttccgaattattgaactgtttcacgactgattgttgagataatttttttttccgattcctttatctccaagcatgagccttataagtgattgttcatatccttctcttgaaaaaaattgtcagtaaaaaaaacacgttttctgaatattaacaacaaaaatttttagacagtttctaaagaggaaggaaaaaaatttttcatttgcctaatatttatttatactgttgaactgttggaaatgcagctgatgccgtcggaaaagctccgattttttggggaagtttttttctttcagtttcaccactgattgttgaggcaatttttttcgccaatttcttttgtctacaaacattatttattgcgtttcatcctgtagtgtgtaaaaaattttcagtaaaaaaaacttgttatatgaatatttacaagcanaaatttaagaccatttccaaagag

SEQ ID NO: 43878 - DNA, 1595 bp, Heterodera glycines
catatggtcccaatgaaaaccaaaatgatcaagatttgatcaatcattacgtgcacttcaatatggaattgacatgaaaggcttcgaaaaaggaattaataatgaatatcaatcaattcttattctataaaccacataaatttattttaatcagaacgcaaatgtcttttttcgctgtacggcgcaaatgtcgcggcgcaaatgtcgtttttgttaggcggcgcaagtgtcgcggcgcaaataacacggcgcaaatgtccgcgtcgcaagagtcttttttgctgagcggcgcaagtgtcgcggcgcaaatggcgcggcgcaaatgtctgcggcgtaaaagtcggctaaccgaaatttttagaaaaagagcgaaaagcaacgaaattgaatattcgtaaaaaggttagtgttgaaattgccttttaaaacagaagcaaaaccagggattaagctacattttgaaagtgtaattctttaattttgagacgaattttgaacttttgatatttcttgtataatcaatcctgcatggacagatcaaaattattctgggtttagttatcactaaaaatatcattcagaaatgttcacacccaaataaaataaaaatattttagtatttggtcaatttttaatgttcgacaataaattagttgacacccaaaaaaaagaaaaattttttgattttggataaacactttcattatcaatacaaattaaactgtaatagctaaataaaatgtattaatgctgttgccagcaatgcttaattctcgagatttattcaaggttcaaacaccatcagtcaagtgtataaaatgcgggaacttgtgttgtaagaaaattgattgcgctccatcttttacaaaaaatggtcacaccgcacattgctgtaagaattgctggaattcgcctaaaaaatgaattttcaactcctggagtattgcttggaacatttgcgtgttcgtatccaattcactatttttttaggaatttcacattctcgggattatttatgctgtgttaacttttctgtcaacaacatttttgtgtaggatttataaaacattgcttaattgatttattttgtttatcagcatgtgtgtttaaatttggttaaatgccgactatgattaatggggatttttgaagtataattttaatacatattgctgttttgaaatttttttaataatgagatgagggaaaaatcaaaatgcaataaaaattgatgaatttttctaattttttcataaaaacacattgttttttttttagtttttcacaataattttaatatttgtctctatttggtcatattttttttatttttcatgattaaaaatcctcggtctattaatagttaaattggtcaattcaaaaatattacttacgttcaagccaatatttcttttccattcattcacgaaatttctttttacaaaagcgagccccaaagtaagctttttaaaaaaaggttggggaagagaattcaaattaatctaaatttaatttaaattatttcactaagatccgtactgatgtggccgctctcttttgttaaaattgcacttttcgtgatacgcccttttttt

SEQ ID NO: 43879 - DNA, 914 bp, Heterodera glycines
  unsure (1)..(914): unsure at all n locations
cgtgttggaacacattgagagtcataggttaaaagggaataccgtacatcgggaaatttcgttttaatattcactaattgcctctttttaactctgcctgattctccacccgaaattttctgttttaatatttcactaattgcctctttttacctctgcctgattttccacccgaaattggctgttcggtgccattccaaaaatgtaattggttccatgagtgtccaatgctcccggatagcacatcagcaaactaataccgaaaatataattaataattttttaaaatttttttttaattacccatttaagcattttccgttcaatttgaatttcagcgtgaaggaattgatctgtctttggcgcgactcgcgcctgagacattggtccatcgcattgtattccacttcgatgctgcttaggccaggctcgctcaaataaacgctgaaaaagagttttctaatttaaataaaaaagtaatcgatagtttttacatctttcctaattagcccaggcctggatttttccttgattttggtccaacaaatccaggcctagatcaaatatgaaaaaccccaggtccagcccaggcttttttttcaaaatctcgagctttagttaatatacattaaaacatttgttcaaattccttaatgagacattttatttttgtgaggggcagcagcggtgacactttggcacaaaaagcggcacaaaacagcgaaaatgccaaagaaaaattgagcgtttgccatcatctacgaatgcgaaaaactgcttgttaatttactattaatggacaaagacaggacaaattgttggatttgacaattgataagactttttgtcccccaacttttaattgttttttaatcagagaannatatttgcaggaccnntgcaggcccatgcaa

SEQ ID NO: 43880 - DNA, 1201 bp, Heterodera glycines
  unsure (1)..(1201): unsure at all n locations
caatgaatgtcatttattcgttatttacttaaaattaacaacttgttaaaaatntacaaacaaaaagcgatacacaataattggccaaattcacccaaaggttggcaaatatttcgatcggacgcccaccgggcgggagccatgagcacttttggcaccattcggttgaattggtgaagaccacggggcggaagaaggagggagggaatgggacggaatggcaacggcactttcttttgaagaagcgcacggtgagcaggaaaatgcccagcaggagacgcgcggacttccgtactccgccggagtttttacgtaaatttcggcaacttaaatcggatttccttttctgctgatgaactgatcgatggcttcctcccccttttcaaactcacaatttgcccgatcgcttccttttctcctctcaaataaataactgtccttgcgatattcgttctctgcccaaaattcggtgccttcgatcagataattcttatcaaagtgattggattcgtatgctgaaaaaatcaaaacattactttctgtttcatttgcatttttattttttcgcacttcgatttttgcctttcttccgtgacgtcattccgtaatcaaacggagccgaatttgaagtggagtaattagtgcccattttggaattgaacggctaaattgagggaaaagaaaacgaggccaaatggcaatggcgcgaacaaagaattcgatctgatagtcgatcgactgcatggacacagacaaaaattaacaataatttgcagttttttgattggtttccccgaaatacagagacattattaaacattggatatgaaaaagtcgttgagatgctcaatcttttgccacctgctgcttatttcgactatttctttatgattcgaattttaaatattttgtgttttgggtattacaatttttcggtttttattgagcacgcatggaaagtgaagaaagaagctaacacagccaaagaaatattagtggaaaagggaaaaagaagagggaggagggagcaattgagggggggggggaaagtggggacatttgtcgacgagtgggcggtggccgaattgaatttatccaaggcaaattatttgcaaaaaaatgaattgcttttcgttttgatgagaggccttcattataaattggagaaccccaaatgggttagaaactaataattagagca

SEQ ID NO: 43881 - DNA, 891 bp, Heterodera glycines
  unsure (1)..(891): unsure at all n locations
tggggaacaaggaaaggtgccacccggtgccggcataaaaaaggcacgtggcttaaattcaatataaatatttttaaatgaaagaattattttatatntattgttcataaatcaaaattttctatttataagaaaatatatctactatttataatttttaaatcaacgataaagaaaaattccatgttcttatgacaataatatgtcaagaatgatggaataaaattaagttaaaaaaacgcgcaacaatcatttttggttttaatagattataatggattgtttttattctttctttgtatttttaatttatttgttttccaataattattatattttgttaatttattcttttattttaataatttagagatttcttccaaataaataacattggtagatttatgctttttagtcacaaaatttaaaaatctttttgttgacgtactttcaccgttttaaattctttcatacttaataattgttttcaatatatatattaactttgtttatttgtatttttttaaattttatcgcaaagtaaagaattccgtattttcatttgccggtatgagtgcatggactgaaagaaaatcaataaaaatagaaaaatattaaaatttgtttataataataataataataatatttaattagttgagcaaatttataatattattcaaggagtttatttattaattgagcatctagtacattttcgaattataaactatgaatgggtgaaaaagtaaataaatatcataacttttatttgattttaactctttttaatatttattttggttgattatttagttcgttttttgatgaattgcaatttttagccagaacaaaaaaatgttgaaactaataatttttaatttaacatat

SEQ ID NO: 43882 - DNA, 1238 bp, Heterodera glycines
ttccatctcgctgttgcgtgctcgtaaattgccaaattgtttgaacatccggccgaaaggaggtccaacggggcaacggacaaaagttcgacgcctcggcgacaccaattgttggcctggggaagcaaaaagggaaatgttggaagattagcagcagaaaggtgatgaaaagaggagaagccctccctaccgtgattacaaacatttaaaaccaaaatcatttaaagtttcttctctccgctcactttggcaatttgcgcgtgcattttgcggcttttctccaacatttggcccctcctctccaccgctccccccaacacttccgccattctgttcagttcgtcgcactttggtccaacactgtcgcttccctttgtgctgttcaacaattcgctaaggtcgtcgcccttttcgctgagttcgatgccgcgttttcggagggtgcggcacggacggatgacgtcatcctgaagtataataaacattaaataaacaaatgcttaacatcattaatggttggcatcggttcgctttgcttcgactgaccaatgcttccgtgccgtactccgcgtgttcgcgtgccaatccgtcggcgatttcttcgctgtcgcccaattggcggtgctcttcgaggcggagcatatgcttggcgaaatggttttggagctgagaagcaaaaaaaaagagaatgatttacgtaacattgggctttcttttgtctacttttctgaattcgtcttcgaattgtcgaagttccaaacagccgagaagcctttgtcggtgtttttgccaaaacttgtcaaagcttctttctgtgtcctgcaactgattgatcatccgttcgatggccgtcacattttgaagtcgacttggcgacaaacgatcgctgaacgataaatatcaatcagcacaacacactgacgggaaagggtgcacttcatttccccccgtcgtttccttcccccccccccccccccgaaaccaaatttagaaaatttttgatttttttgttcaaaaatttcaagtttggaatttaaaaaatagtaatttttcgggggtggaaacgaagtggggaaacgccctgtgttccgtggaagtaagcccatagtgtgcagacatttgcgccccggacaatgcgtccgtcctgtgccttcgtcccacctttgttcggtgtgccgtacttgtcggagcagtgccattcccttgcgaatggaaatgcgaaagtcctccttaatggc

SEQ ID NO: 43883 - DNA, 1138 bp, Heterodera glycines
  unsure (1)..(1138): unsure at all n locations
gcatcagaagcagactcnaattcttcacacnnataatgtaaaaaatattacgcaagaaattatttttacatcctttttagaaatgctgcataaatttttattgtaaatagtcacaaacaagcttttgttcactcncaatatctaccagttatcatacaaaaaggcaatagttaagcactgagatataaaaaaatcgtctagaataattatctaaacaatttgtcgggaaagctgtataaattctgggaaaaaacttttcaagaaaagctgaaaaattttcaatcgcatcagaagcagcctcaaattcttcaacaacataatgtaaaaaatattacgcaagaaattatttttagatcctttttagaaatgctgcataaatttttattgtaaatagtcacaaaaaaacttttttttactcccaatatctaccagttatcatacaaaaaggcaatagttaagctttgagatataaaaaaatcgtctagaataattatctcaacaatttgtcgggaaagttgaataaatttcagttgcaataggcatattggcacaatacataaatgtagagcaggctcaaaatagaggaaataccaaagattaaaaaattcgtgtttatggcccactctgctttggctggacataactcgccagagagtggagatagaccctttgttgatacatttgaaaatgtagagctcggctagcgcattcgaataacacaaaatttgttttcatttgcccccaaacaatccgcttatgacgggccgaaagaaaattcacaaaaatttggcaccggaaaaactccatttttttatgggccagcataataaagtaaacccaaaatgtaagggaatttaaattggtcatgtgagatgtttagttttttatttgacccatccgttttctgggaaaaaacttttcgagaaaagctgaaaaattttccaattgcatcagaagcagactcaaattcttcaacaacataatgtaaaaaatattacgcaagaaattatttttacatcctttttagaaatgctgcataaatttttattgtaaataggagcaaacaaactttttttcactccacaatatctacccggggggagcaaaaaggcaatagttaagcactgagatataaaaa

SEQ ID NO: 43884 - DNA, 1319 bp, Heterodera glycines
  unsure (1)..(1319): unsure at all n locations
atttttcttttaatttttttgacagtagattactttttttaaatggtaagaatttcacgcattttaataaatatgggctcaataagaagcaacaaaaaaaaaatgagtaatggtggagattattggtcccataggaaagatgcccgatttgaatgattttgtgcttcattcaggggttatcaagcgtgctaagaaagaatatgccatcagttttgttcatatgttgtcctcttataatatttcattagttctatgatattttcgattatataccataaaaatgaactgcgcttgttcataaactaaccaacttggtcaaaatattttcaaacaccaaaagctttttttctcctttatgtgtacgcgtcatcgcctaaggcaccggcgacaaaaacaatgcttttggcgttcgaaaatatttttgacaaaatttgtagtttaactattgttaatgcttgaattatttgcactccaccattactcgtttcttttcttttttttgcttcaatgagccccatatttattagaatgcgtaaaatgtatatcatttcttaaaaaaacaatatacttcaaaaaagtaaaataaatattaataatgcgtataaaaatgaaaaaaatcaaaagaccaagcattccaacagacgccgaagttttaatcaatgacataattttcccgctttatattatcaatttctcgccaataattaggcaatttttcacattgttttgaacttttaaagctcgtacttggcttttttgtgaaaaagtatgtgtaatgctattcggataagtgggcaaccaacgaaaaataaattttacaaaaatttttaactaatttatttatttatttcggacgggcacaaaccccgtgggttgtcagtcgcggacagtctcgaattatcgggttgttcaacatttcatcaatgtgccaaaattttaagttagaaactgcaggaattgtcctggacaaagcgatttgagacgggtggacgacttgcagaatgtccaaataggcgaacatcttttaatggatggtgtcatttaatttaaaaatttatccgatttatttgaaccgataaaattgggaatttaaaaataactaactcaattggtgctgagccgttataaaaaaaaagccattaaaaggaccttataaaaaacaatcaaatggaaattttcaacaaaaaactgcccttaacttttgtcaaatcaaccaaactaaacattcttggaatcattcggtagccctaagaattctctattagctaacctaaatttcaaaaaatttggttgagcanaagttatgaccaaaattaccc

SEQ ID NO: 43885 - DNA, 968 bp, Heterodera glycines
gacgggcgtttcgcgcccgttatttaaagtttgttgggtcatacgggcgtttcgcgcccgtatttcaaattttgttggccttacagagattagaagaggtacaacagtgattagaagaggtacaacagtgattagaagaggtacaacagtgattagaagaggtacaacagtgattaaaagaggtacaaaagtgattagaagaggtacaacagtgattagaagaggtacaacagtgataaaagaggtccaacagtgattagaagaggtccaacagtgattagatgagtccagcagtgattagaagaggtacaacagtgattagaagaggtccaacagtgattagatgagtccagcagtgattagaagaggtgcaacagtgatgagaagaggtacaactgtgattagaagaggtacaacagtgattagaagaggtgcaacagtgattagatgagtccagcagtgattagaagaggtacaacagtgattagaagaggtacaacagtaattagaagaggtccaacagtgattagatgagtccagcagtgattagaagaggtgcaacagtgatgagaagaggtacaactgtgattagaagaggtacaacagtgattagaagaggtacaacagtgattagaagaggtccaacagtgattagatgagtccagcagtgattagaagaggtgcaacagtgatgagaagaggtacaactgtgattagaagaggtacaacagtgattagaagaggtccaacagtgattagatgagtccagcagtgattagaagaggtacaacagtgattagaagaggtacaacagtaattagaagaggtacaactgtgattagaagaggtacaacagtgattaaaagaggtacaactgtgattagaagaggtacaactgtgattagaagaggtacaacagtgattagaagaggtgtaacagtgattagaagaggtacaacagtaattag

SEQ ID NO: 43886 - DNA, 1307 bp, Heterodera glycines
tacatttatatgtttttttctaacgtaaacagtttatggcttagggtaatactttttcttttgggtttttctagttgtgtaaacttgtgtatggatgagtggggtttacctcaatagttcttcatcattatcatctccatattatcttgagcaatactccctttttcccaaatcttacaaatgaacatgaatcaacttttggttggccgttcgctgttcccaaaaatcatccgccctttctcgcacaccaaaccccttgccaagtctgaggctgacccggatgattacggctacttcccggacccaattgaacactcgtggggtttggagaggaaaatgctcatcgctcgtctgaagggtgacgacgtgagcaaatttttgatttttactattttttgtaaattttaactttttagcgctatgagccgaaggtatatttccgcgctgaacataccacccgggactatccgaatttggtgccggtccatttgcaggacaaagtcgtcgggtgcctttgtaagacagatttaaggcgtaacttttttattacgcattattagtatttattttattaaaattataattatggcgaaggagatcaaagaaagaaggaaacgaactggaagtcatcaatgcttaaaaaagagcatgtaaaccatttttagactaaaaagtgaaaatcggaaaatttgagcttcagattttgttcgaattcggacccggggttcggaattgttcgaaaaggatgccagatacgtgatcagcaaccccgaaaactccggaaaattttcgtggcttttgaaaacaaaaaaatttttttcgaaaaatgggcgggggaccagccttaaactattaccaaatcttttcatcaattattaaatagagtgaaatacgtaccattattaaaaaagcaatctacttccaaagggttaaaataaaatacaacattaataatttgtaattaaaaaattcaaaaagcactcttttaaagtagcgcccatattttctttattcttgaaaattaaggcgagccggacgcggagtacgtgaactattggcatattaggaaaggccagatgaagcgatgcgagtgcggacattggtgagttggagaagcgcattcgaaattcaaacaacgaaagcccctttcctttcctttaggtttaagggcgtgcaggccgaccctgacagtttcgcctgaatgcgatggatacgaattggctttgaagtgataggagatcatataaaatgatcagttattttaatagtatttctaagttggttggataaatgtaaagcatagtttc

SEQ ID NO: 43887 - DNA, 784 bp, Heterodera glycines
ctccccataaatctgggcgcatcggttcggggggactgccccaaaaacaaaaaaatcgattttttcaagtgtccgtttggggtactcaaacaattatggggagcaaaaatccaccgcagaattaaagtccagcctatagggaagttattccggaagtattcgttctccccataaatctgggcgcatcggttgggggggactcccccgaaaacaaaaaaatcgattttttcaagtgtccgtttggggtactcaaacaattatggggagcaaaaatccaacgcagaattaaagtacaggctatagggaagctattcccgaaggattcggtctccccataaatctgggcgcatcggttcggggggactgccccgaaaacaaaaaaatcgattttttcaagtgtccgtttggggtactcaaacatttatggggagcaaaaatccaacgcagaattaaagtacagactatagggaagctattcccgaaggattcggtctccccataaatctgggcgcatcggttcggggggactgccccgaaaacaaaaaaatcgattttttcaagtgagtgtccgtttggggtactcaaacaattatggggagcaaaaatccaacgcagaattaaagtacaggctatagggaagctattccggaaggattcggtctccccataaatctgggcgcatcggttcggggagactgccccgaaaacaaaaaatcgattttttcaagtgtccgtttggggtaccacagtttatggggagcccaaatccaaccagaatgaaagt

SEQ ID NO: 43888 - DNA, 1185 bp, Heterodera glycines
gaaacccaaaaatttaaaaaaaattctttggtaaaaaatcctttaaaaaataaaaaaatttttgaatttggtttgaaatttttaattttaaaaggaaaattcttttttgaaaattttcttaaaataagggggaagtaatttcaacgaaattttttttaggattttgatttaaaatgttgagaggtttaacaaatttgtacactgaatgttggatcgtcaacaccaatgagaaatgactaacagaaaagagggagaaaagggcgttggcttaggaaaatagcttataataaaggagagacgagcagacgatgagtgagagaaaaatagtggtaaaaatggtcaactgctgcattggcagagtcagagaggggttacaaagagttcgcacagcatcgaatatttccttcattttaggcgtcattcttccccactgcacttctttcttcggtttaattacccaagtttgaggtacttggcgtgtcctgcccataatatctgtggcatggaataaattttggaactgcgctgcctaacggcggtgcttaaagtgcgctaaaaatgatcaaatgattatcaatttttatttttcttaattccaaaatgaattcgaaacgcaaaaatttaatcataattcatgtggtaaaaaatgcatttaaaaataaaaaaaattcttgaatttgcttctgaattttttaattttaaatagaaaattactttttcgaaaattttgcacaaataagaggcgaagaaattcaacgaaatttttattaggattttgatttaaaatgttgagaggtttaacaaatttgtacactgaatgttggatcgtcaacaccaatgagaaatgactaacagaaaagagggagaaaagggcgttgttggctttggaaaaatagcctataataaaggagagacgagcagacgatgagtgagagaaaaatagtggtaaaaattgtaaactgctgcattggcagagtcagagaggggtcacaaagagttcgcacagcatcgaatatttccttcattttgggcgtcattcttccccactgcacttatttcttcggtttaattacccaagtttgaggtacttggcgtgtcctgcccataatatctgtggcatggaataaattttggaactgcgctgcctaacggcggtgcttaaagtgcgctaaaaatgatcaaatg

SEQ ID NO: 43889 - DNA, 885 bp, Heterodera glycines
  unsure (1)..(885): unsure at all n locations
aaaggaaaaagancaacgaaaagtcgctcaatgncaatgcaaaggacaaatttacagcgcaagtgccacaaaataaagaacaattacaaaagaaatgccggttntaagaggcataaaatattgaccagaaaatgctgaaaaaattgacaganaattgccaatttcgatcaatgaataaaatgccaacaaaatgttaacggatgcacggaatgtccatggataatgtaaaaaattttctataaataattattaattaattggctaattaaacaatgactttgttcgtatagtgatgaaaatcaacgaaaaatttgacaaaatgccaatagagaaaattgcttagatcaatgtgaattcaagtccattttgataattctttgatgggccacactattttctttcttcacaatcattcaaagataacggccactcaatggccggtaaaaaatgtttaatacataaaataagaaaaataatattgataaattactaattaagagtttttttcaggggctttaccatttaaagcaaaattctctccagaaaaattgcgatcgttaaggcgaagaaaacgatgacagtaaaatgcggcatcattaccaccgcctcaacaccgttgcaaaagttttcgttgctgcaacagtaagttttgcactcaaaaatgcccacattgaagtcgaacatttggcaaaatgccttagcttcgcactttctcaccgtatttgtgcttatcactttgccatcaactggaaataacacagtggttttaataaattaagtccgactgttatctaatcacaactgatctggcagcaaattcaattaatgctaaatctttttttcaattntttctgttcctttttcgctcgatgtgtacttacttac

SEQ ID NO: 43890 - DNA, 1052 bp, Heterodera glycines
  unsure (1)..(1052): unsure at all n locations
ggcgacactccatctcctccccaatttcgcatcatgcgttgtgggcaaccgcatcgcatgttgtggccccacccccaaattcgcatcatacgttgtgggcaaccgcatcgcatgttgtggccccaccccaatttcgcatcatgcgttgtggccaaccgcatcgcatgtcaattcaaaatgtttaatttgacaatgcacttttttaaagtttcaatgccaataggctgtcttgaattttacttttccattccgcttccatgtcccaaacgctagcagaatgcacatggtcctctgctgaccctcgcgcgattggaccttcgcggtcttaccacagagagcagaaagtccacccgagctgtctgacagtttaagcaacggggcctctgatcatgagcttgtaccttaagggggggggggtatcccaataaaattaaattgttcgaacccagttgtcgagacttatttggtcttgacgcggcaaccccgtgtacggatcttcattttcttcaactgcttgctggcactgggctttgaatgcagtgatgtactgctcccaaaagccattctccgtacattcggtgcaaattgccacgcataagcacccgttgccgcgcacagtcacatcacactcagttgcatgccgtcctaggcatagcaaacagcgctccgagaaggtcaaagcaccatgcactgctgccgccacaacatttggtggctgagcttcgtcattttctgcctccattggtgccagctcggcaaattcgggaccccgctgggcatcctgcccaaaatgcgaccggggcgtttcccatgggtgctgaggcggtggcggtagcgaaattgcgtccgcattttcaagccaaatagctacaaaatttttttataaattgtattttttactanaattttatcgaacatctatgataaccgggccatggtgggttgtggctggcccatacgcataaatctttcaatcacttaatttcattttataggaccccatgatcaaaaaaaatcttacttaaatcctgtcttaatccatctgcttcatc

SEQ ID NO: 43891 - DNA, 799 bp, Heterodera glycines
  unsure (1)..(799): unsure at all n locations
cgccgaaggtaggacgcggttcgatgtcgtcgacgttgacattgagcacggcactgaccgcatcgaccatgacccccagcagcagcaactggccctcctgctgcagttccatgatgatgatgcaggtgcgcttggcctccaccgtgggggcccggccaaaacgggccgacagatcgatcaccggcactaccgagccacgcaggttgatcacgccacgcaggaagcccggcatcaagggtacctcggtcaggccaccgtattcgatgatctcgcggatgctggcgatgggcatggcaaagctctcggacccgaccaggaaggtcaggaactggcggctttcgatgacttcctcctgttgccgcttcttgaaggaatcgccgttcaacgacacactgggcattgccttctctccttgctgatcccgctaatcagaaacgcttgaacgacgattcgtccaccgacgcctcatcctcggcggcgtccagcatggacaggcggcgcatgcgctcctgcttgccggtgccgccggaaccgggtcctgccttgacgctgcgtggcgcggacttgtgcatctcgcccacccggaagaagcgcatcaggtcctgcagatgcatggcctgggcgctcatctcctcggaggtggccgacagctcttccgaagccgaggccgtcatctgggtggtctgcgccatctggtgtacggcattgttgatctgctccagcccggtcgactgttcggncgaggcggcggcgatctcctgtaccaggtcggcggtcttgcggatcgacggcaccatct

SEQ ID NO: 43892 - DNA, 615 bp, Heterodera glycines
  unsure (1)..(615): unsure at all n locations
cgcccccccncccgcccttcaaaattttgaaaaataaataaaataataggagactcagaattttgaaaattttttataaaaactgatgacaagctaatgtgataaaacaggttaattcttttcctttcagtatccctgcaaagtttggggcgcttctgataagtttctgaaaaaaaagataagcctaaactttttggcctgtttaaaaaggaattaaaaatttttaaaatttattcatctccctttttgatagaaaaagcatcagagtgcctaaactagcatgtaaataaaatttggtgcgtttcagagcattttctgaaaaaaatatttatgaattaattatgcaaaaaacaaataaaaacgaaagactcagattttcgaaaatttttttgagccagctagctcggcgctcatttcagtgtaagttagtcctttaccggggagtatccctgcaaagtttggtacgcttctgctcaattagcaaaaaatatgagtgatcgaattttcactaaaaaagttaagcctacattttttggcatatttaaaaagcaattaaaaaatttttaaaatttaataattttcctgcaccgaaggtactcattcggcctcttcgcg

SEQ ID NO: 43893 - DNA, 841 bp, Heterodera glycines
cggtcgctcgtcgccgcgcggggcgccgccattccgtgaaaacaatttttggtcgccgttccccggccgccccaaatttgttgtgctgctcattcaaattgggcgagtgtgcccttttctcgtcgatcttcatcttccccatccattcatccctccttaaatgtccccttcaaaatgtgccaaagtcagcgaattcttcgatttgcattgtgccatcattgttgaccaattaatgccgcacattgactccgtccgttatcacttggcacaatttgtaatgccaaataaaaccccaaaatccactgcttcttctccatcatttcaccaaatgtccaatcacaaaaattctgttgtccaaaataaatcgcaaattgtcgcacgaagaaattccattgaattggtaaatgccctccggggaatgcccgcggatgataaggtacagtcaaaacaaaagcaacaacaaattaacaaactgacaaatcgtttttaattatatggaatgagactcattagagtgggaactcaaatttaaaaaataccctttaaaattgactaaatttggccccaaatcaggcatttctcacattgaaacaattaaaattgcacggcttcaaattaaattattcatatttaaaaagctttattttttaatttgccccatttccctgactaattttactattgctccgccttcccttttgatcagttgctaatggcattttgctgctcattggtgaaaagtggctgctgcttgaatttgatttgcacaatgctagcgacgaaacttgtgaatccaaagaagtaaaaaaataaaaataaaaaatttatttattttaatttt

SEQ ID NO: 43894 - DNA, 1424 bp, Heterodera glycines
  unsure (1)..(1424): unsure at all n locations
ttctccaaatgtttttttcattttgaaatgctcgattgatcaattttcataatttttgcattttcgntgtcactcatttcgggattttcttttttaattcgcanataaattttcattttttctatttttcttccttcgttattattttcttgctaatgccaaattgttttttccatttgttaattatgaaatggctaactccacttttcttacaaatttcagcataatttcgttgccattcgatgtgcgaatattttcttttttgcttatattcgtttgtcagttcaataaattttttgacaatttcaattttttcttcatcagtttttgatttgtaagatttgcgtttttgaagaccaaattcctttgattccatttataaatttcgtttgatttgtgcccaatttcttcgctatttttgagttaattttatcccattcttttgttgagtattttcttcctttttgctttatcttctcttttattttgttgaattttgcaattatttctctttttttgagttcatttcgtttttcttcttctttttcttgccatttttctccaaatatttcgccaaatgacttttgttgcaattttttcttttctgatccaattttgtcaattaaaaataatataattaataatagtagcggaaataatttcatttttgtcgtctcgaaatgattttgttttatttttcttcaattaaatggcaattcattttttaaggcatttaaatgattttttttctgattaaaaaactgaataaatcattattttacttaataaaataaggaaatcctgtttaatttcaaagaaataataataataattttatcttaatgacaaaataattgccaattggtaaattaatgattaactaaaattttattactttctactggagctcattcgaaaataataaacatattttcaataaaaataaaataaattcacaatgtaaagagattttagaaaaattaaagagattttatgaaatttcattatttcagaaaattggtgtaaaatggcaaaaattgcgggaaaaaaattcttctactgttcttagaacaattcttctccaaattgtttcttccatttcttaattactgaaaggctaactccaattttcttgcaaatttcggcataaattttttgccattctttttgatttatagcttttatgtattcgttgatttaatcccaattctttaatccatttataaatatataaacgatttgtccccaattttttcgctattttcgaattaattttattccatcttttgctgaatattttcttcctttttgctttattttctcttttattttataatattttccaattattcctctttttttctgttaatttcttttttcatcgtctttttcttgccatttttctccaaantatatcatcaaat

SEQ ID NO: 43895 - DNA, 943 bp, Heterodera glycines
attttacatttaaatttttcaattttaaatattagttagtttaaaagtaatcatttctggacattgttagcaggaactcgccggtggttaaatagtggggaccaaggatgtgtcggcatgccgtttttcgattgccgattcccaacatttttctgcttgaattccgattttggattgccgaaaatttttgaggtcttggtacatggcccggatgggttcgagattagataagtttccaataaacacatgaaaaatcccggaccacagcgtcccattctcgaaaaaaaattagaaaaaatattggtagacataaaatatgtcctaaagaagttcggatctccaaatttaacaaattttaagagaacttagggagcggcaagtgaaatgtgccgccaatattatgaataaatattgtaagaaaataccataaattgttaaatttgtaaaattaaaagtgatcaaatcggatgaatgaataatgatcgattcggcgttgattgaaaaaactgattgattgagagagagagagaggattggaaagggtgaaagaaaagttcatttcaaaatgatagtgtaattatttgtcaagaaaaagggggaggaaatggcgaaaaaaagcgaaaaaaagaaataattaaaggctaatttaaatgcttcaagactctcgaccttaatttttcttttcaaaatgatattttcgatcccatttttatgttcagttttttgagtaaaaaatggggaaaaagacggtttatgatgtataaaaaaatttccgtaaaaaaattatacgcaaaattatttacaattttttttggaaattaaataaattagcactattttaaaatacaaatctgacatttttatctaattctatctttaagcaactcgaacaaaataggaaattcaatttcccgatttatgcgtttttgtccaatttggtttt

SEQ ID NO: 43896 - DNA, 913 bp, Heterodera glycines
gcagtttctgtaaaaatacttatgaattaattatgcaaaagacaaataaataatgaactctcttccttaataaaaaatccccgaaggagagaatttaattaaatccattccttcgggggaccgtgccgggtgccgcggggtaagcagtgctggttcgtttcatcacggcaccgaaccttttggctagtcagcaatcgttgcttaacttgccagatcggacgggtgcgcatgattccactgttccaagcaccccaccaaaagcaaaacgatataaccaaaatataaggacaaattttttaaaaaattttttctccatcttcctttttgatactaaagcatcagagtgctaaaattaagttgtaaataaaatttggtgcgctttagagcactttctgaaaaaaatatttatgaaacaaaaaaatcgattttttcaagtgtccgtttggggtactcaaacaattatggggagcaaaaatccaacgcagaattaaagtacaggctataggaaagctactcccgaaggattcggtctccccataaatctgggcgcatcggttcggggggactgccccgaaaacaaaaaaatcgattttttcaagtgtccgtttggggtactcaaacaattatggggagtaaaaatccaacgcagaattaaagtacaggctatagggaagctattcccgaaggattcggtctccccataaatctgggcgcatcggttcggggggactgccccgaaaacaaaaaaatcgatttttttcagtgtcccgtttggggtactcaaacaattaatggggagcaaaaatccaacgcagaattaaagtacagggctatagggaaagctactcccgaaaagatttcgtctccccataaatctggggcgcatcgggttccggggggactgcccccaaaa

SEQ ID NO: 43897 - DNA, 905 bp, Heterodera glycines
  unsure (1)..(905): unsure at all n locations
attcacaatttccgcagctcttgcggtaatggaaaaattttgaagaggctctgcggaacgtattagcatcggggttacgagatagaaaattgtcctaaaaagagatggccatttttctgagaattaattcacaatttccgcagctcttgcggtaatggaaaaaattttgaagaggctctgcggaacggattagcatcggggttacgagatagaatattgtcctaaaaagagatagccatttttctgagaattaattcacaatttccgcagctcttgcggtaatggaaaaaattttgaagaggctctgcggaacggattagcatcggggttacgagatagaatattgtcctaaaaagagatagccatttttctgagaattaattcacaatttccgcagctcttgcggtaatggaaaaaattttgaagaggctctgcggaacggattagcatcggggttacgagatagaaaattgtcctaaaaagagatagccatttttctgagaattaattcacaatttccgcagctcttgcggtaatggaaaaaattttgaagaggctctgcggaacggattagcatcggggttacgagatagaaaattgtcctaaaaagagatagccatttttctgagaattaattcacaatttccgcaactcttgcggtaatggaaaaaattttgaagaggctctgcggaacggattagcatcggggttacgagatagaatattgtcctanaaagagatagccatttttctgagaattattcacaatttccgcaactcttgcggtaatggaaaaaattttgaagaggctctgcggaaacgattagcatcggggttacgagatagaatattgtcctaaaagagatagccatttttctgagaattattcaacattcccgcagctc

SEQ ID NO: 43898 - DNA, 1593 bp, Heterodera glycines
agtggacgaaattacggaccaaatcttcgtgaaatgggtcgaccaattggtgctgcgggtgcgttgccaatcattacgacattaaccccctcaaaatcggtgcactttttcaggatgagccgttgcctctttttgtgccgctcagagaccgtaaaatgaacgtggtcaaccgccagttgatgatcactgcggagaatcgacagtacaaaaagggacggttggcggagaaaaggaaggatcgcaacgcggcgttcaaatgcacttttggcgaggacattgcgaaggtggcgcaaaaagtggaagggttaaaacggagttatcgacatttgcaccccggacattgtgcctatgtccaaaaacgagtttaaacttaagttttatcagtccctacagcctaattagcatttttgagtgatgaaagtgattgtgtctgataatttgatagttaataagtattggaaaagtcaccgattattcaaaaagcagaattaattcttatacgcgctatcggggattgaaaaattttgtttgaatccgatttttgatataagcgtgatggcaaaatatacaaatagaatctaagagctcccctaatgaaggaaggcaaacaataatttcaaaaataatttgtgtattttaggttttgatcaatccgcgtcaattgctccaactgcttcagcttggcccagccgaatttgaacgggtcgtcgtcggattgtacgttgttcataaggtgcgtttggaacaacacgttgggagcatttgattaatttatggcccattttgcttcaagaggccgtggtcactcgaacggatcgaacgcgtcacgtgggatgccgtgccgacgtacaaagttaacggccactgcgggcctctgaacgttgtgctgtgcttcaaagagttcagctgcatactgctcaaaattgatcagtcaaggccgagctctaaccacctgatcgggcagaataaaacggcggtcggtcagcaaatcgccattatttttattgcatcttttgattcaatgaaaaaatcattcggaaatttattttatttttttactttccgtcggcgctgtccccacagaagacgtacaataacagtacagctttattatcattgcaatttcactttcaaaggttgccaaatttatcgctccatccgccgagcacattaagcgaaaggctcaagaattggaggaagcgctgcgcgagacccaacagatgaagcgcacggctgaagacttagcgggaccgatgcacaacaccaaacgaatcaaagacaacgagcaatatgatgaagaagaggaagacgacgacgaataaggagccaaagcgtgaaatttgatcatttgtttttcccattgaaatccgacaacgaggcggtttagcatttgcagaaggccccatttttgatgatttattgtaattggatagattatctaatttattccctttttgtaattgaaagatgtgtatgcagtatttaaaagcaattctgtacgttacctttttagtttaagatcctaaaagttgatattattaaaatttatcactgttagggtgcataaaaatagttaggtcgattcttaagtgt

SEQ ID NO: 43899 - DNA, 700 bp, Heterodera glycines
  unsure (1)..(700): unsure at all n locations
gcaaaagggtgcccaattcgagcgtaccaactcgccttaaaacactaaccttctattactctaggtttgcaacatttgaactttgaaaatgaatttaaatccgactgaaattttgggttgtcctgtcataattttttggtttgattcaccgcaagaatatttcaattaaaggtcagtcataaattttgacaggacaaacacttaggtattcaaatagtccaaagtgttttgtgtcgccatgttaaaattcaaataaccttcggaaaaactatgcccagcggttcaaaattctcgatttccaactttttaaagcccggcgatttttttgaaaattttccgcttaagatacaatattttgtgctatcaaaaaataccaagtttcagtttatcctttggaaatttagtcatttacatcacattttcagacttacctgggccacttccgtgcaaaaatatgtcatccaatttttgacggactccattttggccccgttccatgagcatcgccaaactgttactgaccggcgacaatacccgctgttcgaattggaattgctgtgtctgctcgagttgttcgtcctccgttatgcgccggctgttgccggcggttgtgagcagcgggtcaacgaagacgtggcaagatttggatttttattgcacaaccttttncgcattttattgcaattttcacaaatttctt

SEQ ID NO: 43900 - DNA, 1342 bp, Heterodera glycines
catgttcccatacacgcatcgattaaggcagccgcgcttgcactagcaacgaagtcctttgtgcgaagcgctcatgtcagcgcccgcccatatataccaaaagtatactgtctacaccgagcaattactgtgcaaaacatactgtctacaccgagcaattgctgcgccacacgctggtttatatataactaaagaaacaaggcaactcattccaaaaacaaaatctccttacggtttgccgggaggggttcgaaatttcgaccttgggggcaacttttgacggcgcattcaggaaaactatagattttccgatccgagggccaactgagcgccaggcgccgaaaagtcacttttttaaaaatttttttgccgtttttggaattcaaaaattttttaaaggcctaattgaaaaatcggcctcgtaaaggcactcggttggactttttgggatattttttgtttcttgaccgaacccctagggcctaccagtttttctgaaaaactggctaaaaatggtatacttttttgggccatttcagcgccggccgaataactcgccggggtttgaccggaggaggtcggtgtaagcggcttttttgtagagctcgacgagctctatccaaccatgtttttggatttctgaaattttcagaaattttcgagctaggccccctcgaaaattttccgtttttgaattttatgattttttacagatttttccggggaaaacggagaccactttcaagcaaccgtttttcatgctctatcaattggtgtcattttcagaaaaatttttcaaaaattttttggaaatagaaaatttttggttgctaggcctcaatttcagttctggcgcaataactcgtcaggagttgattttatcaaaaaatcgtctaagagcttttttatagagaattttaagcccaatctaaagtgctttatctcatgtttttaccataagtataaaaaaagttataaaattaattgtgattttgaaactgaaaaccataggggggaccccatggttttgcattttatgaaaaatttttttactcctaaattagctaaaatgcatttttatggcataatttgaggtgctgaatacgtatatacgatttattttgcgtttcagattttttggaaggtgtttaaaattttttgaaaaatcgtcaaaatttgagccccggaaaatccagtgaaatttcgaaaattcataactctcttcgtttttggtcaaatttagtggaataaagtttgaaaaatagcaaaaaataaggagaattttatgagatttgtttggaatttctatcttccaaaataaaaaagttattccataatttct

SEQ ID NO: 43901 - DNA, 1231 bp, Heterodera glycines
tgcgttcggtttgatcaaatatcaccaaaaatgatgactataagaaaatgcgcaactgagaactggtaaagcaccaacagacatttgtgaagcagggacggtccctggatttcgacttgggggggggcgtacctccccccgggcgatgaattttttttttttttgcttttcacacccgatttttttgtgttagggaatagtgagtggctccgaatttttaatgcgatttattaacgaattttgtccaaaaattattgtgattttgagccatttttagcagatttacataaaaaagcgggaattaattataataaaagaaggatcaatcagccaacaagtaattgtcatttcttacttaatgacactgtgcagcttccggtgatcagctgctttctgaaaatgaaactgagtctaattttgttctaaacttttaataatttattttgaatctatttattttggaattaatgatcatattagagagaataatgagattctattaatatggtaatgtgaaagaaatcttttaattaattcagtaattaaagaataattattttggaatatatattttaccttattttttaaaataaattattttaattgatcaccttacctctttgccctcctcggagacgaccagccatgtctgcttgattcccttctcaacaaggtgccgtgaacgttcctgcccgttgcccacttccacacggtacgtaccgttcaacgcgttcaatgtcgcgtcagtaatgtgaattcgacttaaaaatttgattatgatttattactgggctatttaatcgtattccaaagctattttgaaaatgttcatttattttgcaccaattaatcgataattaatcgcctgctcaaaacacgcaatcgattagatcttacatggataatcaccaattcaccacttgcgggtttcttagagatgaaacgattttcgagcatttaatcattcttgaattttccaaaactccaaacatttaaatgccatctctcagagaagccctaatcaattgcgatcagcatttcatttgttgtttcttaccccggcacccctgagctttccatgtggttggccagcgtgacgtcattgctcattatgtcgaattgccacttcttcagccccaacaccccgcagtgcgctttgccactgtgaatgccgacgcgcatgttcacgttgacgccgtacagctcgcggaccaacctaaaagcacgggtg

SEQ ID NO: 43902 - DNA, 1241 bp, Heterodera glycines
  unsure (1)..(1241): unsure at all n locations
ctctccattttcaaatttatcaacaaaattcctcccnccactccctcccaaaatatcccctatcaaaacaaaacnatcccaataaatttaattttttcttaatcttccccatttccctttatttcnaccctactctacttntccatcttttcccaatatcccactccttccaaattattaaactctttcacaactcattnttaaaataatttttttttccnattcctttatctccaatcataacccttataactaattattcatatccttctcttaaaaaaaattctcactaaaaaaaacactttttctaaatattaacaacacannaaggaaaaaaatttttcatttgcctaatatttatttatactgttgaactgttggaaatgcagctgatgccgtcggaaaagctccgattttttggggaagtttttttctttcagtttcaccactgattgttgaggcaatttttttcgccaatttcttttgtctacaaacattatttattgcgtttcatcctgtagtgtgtaaaaaattttcagtaaaaaaaacttgttatctgaatatttacaagcaaaatttaagaccatttccaaagaggaaggaacaaaaatttttgcctaaattttatattatattgttgaattgtttgaaatgcatctgttgtctgccgttttgaaatttttcaacttttcgcgaaaagatttcccagaaaatgcatgggacaaataaaaattaaacttctattatgatcaatttaaatttcctatcagtttcgggtttgctttaaacacgctggcctatgaaaaaatggagttttatggatgtcaaattttgggacttttcttcgacgtggccatcagcgggttgtttcgtgacaaaaacaaaccagtttgatgttattcgaatgagctagacgcgctctacattttcaaatgtatcaacaaagggtctaccgccactccctggcgagatatggcctgtcaaagcagaacggggccaataaatttgaatttttgttaatcttcggcagttgcctttatttcgagcctactctacttgtgcatcttttcccaatatggcactgcttccgaattattgaactgtttcacgactgattgttgagataatttttttttccgattcctttatctcncagcatgagccttataagtgattgttcatatccttctcttgaaaaaaattgtcagtaaaaaaaacacgttttctgaatattaacaaca

SEQ ID NO: 43903 - DNA, 1773 bp, Heterodera glycines
attttttcaagtgtcgttttggggtactcaacaaattatggggagcaaaaatccaacgcagaattaaagtacaggctatagggaagctattcccgaaggattcggtctccccataaatctgggcgcatcggttcggggggactgccccgaaaacaaaaataaatcgattttttcaagtgtccgtttggggtactcaaacaattatggggagcaaaaatccaacgcagaattaaagtacaggctatagggaagctattccggaaggattcggtctccccataaatctgggcgcatcggttcggggggactgccccgaaaacaaaaaaatcgattttttcaagtgtccgtttggggtactcaaacaattatggggagcaaaaatccaacgcagaattaaagtacaggctatagggaagctattcccgaaggattcggtctccccataaatctgggcgcatcggttcggggggactgccccgagaacaaaaaaatcgattttttcaagtgtccgtttggggtactcaaacatttatggggagcaaaactccaacgcagaattaaagtacagactatagggaagctattcccgaaggattcggtctccccataaatctgggcgcatcggttcagggggactgccccgaaaacccaaaaaaaaattttttggataaaaattatttaaatgaactgactagataatatttaaaataggttatttctcttcctttcagtatccctgcaaagtttggtgcgcttctgatcagtttctgaaaaaaaagttaagcctaaactttttggcctgtttaaaaaggaattaaaaatttttaaaaattttattcatctccctttttgatagaaaaagcatcagagtgcctaaactaacatgtaaataaaatctggtgccggttcagaaccctttctgaaaaaatatttaagaattatttttgcaaaaataaataaaaatttctaaaaatttgatcgtccataaataatttgtaattgatcaggggctcaccaaattttgcagggatacgtatcggaacactacaaatgcttactaattttcctagattttttaaacccggtgaaaattttttgcagacaccaccacttttgcacttaaaaaaatttcaaaaaactttaaaaattcatagaaaatttaaattcataggtactactgctaaatcaacgcagagacgcctttccttgacctttttaggcccctgcaaaatctggtgcgcttctgatcactactcgaaaaatgagtgattgaattttcactaaaaagttaagcctaaactttttggcctgtttaaaaaggaattaaaaatttttaaaaattttattcatctccctttttgatagaaaaagcatcagagtgcctaaactaacatgtaaataaaatttggtgcgtttcagaaccctttctgaaaaaaatatttatgaattaattatgcaaaaaacaaataaataatgaactctcttccttaataattttcctgcaccgaaggtactcactcggccgcttcgcggcctcgtggtggggccttcccccccccctaaattttaactatttaaaataccggtaaaatgaataaaaaatttgaagatatcacatttgttcgaggatgctgcctataacatatatttaatgaaactgctcctaaacaaggtgacttaataagtaaaatatttgattaaaactttttcatcctatttattcaacgctctagatataacaatagattatttgttaaccaataactaggaata

SEQ ID NO: 43904 - DNA, 1356 bp, Heterodera glycines
  unsure (1)..(1356): unsure at all n locations
ccattgcttttgcttctgctttatcccaatgcnccgggggcacacgccaaagcaaaaaaaaataattagtattcattttggagcatccgccgggggcaaaagcgcagcaaattaaggaaaagtgcgcacgaaaaaatgaacaacaacaagcagttttgccaaaaatgtaaaaggaaaaatttgaggaaaaataaatggagaaaaatggatgaaattgggaaaaaaaaaaaacaaaaaaagaaacaaaataccaattagcagtttgtaaatttaaaaggacgaaattccctccgaggataatatatttaaaaaagccgatgatgacaaagagacgggcaaaagccaaaaaaataaataaaatactaaatgtaaaatgaaagaaaaataaatgtaaaaaaggaaaatttgaaaagcgtaattagctaattaggacaaataataaaatggatgaaccaccgatagataattaataagaacaataaaaaaatatattttgacggggttcagcgaattggtggaacggagcgatccccggagaagaacccaaacaaaaacaatagaacgaaagacgctttatgagaataaaaagcgaaattttttttgtttaattaaaagaaaattaattatttataacaattaattaattagttttcacctttttaatattataaaacatttgaaataaaatggaattgagaaaggataattaatttaaaagctcaatttgattatcatttaaataatatttatccaattttttgctaattgatttgctaattgccaatgattccgtgccgtgccaaatctcatttttcatccaaatttgcccatgttttcacatctctttttgcatatgcgcacgtgtgcagtgccgtcgcaatttttgcgccgtcacttttgcggtaaatgtcggcgccggtgaagcaaagggaagagccgagccgagagacgaagccatccaccaaaatggagtcacccgaaaggcaaatcgaatttaattgctattattgtattattattattattattattaattttccaaccaattttggcgggtgccaaaaagctgacactcaggtcaatgcttatgccatccgtttgtcgttttgtcaagcaaattgcggtcgatgtcacaatgtccacctaaaatttaattgaaattcgtttattaatttattttatatattaaatttattataatttctatttttattattgttcgccttttaatcatttgtttatacatattttattattgttttttttctatatttattcattaatatttttctcttttttattgttgttctcttttaaagtatttgctatctttttaaattatttattttctttatt

SEQ ID NO: 43905 - DNA, 752 bp, Heterodera glycines
ttttgtcacttcgccacattcagacttttgtcacttcgcccacattcagacttttgtcacttcgcccacattcagacttttgtcacttcgccacattcagacttttgtcacttcgcccacattcagacttttgtcacttcgcccacattcagacttttgtcacttcgcccacattcagacttttgtcacttcgccacattcagacttttgtcacttcgcccacattcagacttttgttacttcgcccacattcagacttttgtcacttcgccacattcagacttttgtcacttcgccacattcagacttttgtcacttcgccacattcagacttttgtcacttcgcccacattcagacttttgtcacttcgccacattcagacttttgtcacttcgccacattcagacttttgtcacttcgcccacattcagacttttgtcacttcgccacattcagacttttgtcacttcgccacattcagacttttgtcacttcgccacattcagacttttgtcacttcgcccacattcagacttttgtcacttcgcccacattcagacttttgtcacttcgccacattcagacttttgtcacttcgccacattcagacttttgtcacttcgccacattcagacttttgtcacttcgccacattcagacttttgtcacttcgccacattcagactattgtcacttcggctcaccacgaataaattgcactgaaatttagtctctttaccaaaacgaacta

SEQ ID NO: 43906 - DNA, 763 bp, Heterodera glycines
ggtccggcggtgccgataggcgccgccgggggaaattttgaaaatttgagtgtaatttattaacagattttcaataaaaaatgctgatttttgggattactatgctcaatttgttcgaatttttttcaaaaaatgataaaaatgtgttaattaaaaaaaactatgacgaatcatattttatcgataggaaacccatgattatacaaaaagaaaaccaaaatattttaattactgtagaggaactgaaccatgggaaagaagaaaggaaagtcaaggagactagccagtaggccatttgcacaattgtcagtgttacttttaaagaaaattaattttttttttaattttttcctttgactccaattttcatcactaattttaacttattatgtcctaatacgcacggaaaacgagtatttaacttggtttgaagcttctagctttaaatagtttgtgcctttttttgcatttttcgatttttgtgcaaaatcgctaaaaattccttcatttttttctcctgctgaaattttgatataacattggaaaaaaatttttgcccgaagagaaaaaaaaaacaaacggttttcggattatcccatctgaaattttttctggctacggccatccccgcaaatcgtcctgaatttttgtacctatttttgatgcctattttaaaaattttcgtgcctaaaagttcggtctctgttttaattacctataattaattcattaaaattgctttttaaattatatttaaaaaaat

SEQ ID NO: 43907 - DNA, 1157 bp, Heterodera glycines
atttttttattattaaaaaaattttttgcatgttttatatgaagtagtgcgaataaatataattttatttattaaaccaaatatttctatttaaatttaaatttgtatgattatatgattttttggcgaaacagtggaaaatgaatatggatgaactgttggaagtggatttatggagtaaaactgctgggttttatagtcgaattttttgtgcgggaaaaggctaaattggacaattcttttgtgtgggtaaacaaaacatctgatctgataattatgggattataaaagaattatttcttacaatggatggcgggttgaatccagtaaacgatattaataaaaattcattaaggaaataaaaataatttgaagtactaggaatacttcattctttaaaacataagattgaataaataaaataataattcgtccagtaatttaatgcgttagacatgctttaacattcattctcaatttattaaaataaattttagcaatttttttatgaagtcgatttaacacgtatggacacaaattgcccaaatttaaaaacttttgaataataaaaacaaaattaataaataagatttttaaaataaaattattaatacatatttatattgtgaatttgttttcttagtgaaattaaaattaaatgaaattaactttattgcgcgttaaagtattatattcagttaaaacaaggtaaatatattttttttataattataagttttatcttccttcaaaatagaacctcgctagcgaatcttatacaagaatcataaatcaacattttaaatacaaagacctttacagcataaggtagaaatgcagcatatcactaatttcactttgaaaagtttgaagcgagcagataccgaattaatcaatcgtataaaaaaaagaaaaaaaatgaataatttataattttttatttttcattcaaccacttttcaattgctttgtgtaattgatttgcaaggggtaagcgtccccccccccccccaagcgttcttccctccctccgttcgccacacattttttggccaaagagtcagtcttaaaaaaatttggcccaaaatcgaaaaaatctatcattttttggacaaaatctgttaacaggctcatccaaattttcaaattttttcacg

SEQ ID NO: 43908 - DNA, 997 bp, Heterodera glycines
aggtctatcttaaaggcctgacgagttatgtttcgacaaacatcctgtacaccataaatcgattgcaaatttagtcgaactatataaatttccaaaaaatgattcatcttttttatggttagcgcatatgtctctagctttatagaaacggtcaccgaatctgcgaggaactactttttagagaatttctatagattattattttgcatgaatccttcgcttaaattcccatttatcttataaagtcagattaaattaattaccccgatttgttttagaattggtccaaacacgcttgctaatagcttttcttttcgaaaagagaggcgaggaaaaataaaggttgcatccaaatgtaatttttttttacattgaagcatttggatggcttgctgtttacagttggcttagtcttctttgcaagaagcagcacaacttttgtttgggccaacgaccccaaaccattcgaatagcaatcgattgggctgactagactccatatttgcaggaatagcaatggcaggtctatcttaaaggcctgacgagttatgtttcgacaaacatcctgtacaccataaatcgattagcaaatttagtcgaactatataaatttttcaaaaaatgattcatcttttttatggttagcgcatatgtctctagctttatagaaacggtcaccgaatctgcgaggaactactttttagagaatttctatcgattattattttgcatgaatccttcgcttaaattcccatttatcttataaagtcagattaaattaattaccccgatttgttttagaattggtcctaacacgcttgctaatagcttttcttttcgaaaagagaggcgaggaaaaataaaggttgcatccaaatgtatttttttttttacattgaagcatttggatggcttgctgtttacagttggcttagtcttctttgcaagaagcagcacaacttttgtttgggcccaacgacccccaaaccattcgaat

SEQ ID NO: 43909 - DNA, 912 bp, Heterodera glycines
aggaacaaaaataattttgggctttcacaaataaaatatttacgaaaattaatggcacattttacacattttctgtcccatagtcatgccatccaatggccgtgccataccatgatttccccgattcccccccccccccaatttgtcgcacattcatcattcgttcgatgcgctccactttctcctgcgttttctgatcagccaatttcgcctgtctaaacgcgtcgactgttagcgccgtctgattaccctcggccaacaaaacccaattggccaagggcagagaatcgcgcgaatttgccaagtcggaaagagcgactgaaagaagaaaaatgggaaatgatggacaaaaaggaggggaaggacctgaatatggtggaaaatggaagaaagaaaagacgaaaagcaaaggaaagggaagaaaatcggaaaaaggaagagaaatttgggggaaagagaggcgaagagagaaaaagcgcattttgggggcaattggaaaatgggaaaaaggaaaagggaaaagagaggaaaagccaaaggaaaatgggaagaagcgattgttgggcttatgcttgttcacttttattgtttaatcagcttaaaccattgaattgaagaaaatatttgagggaaaacaaaacaaataaaaggaaagggaaaaggagaaaaaatgggatatttctggccaaatgtccaacagaaagcaatttgagcccaaaggagaaaaagtagcgttttgtttctcattgttggcgccgctcgccgccgatattacccctcccccctccgacgaaaaaattcccactcaaagaaatgcttttaccccccccccccttttccagtcaatttccaatgactctatacgataccatttgtatttgtaaacgaaacgcctcaacaaaactgaaatgg

SEQ ID NO: 43910 - DNA, 1101 bp, Heterodera glycines
  unsure (1)..(1101): unsure at all n locations
tgtccaatccttccaagtctttcacctgcattcaatttgaaaaagatatattcttaaataagcaattaaaaaacaattacccttccctccgtaatttaatgactaaatgcccactcattaattattaatgaattattattacctctttcattttgccacttttcttcccaatttgcactttgcatgcctgttttgtggcccaacttgcccagctgagtgtggcactttccgatttcttcgtcaaatcggtgtttctcaatttgcgctttaccattcgctcgtcgaccgctaaatcgcctgaaaatggaaaaattaattaattgcttggaataagcagaaaaaagacaaatacataatgagaacagatataataataataattattaattaattaattgatttacaaatgcttatgaaatctttggcatccgtcgccttcgtaattcgtttcactttcaccgcgtcgtaaaacacttccttcaaatgctctttcgttgtcacttttccttccgccttctccaaaacctccttaaaataaatatttaattgttttttttctttgcttttccttttttcttttacttccaaatgcgtcgaccatttggccaaattgcgctttttctctctaagaccacgctcaaagtcctcaatttcggccacatttggccatttgttgaaccatttggtcacaaatccgctccgcttctcaatttgttcgcgcatttcgtcgctggtcagctgcagctgatcacaaagatagtcgcccaaagtgagcagagagtaaaggacggacagatcggaactgaacgaagacaaattgggagatgagaaaggcaaaatgaacgggttttgatcaatcagtgatttgggagagtgatcagcaaagaaaacaatggcagagttgaataaagggacacttctttacttatttgtcattttcaaatttatcaatcattttctgatcatgacttttcctctctttctctctctctctccctcccctctctctcgcctctctctcgtcctttcctcacccacactctctctttcattctctctttatccgctgattngctctttccatggcattccgtattctct

SEQ ID NO: 43911 - DNA, 912 bp, Heterodera glycines
ataaaaataacattcatggtgcgaaaaatggtgtatgaaaagtatattgggggaaaaaagactgtacaaaataatacccctgggagaagggagtgggaaacatgatttcgaaattttcaattttttgtagtctaatctactcaaaccggttcagaattcaataaaaataacattcacggtgcgaaaaatggggtatgaaaagtttattggggaaaaaaagactttttacaaaataatacccctgggagaagggagtgggaaacatgatttcgaaattttcaattttttgtagtctaatctactcaaaccggttcagaattcaataaaaataacattcacggtgcgaaaatggggtatgaaaagtttattggggaaaaaaagactttacaaaataatacccctgggagaagggagtgggaaacatgatttcaaaattttcaattttttgtactctaagctactcaaaccggttcagaattcaataaaaataacattcacggtgcgaaaaatggggtatgaaaagtttattggggaaaaaaagactttttacaaaataatacccctgggagaagggagtgggaaacatgatttcgaaattttaaattttttgtagtctaatctactcaaaccggttcagaattcaataaaaataacattcacggtgcgaaaaatggggtatgaaaagtttattggggaaaaaaatactttacaaaataatacccctgtgagaagggagtgggaaacatgatttcgaaattttaaattttttgtagtctaatctactcaaaccggttcagaattcaataaaaataacattcatggtgcgaaaaatgaggtatgaaaagttttattgggggaaaaagactttacaaaataatacccctgagagaagggagtgagaaacatgatttc

SEQ ID NO: 43912 - DNA, 1593 bp, Heterodera glycines
tgggtaagtgataagtgaaaaaatagtttaaaatcagaattatcaatacaaaaaaattaattattgtggaaaataaattaaataatttacaattttaattaaaaaaacaaaaataataagagccaacaaattataagcagagagaaagaaagatgagttgtcgtgttcaatttgatgagttgtcgggtttgtcgggttcaatttccgaggacaaatcgttggagcaatgcgacggattgccccccccccctttacaatatttatgcacagtttgtacgattttcccagtaaataatgatgaaagaaaggtctccccgccacgccatccattcgaaacagacaaaaagcgtaaaaggtgacgaaaagtcagaattggaaaaagggaattatgtacataaaaatatgaaaggaattaaaaatgaaagtgacggagggaagaggaagtggaaaagggggaggaaaacccaccattttataggggggggggggcaatgtttggattggactcgaacacttttttaatccatttacaaaacacacacaaagagaatttaagtgccaaagtcacttggaagggaattatttgccattttcaatgggacaaattgagggaaataaatttaaaaaattgtatgttttttgatttgaggagaaaagaaatggaaacaatttgccaaggaacaaaaaatgaatgagagaggcggcgcaaagaaagcaaaaaaaaaacatttttgagtcataatttaacagaaaagggccaaaaagggcaattagaaaaagaaaattggaaaacattcattcgacgggggaaaattgaaaatggggaaattccaattgcctaattaaataaagaaaattggaaatttcgaaaatgaaaaggacgaaaaaaacgacggagggaaaagaatggatggacgaagagaaagaaagaaagagaccaatttcataatgaaagagtaacaaacacgagagagaagggagagggggggggggaaaggaatttcaaaatgtgtggcaatttcgcgcaaatgattagttggcaatcttaagagaaaatggaaaaaatactttggaaattgaccaaatatatgcctaagggcatttttcagagagagagcaacaacaaatggaaattcatattacataatatatatatcatattgtggtgtcacttttaaagaaattgagcgaaagtgacagatgggggaaaagggaaagaaaattaatgggagagaaaaagggaaaaaagaaattggattaaaaagagcaaaagaaaaaaaagagagagagagagagagagacattggggacgaacatttggaagaagtaaaagtgcagcagcagaaggagatggatggaataaacgaagaaacgggcgaaatgaacggatgggaaatgaattggacagttattttgaaagagggggaaaaagggaaggaaagaggaagaaagtgaaaggtggagaaagaggaagaggaaggacagagaaagaaaggacaagcgaaagagcggacggaagagggaaaaggaggcaagggagagagagagagagagcaaaacgaaagataaggggacagacgaacggacggaaat

SEQ ID NO: 43913 - DNA, 1312 bp, Heterodera glycines
  unsure (1)..(1312): unsure at all n locations
gataaaagaaatgaaagggagagacaataaaanttgtctcgcattccttccttatttatatcncatctnttattatttaaaatatntaataaaagaaagaggaaaggaatgcccattgaatccgctttggccataacaaaagaganatctctaaattttaaatttaatatatggatgagttgggtgtatagatgagttgggtatggatgagttgggtgtatggatgagttgggtatggatgagttgggtttgactcccgagcggttcccgtgcgggggatcgattaagcgggtggtgcaaatatacccaaaaagaccagggaaatatccagaaaagcccataaattataacacgattgtctccattgagaaaaagagtactttaactagctaataaatgaaacactttagggtaagggatgtcttcggctcgacttccgaaggggtcgaacgaaggaacgccaagcagtgacgaaggggagttcaaaaaggtgggtttggaacgaaatcgatcgaaagctgcattgggttatcgtaacttttcgcttttcagattgtgatcggaatatgcgcaatgcaacggaaggccaacagcaagccgatgcgttcgatcatgcttaaaatgaacgagttctacaaggtatttaccggcttacaatgaatgcccttcatctctatttaaatattttccaatattttataaaatgttttacccttttaggacttcctcgattttgtaatttttcccgaggaaaccattctcaatgaatcggtggagaattggcccctctgcgactgtctcatctcttttcattccaccgatttccctctcaaaaaggcaattgaatatgaaaaagcgagaagaccttacgtgttgaatgacttacaccgccaatttgatttggtaagttattattattttaatttagtaaaagtgaaaaatactgacgggattgaaaatgtatatctctaatgaaagaatctgaaagaatttttttggcggcagccactccctgaagagttacagacccgggactgaagtggcaaaatagctttgggactgaaccgtccaatgtctaaaaacacatgaatcttcaacaaaacatacagaaatagatttatttttgtctctaatgtaagaatatgtgaaaattttgacaaaatgtaaacaaggaatccctttttgggcaatctttcggttcattggtcccgatttttttttttttaataaaattctggaaacccattctaagtctaatttgagccgctgagtacgaatctgaccaccttttcgaccaatttcgaatcccgaa

SEQ ID NO: 43914 - DNA, 953 bp, Heterodera glycines
  unsure (1)..(953): unsure at all n locations
cctccncgtttctccgtcacctgcgtcgaactgaggcccgttttccgttcaatttcaagcttttgttcagtcttcgggtatttgtccttttcgaaatactcgcgaagtatcttcaaactcaatttgagaaattttccgattgtttttccttacccttcggtcgccctttttgaatgagtacactgtttcctcttcacagacactcattggcggcggatatttcttccgaattcggtatttatccaccggcaccaattctttgtgcttccgctgccgttcctcttcataatgtgcagaaaaccttttttgaaaaactatctgatacaaattaatcggtgcttttgaaaaaaggtcaattttgaaatttaataaaaactaaaagggggccttttcgtttacaaaaacatcttataaattatgtctcacaattaaaacttgtttctgtggttttggcggtccttgatcatgaaactgatatcgatttcggtttcctaacctaactgtgaacaaaaaaatcacaaaacgaattttgaattttcgactttttgttcttggttaggttttagaattggtcaaaataggtgttagattcgtgatcaggactaaaaaatccacgaaatgcaagttttcacgaatttcacaaaaaaaatttgcaaaccaaaaggccctcccctccttttttataaaattcaaaattatttttaaaaaatgccaattaatctagaaattattttgtgatttcctacagcagtcaaaactgactggcctcaactggaaatcccgagtttttagatcttgactatgaaaaaatgcatttttgaataaaaataattaattagttgaataaaaaaaattattttcaggaaattataagtattaagccaatgatttggggcttcttaaaaagcatataatacaatataattaaaaatttaatttttcataaataaaaa

SEQ ID NO: 43915 - DNA, 1390 bp, Heterodera glycines
cgtcggtgggctggcgagtttactttgaacaaatcagagtgcttcaacaggcgtttcgcttgaatgttcgtgcatggaataatagaagaggatttcggtccgattttattggttttgctgaccgagataatggttaacagagacaaacggggccattcgtattgctacgtgagaggtgaaattcttggaccgtagcaagacggactacagcgaaagcatttggcaagaatgtcttcattaatcaagaacgaaagtcagaggttcgaaggcgatcagataccgccctagttctgaccgtaaacgatgccaactagcgatccgccggcggatttattcgccctggtggggagcttcccggaaacgaaagtcttccggttccgggggaagtatggttgcaaagctgaaacttaaaggaattgacggaagggcaccaccaggagtggagcctgcggcttaatttgactcaacacggggaaactcacccggcccggacaccgtaaggattgacagattgatagctttttcatgattcggtggatggtggtgcatggccgttcttagttcgtggagcgatttgtctggtttattccgataacgagcgagactctagcctactaaatagttggctcattgcttctgtgggcacaacttcttagagggattttcggtgttcagccgcacgaaattgagcaataacaggtctgtgatgcccttagatgtccggggctgcacgcgcgctacactggcaaaatcagcgtgcttgtccttcccgaaaaggggttggtaaaccggtgaaatttgccgtgattgggatcggacattgcaattattgtccgtgaacgaggaattccttgtaggggcgagtcatcaactcgctctgaatacgtccctgccctttgtacacaccgcccgtcgctgccccgggactgagccatttcgagaaattcggggacggttagtgtttcggtttcggtcggtatgcagactggatccgatttaattgcagtggcttgagccgggcaaaagtcgtaacaaggtagctgtaggtgaacctgttgctggatcattccccaagtgattctctaatagaatccctcttgttctcgatttggttgaatggtgattatagttttctcgtgggttcgtttctggttggcagcacctgtagtggtgtccgttgaattaagaacttacatttttagcaaaatatacagtaatcagcgcctcgttctgattcgaaatatttactaatgaaagttttgttttttatatatttgctcatatatatatatatcatcaatttgactaaaagtgcgcaccattgtaaaaaaaatgaagtttcgaaacaaaagttaaaaaaacaataagtgtgaagaaacagtagacactg

SEQ ID NO: 43916 - DNA, 1456 bp, Heterodera glycines
  unsure (1)..(1456): unsure at all n locations
tcataaaatgggaggcatttagtttcaaaatacgtataaatgaaaattgtttgaaaattaaataattggcgaaaacccaaaataaaactaataactaaaaaacttatgaatgatacaacagggcgcgggatggaaaattttgaaaaatcagaacatcgaacacgaaaaatcagattatatggtctaaattttatttttaatattttggattttttttaatctaatcagtataattggaatttatcaatgtaaatgcatttatcatttgttacttattgcgaatattttagtcagtagaacataaattgtacacaaaaaagagactttacgaaatggctgaagagaatatgctttatataaatgcttaattatgtcggcttattatttgtcgtgaataaaactttttggttacaatcatttttggtcttttatctgacttttattcatccgtctttgcggtagttaaaggaaataaattttaccaaaatttatgcaagaaaactaattaattcaaaataataaaagataatataagacagttactaagtaattgatttcattttcaattggcaaaaatattaattagttcatacaagtgaaaattaaaaaattctagctttaaaattatcatagaaatgaagaaacttgcgaaaaatgtgatcgtaaggagctgtattttttccagattttatgaaaaaattttcggaaaggaaacgggaattcaaaataaaaactttttcgttattaagatttttgaaaattggaaactaaaatacagttaaaaatcagaaaccaagtttaaaaaagattccgattttaggctgtttaaaacttttaattccttcaataataacaaacatttaattgcaaggaatttctcaaaatcataaacaatttaaatatagcattcatttattttttaaattctattttaatgagttatttatttattttttatgataattttttgtttttataaattatttatgctaatgataattttatttgatattttaaagatttatgtaaattcaaaataaggtcattttcatgcctaaaaagattttgaaatttggataattagtagataacccttagtgctatcgaatgatctaaagaattaaaatattcttactcttaggaaaatttataagcaaaaattttttttgagaagtagagttaagtaataattccatttttatttgcttataattagggatgggaaattaagtcatagcaagcaatttaaaaatgaataaacttaactaaaaaagccccggtccggacactccgccaccgacaaaccccgaaatgcaccaaattttataggaataatccctcgtataggttgactaacttaacctgaaaatatttcaactcttaatggtttttttttcgaaattctgagttttcaaatagtttattttattttttgcaaaanttaactcataaatat

SEQ ID NO: 43917 - DNA, 1259 bp, Heterodera glycines
atgcccaatattcatcctctctgattgtgagtgttcttctccctccatttttccatgccgttcgttcgttccgccaaattcgctatcattcgccacaacttttcgctgctgttccgggaataaatgtcgttgcagcaaggtcttttcgatcacatagctccgatttccgatcagcagtcggccgtcctttggcaaagtgtccaccgtggccaaataaacaaagccgggcggaagttgcggggaatgatccgccggtgccacttcaatttggccttttggtctgccattttgttgttgttttgttgcattttgttcgactttttcgtttccatttgaaaatgaaacattcaatgcttcgcttttaaacttttgctccgattggttttccgccggcagcggatcaccgattattatcgtcggaagtgagtccaacgatcggtcttcttcttgcattttttccgatgacttttctgtttgcttttgctgcggttctgaattgtttttcgatgccattttcccatcctttttcattggagccgttcgtcccgaatttgtcggctcgggcgaatcgcgatccaaaattcgcggcatttgttgtgctggtcgattttgcttttttggcccaactcgtcctctgttcgttgccttaaggtgatcggaaggtggtaaatgtgtgagtgatcagtccttccattttccgttcccacctttcccaatgtttccatgattttctgtctctgtgttttgtttcgacttttctgtccattttcgaccgctttttccaccaaagaagagactacttcgacccccgagggtaaatcccgaaacacttcttcctttttcttctcctttctactctctccgttcgtttgaagttcgtcgtcgtttcctcctgagatgcgtttctttccttcttcctttggcactgtctgtggccgttttgtcgttggcacgggcggccaaagaattggactcggttcgcttttgcttgtgaccggcactaatttgggccatattttaacttcgtctcgttcaatcgccgcttcgcccgaccattccgcaattccccgaagcgtttgccccgccgattgcgttttggcggcgtctctgcggactcggcccgattctctctaaattaatttgtttgacaattatttctgtaaattgggtaatttgttcaaatttccggtttttaatcaccgcctcattccaattgttaagctaattaattccttttttgccccatttcacattttgac

SEQ ID NO: 43918 - DNA, 1097 bp, Heterodera glycines
aacaaataaataacttgttcaactgtgtgttgctaggccagtgcctacgcttctgaggacggtgtgctgaccgagcaaatgattgacacgaacacggcggaagtgttgcgacagcatcgacgcaaaatggaatggttggcggcggagcgagcgtcgtcgtcggcaatggcattggcatccgtcacggatgacggcgagtcggcaaaacagaagcggtcaaagggggcggctgctaccaagaaaatggggacagatggcggcaacggacagtgaatcattcattcattcattttggtgatcacttacacccatttttggactgattgattggctcattgattctcgactcttggccaaaaaccaaatgtgccgtttgtttgtttgtttgtttcttttttattgttttattgttgttgtttgctgaatttatcattattttttccatttttgaagaaaatttatagtgtggccacgtttaaaacatatgttggattttctcttaatgatagacatgtcaattcaatttaaattaaaaaaaaagatgaatcgaaaataataggtaataaaattgaaattccgtcacccctgtaaacacattaacccataaaacttaggcgaccgtcgctgtggcttgtctccaaataaaaattcaaattaagacacctgcattttaaattgggcattatttatatactagagaatggaattttgttagttccgggcccgggcctagacaattggccggtacggtctgtccggtccaaaaaagcccgtgttttactgggcggcccgataaagcccgccggacacgtctggtctctaatttatacactgcaaaacgcaaccgtttcgctaccgtaacccagttcaccgtaatcacacattgttattctaggctaatgtaatgcgcgacggctgttaattgtaaagccagcatacaagaggagaggagaccaccacatttcgggccggtttcaatttcggtgacctttcccctccccctcttcccgcccaatttcccttccggggatgtccgtccccaccaccgtcgacgagacgactgaccaccccccccccctcatttgtttgcacttgca

SEQ ID NO: 43919 - DNA, 1039 bp, Heterodera glycines
  unsure (1)..(1039): unsure at all n locations
accacattttactggtggaaagtcnncaagtaccttattcggacaactacgtgtcaatgagcacagtcgcctttggccagttgtggaacggaaaaatgggaatatcagatggggtgcgctcttttctaaaaattcctcttttcgtctaaccatccctcccttttgtgcactatttcgtttcaaaattgaatcattttttttggccttttgaaataaattgtgaaaaatatacgaaaattattttagcttttaattatgcagtacaatgcttttaagccccgccgtgaggcgggacagttccaaaattttgtaccacattttactgtggaaagtccaagtaccttattggacaactacgtgtcaatgagcacagtcgcctttggccagttgtggaacggaaaaatgggaatatcagatggggtgcgctcttttctaaaaattcctcttttcgtctagccatccctcccttttgtgcactatttcgtttcaaaattgaatcatttttttttgtcttttgaaataaattgtgaaaaatatacgaaaattattttcggttttaattatgctgtacaatacttttaagccccgccgtgaggcgggacagttccaaaattttgtaccacattttactgtggaaagtccaagtaccttattggacaactacgtgtcaatgagcacagtcgcctttggccagttgtggaacggaaaaatgggaatatcagatggggtgcgctcttttctaaaaattcctcttttcgtctaaccatccctcccttttgtgcactatttcgtttcaaaattgaatcattttttttttgtcttttgaaataaattgtgaaaaatatacgaaaattattttcggttttaattatgctgtacaatgcttttaagccccgccgtgcggcggctccccttttgtgcactattttagtttttataattgattccggactttttggctgtttgaaataaattgtgaaaaatatacgaaaattattttagcttttaattatgcagtacaatgcttttaagccccgcc

SEQ ID NO: 43920 - DNA, 1428 bp, Heterodera glycines
  unsure (1)..(1428): unsure at all n locations
gcattatttccgtttatttttggtctgcaaattctgcccaagcatgaattcgacanaagtcgaaataaattttaaaagagaaattagagtccaaataggtcataattagggcgttaatcacaaaataagtcattttttataaaaatttttagccagggctcccactgatttatcagcattttgctgatttcatgggatcaaaactggtttttttatgagatgctgatttttgctgctttttgaaaaactcctcaaaaatggccattttatgtaaaactgttactaaaaactccgatattttcaaataggaattttttagaaaattttcagatttttagtgtattttggggtgttcaggtcaccatgatttcatggggcaatgcttttgaccgtgactgtagataattttgtgctttttggatgagcctaatcatttttcataaaagaattttcagcctgctcgagttttttcaaggactttccggatttcaagccattttcgtgttttcagagcacccttaaggaatgaatgatctgacgaacatgtgtattacaaaaaatccatcgttttttttctcttcgtcatttcgacttctcaattagtgcctattttctagggtacaaaaagtttttgaccagttggcattttgtctaaaatttcttaacaaaatgcaataaaaacaaaaatacccccctaagaattgaccccataaaattccgaaaaatacacccctaaaatcttggattgaatatacacaaactttgaataatttatttgtttcccctatattaaacaattcaatgatttctttttatcaaattttcatgcaacaatataattttactaaaagaaataaatatttagtggaaaatgattaaaataaattgataaatatgcccaaagaataaattactaaaagttatcagaaaaagaaggaaaagcatgaataaacgaagaaagcatattcttttttcctcagaagttaacttttttgttctgtgtgggattaggcccggatggaacttcatgctgttgaaaaacaaaattaatgataagaatagttttcttgtttaacttcttcccgttaattgaccaatcttttaaagaataactaatgcatcttgctaatcttaccaaatctcggcccggcatttgaggtggtggtgcacattgttgttttttaactgcttgaacttctccacccttttgggaagcgtttgccgcgcccggtgccacggatgacagtgccaatacgccagtgaaaatccgtccaatctttgacatcattccgttcgaattattcagattatcatcatcggcattttcttcaatgataaataaatttatttttttaacaaaacaaaaacaaactctttgattcagtggatgctaataataaganaagccaaaaacactacaagaagcga

SEQ ID NO: 43921 - DNA, 1159 bp, Heterodera glycines
taattttttaagcatttttaaatatttgatacggtaaataatttggaattaattttcattttttagcatttttcagttttcaactatttttattacattctaaaatgtcatagccaacatgtttttttaggtttatgtataatgggtaaattagtgaattttcttatatcgtaaaatcaaataaaatatccgttaaaaattgaataattttgggccaaatcttttttcaaatcgtcacgacttggcatgattccagtttttcaattttttcaaaaatccatccactaatttatcccaatccttttttccccagaaattgtcgaagtggctgaagaaatcggtctctgccacaatttggcctatttggacataagcacaaacattgtgaccgggtaggcctccgttttttccaaaattttcgccgttttttaaagtgaattttctttgttcagttttcccaaatcgtttgtcaacctcactcagttgtccagcctgaacttgtccaacaattccatcacccatctgcctcaggacattgacgggctcgtcaatttgcaggcacagtttttattttttaagaaatcccattaattattcactaattaattaactatcaacgcccttgaaacccgaaaaatgggcaaatttttgaatgtcaaataattcttttaccgttacaataggtattaaaattataaaaaatagttgccagcatcaaaaaaatgctcaaattttgcatttttggtgttgttgcacaaaattgttgggcaacaccccgaatttgagggaatttcccggcaagtttttggcattgattaactctctgtttttttaacaaaaaattcttgtcgaaggtctttcacccctttactcttcccctcttaaaaggggaaaattcgaaatttttgcttaaaattttcaaaaaattttcccgaaattcccaatctttttttactctgacccctcttctaggaggcttttattttcctaaaattcaattttttcaaaaagccatccactaatttatcccaatttttcgccgttttatcaacgcccttgaaacaagaaaaatgggcaaatttttgaatgtcaaataactcttttacccgttaaataggtattaaaattataaaaaatatttgccagcatcaactgggac

SEQ ID NO: 43922 - DNA, 728 bp, Heterodera glycines
aaaacgagagatgaaccaataaatagagagtgcagagaaagaaacatctctctttttggcgtactatttctttatctctgttaatagagaaaacccgaatttacttcatcctgtttaacgttttttttctgcttgttagacctacaccaaattttgcataccgattgagaaaaattttgcgcatagaataatacgtttttattttttgtttatacgttagttcaaatgttataagaaaaacaaattttcgaagactcatatcttttttctaactcaccaattgtttagcatttgcttagaaaaagattctcctcatcagcagctttcgaatgataccaagattgtccagtttggttggcaaaaactctcaaaaatgattcttgaatacgctgacccacaaaatgtccaagtctcgaaattgagtttttttattattcggatgggcctaaggttagacaaggcgtaatataaagggtatattcgtattcagcgaccccgaaaaccctaaaaatcctaaattagactcattttgtttttataaattttgaaaaattttggacatttcgtgggtttttactcttttggacatttcgtggcttggacactttgtgggggtgcccttgaatatcgtcattttttaaatttttttctttctctgtaaagaaatagtacgccaaaatgagagaaatgtatttttctctgcactctctatttattggcacatgtct

SEQ ID NO: 43923 - DNA, 1278 bp, Heterodera glycines
  unsure (1)..(1278): unsure at all n locations
aaataacttttttagttgtataaatgcgtattttttaattccaaaaaaatctttacgttttcattgtcatggtttattgttttttntagttggaagaattcagtttttatttcttatttttacgaaagcaagtttttaactgaaaattatcaaaacatttaatttatctgacaaggttgcttcagatggtcgtgtaaaatttgtcattattttctatgctcatccgaaaacattttttaggaaaagctaaagtaatgacatgacaactacgaaattaacaggttaaactttgtgaaattatatccgtttttgatttttttttttcatgtgtaaatgcatgaaattcaaaaaatattaaaatcaaacattgccaacagaaaaatttaatcaattaaatgccgcattggacatcagcaattttctcaatccaacaaccgtcgagaggagaataaatgttcaaaatgcctttcaaaaaacattttttatttaaatgaaatttttgataatttttttgtttttacttgtgccaaataaactgttacataatccgccacttgcaacgccaatttggacaaaatttgtgccatttgtggccaacaaaggcccaccgctatcgcccttaattattattttgaaattaattatttaacataaattaagcaaatatttaagcattttaattaaaatttgccaacttgctcaatggtattcttctcaatgcaaattcgttcctgtccatcattaaagaatgatttcttgcatttcactaattgagcactgcgacccattagcgttaatggacttttttgggacttttgagtacaactatctaaataacttactcatttattaattttattttaaatttaatttattcaaatattaataaatatgattcaattttggatttttttttaataatatttaagcttgctaattaattaattgactaagcttactctttaaatatccccatccagcaatatatgcttttccttcttcaaatttttcacgggccccgcaatgaatgcaaattggaaaaattgttgatgaaagttcgacttctttatccatctaaaatgtatccgatttaattttagaaattattttttaaattgccttaattaatgccaaatcgtttatgccagccttcctcttatacattgggtggattatcacattcaaatcggtgtgacggagcaattcaactaaaaatccatcatactgtttgctcgtaagattgcgcgagttcgacccgaaacctaaaaatggcaaaaa

SEQ ID NO: 43924 - DNA, 842 bp, Heterodera glycines
  unsure (1)..(842): unsure at all n locations
aaaatgcattaatttatttcaaaagaatcattaaaatcactaacacntggtccataacacaatttgaaaccagaaattccgaacaccgaactcaaaattctgataaaaagttgaaaattcaagttcttttaaatttcatattttgttcaacctttgtttacacacacggaaacgaactgaaagtcatccctgatacacatcaatgcttcaataaaatcgtttaaaccattttagattaaaaatcaaaatcgaaaaattccaatttcgactttattcgaattcaggctggtgttgtaaataggttgaaatggagtgctcagtagagaccggaaatttcaaatttgcggatcccgctgcgggattggaactcaaaattctttgcgggacgggatcccgcgggattaatcccgcattttaaaaaaaatgtgggattgcggactgggatcccgcaaaaccccgcgcgggatcccgtcccgcgccggtctctagtgctcagcgcctcaaaatacccaaagaaacttgttaaagaattcccagaaaaaaaaaatttcgggaccaatgatcgacatgattgctctttaaatttgtggaaaatatagaggaatatatcgttctgcaatttttccttcctgcgttaactttcaatttgaagcatattaaattggagagaaactttgctgaaatataacgcattgaatgcaattaactgttaaagaatttttgcgtttaatgcattttgttgcacattcagttgacacttttcggttgcgcatcgagtagcggaaagcgttttttgaaatttttgcgtaaaaaagtttcttcagaaaatttttgaaaatttt

SEQ ID NO: 43925 - DNA, 962 bp, Heterodera glycines
attcattacccaaaagttttttacaaccacatattgccaatctaatttcttgcagattgaaagccatccattgcctgccggttctcggcacagcaaagcactaatagggtgtttgactcacttcaaaaaataattcattacccaaaagttttttacaaccacttattgccaatctaatttcttgcagatttaaagctatccattgcctgccggttctcggcacagcaaagcactaatagggtgtttgactcacttcaaaaaataattccatacccaaaagttttttacaaccacttattgccaatctaatttcttgcagatttaaagctatccattgcctgccggttctcggcacagcaaagcactaatagggtgtttgctcacttcaaaaaataattccatacccaaaagttttttacaaccacatattgccaatctaatttcttgcagattgaaagccatccattgcctgccggttctcggcacagcaaagcactaatagggtgtttgactcacttcaaaaaataattccttacacaagttttttacaaccacttattgccaatctaatttcttgcagatttaaagctatccattgcctgccggtctcgacacagcaaagcactaatagggtgtttgactcacttcaaaaaataattccatacccaaaagttttttacaaccacatattgccaatctaatttcttgcagatttaaagccatccattgcctgccggttctcggcacagcaaagcactaatagggtgtttgactcacttcaaaaaataattcattacccaaaagttttttacaaccacttattgccaatctaatttcttgcagatttaaagctatccattgcctgccggttctcggcacagcaaagcactaatagggtgtttagctacttcaaaaataattccatacccaaaagtttttttactaccacatattgccaatct

SEQ ID NO: 43926 - DNA, 1047 bp, Heterodera glycines
  unsure (1)..(1047): unsure at all n locations
ttcaaaaaaccaaatattcncaacttttcttggccataaatttgttcaaaattgacgaattttttttaaaattttgcaggctaatagagcatgttaagagcattcgaatgataccaagaatgttgaatttggttgacaaagaaaaaagttatagtgcaaaaacatgctggggccgaaccgtgccggggccaaactgaggttgaccggtttagggggtgcaccaatacaaaaaaatttaaaatttcaataaaattattattatatattagccttttacatatttgcgcattttccattttttttttaaagaaatttttgccaaagaatttgccaagcttcaattgaatggccacgaagctgatgggtgtgcgttggttaacacaattgccaaatgctttcaaataaccaaaaagtcggagcttgcacgcaatttttatcaaattgctgccaaaatgcagtaaacattaatttgaatacaaattaattaccccactaattaatcactaattaggccctcaaatgtcactgttaaaaatttggaccaaacacaattggccttggtcaaaacggaagcaaattacgacgacaattttccagaagaattaaaagcaattgaacacaaattggaaattgccgaattaaagggttattttccataaaaaatttttttataaatttattttttaggcgatgaaatggctcaaatgtccgcccatggacaaatggccaaacttttgtctaacaattttttaaaatttgatttggccatttgccactgtgccgaacagcttcgacttgccaacaaagtagggtagcgagcactaaaccattccgaagcctatctctaaatttaaaattttttttgaaattttttcagttttccgtcaacccaaaaaatgtcaatcccatccgcttggagttggccaatctgcatttgaaaatcagaaacactgaccaggcaacacagaattttaagctaatattggaggaacagccttcggatccgggcgctctgtttggtcttggccaggccttttatttgacggt

SEQ ID NO: 43927 - DNA, 1531 bp, Heterodera glycines
  unsure (1)..(1531): unsure at all n locations
acggcagggggaagagacggagcagcacacggggccaaactgagtcgaaattaagcggaaaatggggcggaagaggaggaaatgcttaaatgggacagataatttggggtggggaaatttgtttaaataaaattttaaaaggaataatgaggaaggaataaaaattaaaatatatatagggtctatagtttatattggggcaattaccgtcgtcattccaaaattcgttcacagaattcgctggtcgcttcgactgaaaggctggaggagagacacagtgccgcgaggacccaatcgttggctctttacgagttttgatgcagcaaaatatcagtgtncaaaaagggggggggggtaccatcttaaaggtataccaaaattttcatacaaggcaaactacagggaaaaacctaaaaaaaattcgctcccaattttcagtgaatacaagcggcgagctgaacaagggcggtgtacgtcatgacgaactgcttccattggccaaacatgtcaaggaacagtgccactctttgacactgattggtgggtagaggcccaaaattggaaaaaaaattatttgaaccccgctacgacttgcccttttccgccttttctcgaaattttcttataaaaattttgtgagattacggaatcgggaatcccgcattgcggttgtccacagagttggagctgtccatgggaatgagtgccgactgactatcaattgggtgagtgtgccaattcatctggcttttccgatcacttctcagcactgatcaaacagttgttcaatcaacttttaagcgatcaaatatggcagtacaaatgtgcgcatcggttcgaccatttttggtgcacgaagtctaattatattttcagccggaatttctataaaaatgttcgtgtgtaacctatctttgtctattctgataagtaagaaattgaaatattcgtattactttgcctcccttaaagctttataatgaaagcgtcgatgtctatttaggatgtgccatctcaattctgtagttccactttgcgaatccaaagaaatttgagtcgattttacaaaagacaaagtgtcgaaatgcgcagcattcctaggccctaaatgttactgacagtatcattcagagggcatgctatttttttgtatgcataaatcgaaatgtcgagaagggtatttgtagaataagtgtgatctgacattgtgtgacatgtcattctgatttcatttgattgctcgacacactcctaagcagttgcgcatttacagcaaagtaaatttaaaatttatttgatgtaattgactaatcaattaattcttatataaaaaagcaggggacggataaatatttgctaaaatacgccaaatattgaaatttttattttcctaaaaaagccttaaataatcgcatttttaaaattaaattgttcttatattattaataagattctattgcaaatatgtgtggatgacatttgaataataatgatgacacttctccttatgaccggaaaaatttatattaaa

SEQ ID NO: 43928 - DNA, 1210 bp, Heterodera glycines
agcatggtgcacccccagcatttaagatgagtgaacctttaaagaaagttgtttttttcctttgaatatgaaatcggctcccggaacaaatagcaattgggccaaaatgtgaaaccagcttcatgtctatcagtattactcccaatcagaccgggttgggttttcatgaagcgaataagatatgccacccaaaaacgaagtggtgcatcccaacaaaaaccataccctcgcagcgtctttggtgtgtgtgaagtagacaaagccaaagccccgcgagcgtcccgagagacggtcgtacacaatttgcaccgaatcaacctcgccataacggccaaacaaatgcttcaggtcgcgctccgtggtatgctgaaagcaaataaattttaaggggcctatcgctcgcccactccaacaaacaattcgcatttacttcaaaaagtaaacttcgggttcgctgtaaaaatgcatgccaccaacccacaaaaaatgtttttgcaacttttaatgaatttctaagaaaattttgcgcccctccctcaatatgtttccccatccccgagactcacaatcagtcacaattaactgacacaaatattgaacacacacaactgaccaaactcatgccaaacacgcccaagcatgggttcggatttgggttgtcgcgtccgtcatggaaacgacgcgagccgtagtaaccgccgccgccaccaccaccgcgtgaggagggcaaatcacgcgagcgagaacgactgaaaaatggagacggattcaaattagaaatggccaaaattctgtaccaccgtcgacccggcaatcccataattttacacaaaaaattacgttttttctgtttcacccaaacaaccggctgagagaaaaccacctcctccttttcctttctttccctctttttcatcattgtttgggagccttttttgcttttttggcgatttcctcgtgccaccacacagtttgctttgattgaattgaacagttttgattgatcggcagatttgtgaggatttgatcgaccgattgattgattattgtgattgatcagttggttggccaaatgattgatcgtttgattcgattgctttgtcatcaattgggaggcccgaccgcacacattttgagaaattgaggtttgacaatttgaaattttgagagtttctttctttctattgctatgtgtgtttgattgtgagag

SEQ ID NO: 43929 - DNA, 932 bp, Heterodera glycines
atatgaccaattaaacgcttacttgatgcgacggtccttcttgcgcagcgcgttctgcgtctccttgtggcggcgcgtctcctcgtcaagtgcggtctccaggtcgcgaatgcgcgtctccagcttggcaatcacgcgcttgccgcccaacagtgcagcggcctccgcctcttggatttgcacctgcagctgcttcacctgctcctcaagcgacttgcgcagagcgtcaatcttcatcgagtgttcctgctcctcgtgcagttgctccacagcacgcgctgcgtccgccaacgcacggttggcactgtacaaagatataacgcgtaactcgaataacgaccacacttaccgttcgtccgctgcgtgcagttccttggttgcctcgtccaagtccgcttgtgcagtagacagctcggtctccagcttgttcttgattgcagtcaggttgttgttgatggattgcaggtcgttgatgctgcaattgttgtagcgcaatgatcaacttgcactcaatgcacgaggcgtgtacaaattttacttaccgtccgtgcgcctcttccaggtccaactcggcctgcttgcgtgcgcgcaccgcattgtccagcgcagtcttgcactcctccagctctgccgccagtgcggacactttgcgttgggcaagcgcgtactgcaggtgacaaaaacaaatacaatgagtcacacgctcgcactcaagctgacctggtccagcgtttgctgcaactggcgctgcgtgtcctccaggctggcctgcaacaccttgagctgctcgctctgcttcttgatggtcttctgtgcctcgatgttggcacggttcaaattgtctgtgtagcataattaggcaggcataattacataagatataattagttaattatttcctaccgtatcattaatgaaaaggtactgtagcg

SEQ ID NO: 43930 - DNA, 1347 bp, Heterodera glycines
attgaaaatttaaataaatttaaaagtgaaaatagtaaaaaagcttacaacaccttcgattcccaggacgtctccgttccaagtactaagaaggcccaacgttgcttaacttgccagatcggacgggatggagtgctttcaacgtggtatggtcgtaagcgaaaggactgcaattaaaggcatttaaataggcatatttaaaagagcctatttttttgccttttcacaagagaatttattaaaaaaggcaaaattcgccttaaattaataaggtgaaagtttgaaaatgtttattaaaaaatttcaggatgaaatataattaaaataaatcaaaaagaaaaaaaataaatttatttttctaaataaataaaaaacattgtcagaggcagtgtctgccgaaaaaatagacaaaattttttcaaaaaagccaaaaaaaaaattgaaaatttaaataaatttaaaagtgaaaaaaattaaagtaatttaaataggcatattttaaaaaagcctatttttttgccttttcacaagagaatttattaaaaaaaggcaaaattcgccttaaattaataaggtgaatgtttgaaaatgtttattaaaaaatttcaggatgaaatacaattaaaataatcaaaaagaaaaaaataaatttatttttctaaataaataaaaaacattgtcagaggcagtgcctgcctaaaaaatagcaaaattttttcaaaaaagccaaaaaaaattgaaaatttaaataaatttaaaagtgaaaatagtaaaaaagcttacaacaccttcgattcccaggacgtctccgttccaagtactaagaaggcccaacgttgcttaacttgccagatcggacgggatggcgtgctttcaacgttgtatggtcgtaagcgaaaggacagcaattaaagtcatttaaataggcatatttaaaagagcctatttttttgccttttcacaagagaatttattaaaaaaggcaaaattcgccttaaattaataaggtgaaagtttgaaaatgtttattaaaaaatttcaggatgaaatataattaaaataaatcaaaaagaaaaaaaataaatttatttttctaaataaataaaaaacattgtcagaggcagtgcctgcctaaaaaatagacaaaattttttcaaaaaagccaaaaaaaattgaaaatttaaataaatttaaaagtgaaaaaagtaaaaaagcttacaacaccttcgattcccaggacgtctccgttccaagtactaagaaggcccaacgttgcttaacttgccagatcggacgggatggagtgctaacgacgtggtatggtcgtaagcgaaaggactgcaatta

SEQ ID NO: 43931 - DNA, 806 bp, Heterodera glycines
ttctcgaaatgtgaatatttttttaatactttttttaggaccttcggaggcggatcgcatccatctgactacactaaaattcattcacccaacaatcaattcactttctgtttacaaattttggattgctaataactgcttttgccgatattaaaatggttttatcatatttgaaaagaaatgagttcttttttttactaatttatggcgcagtaaattaaaatttctcgtgttgaaattgcgcgttagccaaaaaccaacaaatgaaaattttttgcagaaaatatttataacttcgccaaaaatgaaacaattttgtcataacttttttgaaatttaacgaaatttttgtaatcttgcaggctaatacatacttagtgctatcgaaagatataaagaattaaaaaatggttgtttttgagcaagattggttatatcaaaaaaattttcatttgatggtttcttgactaacgtcaaggcaccgaattaccactccaaattactgaaaaacattagaattgcacattttattcggcttatttttgcttcgaattacaacactcttttgtaatgtgtctagctggggtataaattaaaaaatgttttgcgaagcttttgttgattgatcatgttcatctttcgtcgccaaattcattgaaatccggtgccgcggcctccaaaatttcgccatttttccgtccgtttatcggcgcccccatccccaacctttgaaaaaaaatgaaattattaagatgcaaatctagtatttttctgcaaattgttcattctttttaaattggtctaat

SEQ ID NO: 43932 - DNA, 1274 bp, Heterodera glycines
ataatataattgcacgaaaattgatccacccttcgatcttttatgaattttcaaatattagggccaaaatcccgagggccaaaaaattgccaaaaaataaagaatttttaaaaaattccaaaaattatgaaacttaaaatagacatcatattcgtactcagcaccttattttaccccagaaaaatatttttcacccccattttcgtccgaaaaaaaatttccgaaaatttctagggggcctagctcgaaaaattttgaaaatttccggccatatggcacaccattcgatagagcttaaaaagctctacaattttgccctaaggcgtttttttgataaaaccaacccctgacgagttatgggcccgggactcaaaagtcccgctcaggccaaaaattttttctatttccgggaaaaaatcgaaatttttccgaaaaaaataccagtcgatagagctcgaaaaactatgttttggaagtggtctccgtttctctgggaaaattcgttaaaaattcctaaaattcaaaaacccgaaaaccgttttttaggcctagctcgaaaaattttgaaaattttcgaaattttaaaaactggaaaaatccagctcattgaactctacaataagtctgctggtaactccccgcccagatcaaaccctaatgagttattcaaccgggactgaactggacaaagttggtactgaaaaagtccacgaacctacagcctttcctattgcagatagaggcttggaattttttttgttttttagaaaacacttcaacttagccccctcacagcagacattttttgatttgggttttagaaaaaaagttacgggcccccaaatgcacgaaaaaatgagaaatccgtccctgggactcagtcgtccgcgctaaatttttttctatagttttcccggattctcctcaaaaagtgtaagacccttccactactttcagggcgctccgccgcccgctcggggggggggatttgtttttgtatatgaaaaaaccccttttaaaaaaatataaaaaaaaaaaaaaggggggggggcgccgcttttttttttataaaaaaaaaaaaccctcctttttttgttttttcccctcctcccaagaaaaagagaaaaaagaaaaaaacaaaacaaaagagtttttttttttttttatttttattaaaattttttttttttttttttttttttttttttttttttttttttttcccccccccccgcccccccccacacatctttttttttttttttttttttttt

SEQ ID NO: 43933 - DNA, 1316 bp, Heterodera glycines
  unsure (1)..(1316): unsure at all n locations
aaaaccattatttattcaggctcttgatggacaattagaattaaaatctaattaaaatatgagaattataatctgaaattttgaaaaattaattccgtatcatgagaattagacncaggacagaattcntaggattaaaaattaaaaatattttctgttcatggaatttatataagtagaatgataaaaagtttatgtgcttaatattttgtaactcaaaactattttcaatatttatttttgcatttttatgcaattttattatttgtatttaatttgactgtttttcaggttaattgcaccagtcgagaagaaggagcaaattttaaggaaagggcacaaagaaaagggcaaaaagagacaaatgtaaacagaattttagaactttaattgccaaattcagcaggtggaaaacgaaataaatgcagcataaagaaatcaatgtgaagaaacattttgttttttggaaaaataaatttaaatttacgaatcatttcattcgcccaaaatgttcaggaaaagaattaccttctttagatggaaaacaataaattttgttataaatgaatgactaaaattccaattggagggatgctttttttcctttttaacaaaaaaatggcctcataataaaatttaaaaccaagacagtaaaactaacggaaacaacggaattctgtccatcactgctctgaatgtttggcaattatgaaaatgaattttagcaagtcaaatgaaattttggaaattttacgaaaaacttcagcgaacatttgagtgccaagctcaaatttatcaattgtaaagccgactttgaaatttggttctattattacagagatgccaagtgcacttatttctagttatacagattttgaaggcctaaatcttaaaaattaaaatgcacaggtttgtaagaatgaagtgattacgcctgtaattctaacactttctattttgtatatttctctaaagtcagaacgattttttctcagctgggacccaaaagtaacaattttggtgaaaacaattaataaaatcaaaaattttcagaattttcccggcgtcgcctattgcaatcgcttgtaattcttttttgcagaaaaatttgcctcataacgaaaatttaaaattagatactgttaaattaacgaaaaaaccgaattctgcccatcattgtcccagccacgaaaagtccaaagtagcaaaaacacaaccaaatgtcccaaattctaaaaaagatagaatgatacaacaatttttaattctgaataactttcataattttaagtttaaaaaagaccaaaaattaataa

SEQ ID NO: 43934 - DNA, 948 bp, Heterodera glycines
  unsure (1)..(948): unsure at all n locations
ttcattatttatttatttttgcaaaattaattcataaatattttttagaacgtgctccgaaacgcaccaaatgttaattaaaagttaaataaggctctctgatgcttttctatcaaaagggagatgaataaaatttttaaaaattttaattgctttntaaataagccaaaaagtntaggcttatattttaaaaagtttcatcgaacctagcgcactaaaatcgatataatctctccaaattttgcaggccttctccattgtaaaggactaacttaacctgaaaaaatgccaacgcttgttgtttttaaaatttttcgaaattctgactttttcattaattatttattattttgcaaaattaattcataaatattttttagaacgtgctctgaaacgcaccaaatgttaattaaaagttaaataaggctctctgatgctttttctatcaaaagggagatgaataaaatttttaaaaattttaattgctttttaaataagccaaaaagtttaggcttatattttaaaaagtttcatcgaacctagcgcactaaaatcgatataatctctccaaattttgcaggccttctccattgtaaaggactaacttaacctgaaaaaatgccaacgcttgttgtttttaaaatttttcgaaattctgactttttcattaattatttattattttgcaaaattaattcataaatattttttcagaacgtgctctgaaacgcaccaaatgttaattaaaagttaaataaggctctctgatgctttttctatcaaaagggagatgaataaaaattttaaaaatttttaattcctttttaaacaggccaaaaagtttaggcgtatattttaaaagttttatcgaacctagcgcactaaaatcgatataatctctccanaattttgcaggccttctccattgtaaaggactaacttaacctg

SEQ ID NO: 43935 - DNA, 684 bp, Heterodera glycines
aattactaatcaatactctcaatattataacgaacaattttagaaagggcggaagagatctttagcaataattaatgcttcgtgggttggacccaaaaaagtattcctcgtccatcacatcaaaattttcaatcattgcatcaatggaatcactcattctcgaaccaatcagtcccaaggacaattcggaggttcgtttactaccatcgtggatggattacacattttgcactcactcacctttccaatacaatagccatcgcagtaatgacgctcttgaaatctaacgccctccccccccatgaattacggattgtccgatgaattatcaaatgatggcacaacaaacacaccttgagatggcattccatgggaatttggtgtagaagcgaatcttaaaggcaattgtatagaaaaaaacagaagaggagagagaacggcaagagagttgggaaggaatgactaaaatttacggaattcggaccattaaaaatctaggaccaaaaaagaggaagaaacaatccatttgccagcaaaccttccagtcggtgtagtaatggaccgggtcgtccatttccctgatactcggcacaaaaatgtcccaaaggcagaagccgacaaaagcggacaaagtgccgaacaaaaaccatttgagcaagcgccgccgtctgccgcgccggaggg

SEQ ID NO: 43936 - DNA, 1686 bp, Heterodera glycines
  unsure (1)..(1686): unsure at all n locations
aaattttntgttaataaatagaaatgttgcttatatgctttaaaacatggtaaatttattctaaaactttatttaaatattttaacttttcgattttgagatctaatcataacaataaggaaatgttaaataaagcaactttttaaaattttatttaaataatttttataaaaaactaaacctttaaaattggcattatttttacacttttaatgattcttatttttgctggcatttttaattttattattgttgaattaaattactaaaaatcattgaaacttttaatattttataattattttacaataatttttgtaaatttaaaaaaataattttatatagtaaatttttaaaaaaattgaaaaatttattatttttgttatcttgtttcatttttcgttcttcataattgaatttataataaattgttaaattaataattttcataattatactaaaatagataaaatttgtgttgttatctttttgtttttaatattttatttctacactaaaatgtttttttcagtagaaaaaacccaaaacataattttatgaattaccataatataaatggcataaaataaatggataaatggataaattttattattttcttttatttcatttaatgttttattgaatgtgtaaacttattcgaagatataatttacaaaaattttcatgagaaaaggttataattttattttattttttatctttatcatttaatttagatttttaattttcaaatgtacgatctgtttattcgtaaatacatatatggcgctgccggtgatatattttgattaaaaaattactataaattattttaaaaattatttattgttgttattgattatttaaaaataaacatttaattctggtttaaatatgaaaattttatttttttataaataataattcaagaaaaagttgcatttttaagtttttgatatataattaataacagcattcagttaaaaaataaattaaattctattttatattttatagatcattatttttttatttcttttatttgtattcttgaaatcaaacattaacaaacttatttttgctgttaatcgtttttgtttttccttttcacaaaatttatttagaaaaaaatatattaaaaaattaatttttggaaatataaaaaatattctcgatattttggcaaattaaagcttgattattttctcatnaaataattaaaaatattttacatatcattgccaaaattcagattaatcattatttatatttttggacttttttagtgagttaaatcaaattattcttttattcacttttttgttatttgtatttgaatttttaaataaattttcaattttattcattaatatttgatttattttaaaaaatttccaattttatttcaattttaaaagtatattcttgaatttcaaagtctaataatgatttgtttctaattgttgattaatttgtgctgtttgctgnttaaagaaattttggaaaaaagcattttattttacattatcatatattttaatattaantaatatttngaaagttcttttgatttttaatatttctctttgacattgagacttctgcacacgcattggaattgggtaattttataatgcttagtgtaaatatgataaattgaagattgccgtctgttttcatgaa

SEQ ID NO: 43937 - DNA, 485 bp, Heterodera glycines
agtacatacttggatttcggcttttgtgcttggaaaattttaactgtacttttttccaagattgtacttggaaatcgggatttttgggcaatggtaaagttttgtggtttcttcgaaaaataaaatttaaataattccgaagtgcattttctaggctaaaaaaatacgctgatcacgaatctgagctcgcattttgcaaaatcattgattttatctatgattattcatcaaatgcttgactttttcagaaattttatttttattttttctgatgaattaggagttaaaaaaatgcgttgaaaatgaatccgagctctgatcatgcgaaatcaatgtttttgtctatgatttttcatcaaatatcattaaaaaaataagccgcacccaacggggttcgaacccgggaccacgcgtctcctatgaatcacaaaggattaataactaaatttccaaaaaaaaacgtaaaaaacctaaaagcttgactt

SEQ ID NO: 43938 - DNA, 1180 bp, Heterodera glycines
atgtgataagtagggatttcgtagacaatcgcatagtattttgcgtaatagttaagattgtaagccgcctattaagaaactattgttgttgtgccaaaaggtttatgggtcgctggcaatgaatcatgtatccatttcgaatcctcggacccaaattctatcaatttttgttcgaatttgggtccgggtttgtaatttgtcgaaatggatgtcggattcgtgataagcgacccaaaaccccttgaaatcatgctttcatgacttttaaaataaaaacaaaaaaaatttctttgaaaatacacccttcagaattgaaaataaaattctcaaaaattttattgcctattcgaaaatttttgtgtctatttaaacctattttgcgatttttgtgcctaaagaaagggaatttgaaagtgggtcttggcgcccagtcggcggcgcccagttggcatcgcccagtcggcgtcgcccagttggcgtcgcccagtcggcggcgcccagtcgacccggtccggggcgggatgccaacgtattcagagcgaattgatggaataaaggcccaaggagcaagtgcacaggaatattccactttaatattcagctcaaacttgggtaattaaacccccccaaggggaaaaaagggggaacaattgggggaaaaaggggaacggcacaaattggaaaaaattgggggaaatttggacggtacaaatatgggaaaaaattgggatcgcaaatgtgggggaaacttcggagggaaccggaacgggtggcacaatcacaacaaaatcaagtattggaaaaaagcttgggccggcacgtcacgggcaacgcgattcgggcggcacagcgaaatggcacgtcagtggcagcacgatgggcaacacgggcaagcacgacggggcggcacaacgggaggggaaacggggagagaaaaaggggcagagcgaaggagataaaactcctcaaaggtacatagttgttgaactaatttgataggagtttttaccctccttttatacgtcccagggcacaaagtgcccgatcagtttctgttgtttgccaggttggcaattagaaatttgacctattttccctttttcaatttcttaacatttttccattttccttaacatttaattgactcttataatttctaatttaatgttttaccgttccg

SEQ ID NO: 43939 - DNA, 942 bp, Heterodera glycines
  unsure (1)..(942): unsure at all n locations
tttactaacttaaatgtacctcattttccattttcagtaacattggattgaatctacaagctcttaaagtaataaaaaatatgactgattgaaaaatttaaaaaataaaatatttatataagagaaaaaattactaaaaacaagctttattttaagaatataatttttctatgttattattcttaatggcaattttttgtttgagagttgcaagttttattattcttttttcatgattcaacctcagataaaatgttcattagggaggcgttatttttttaattaaataaacaataacaattaggtaaaattattctttgtatatagatcgccaactcaacaagaatatttttcgctaactatttttaaatgaaaaattcggcatataagaaaagtaatcgcttaaaaattttaagttttcaaaataattatttatagaaattataagttacgttcaatattcttagtattaaattaataaaatttttccttcattctttatctaattatttaatattaaaacgcttcaacattttaacaattcttaatttttactaaacataatcaaccaataagctattttatgtgtttattttaactaaagatagggctaaactacatattgttttcagaaaaaataatgttttaatttttgaaggagtttttctttactttttaaaaattgaaattacaaaaaacaataaaaatttgaccaaaatagcgcaatttgtccactttttgaacaaatcttttaataaatcacaacaaattttcaataactttgtgctgcgaaacatttgaatcgagcttcttaatccaaaatatgtgcataatatctggtaaaaatttgaaaatccaagtgtatttatgaataaaaattccaaaagtgcctcnatttttgatttgtgattttaggtttttataaggttgctttaaatcgag

SEQ ID NO: 43940 - DNA, 1022 bp, Heterodera glycines
  unsure (1)..(1022): unsure at all n locations
attttccaaaattttccccaaacaaacgcgcagagaaacaaattccagancaattagtatcggcgtaattattctgagaatgcagttggatttcctattactgtgnagcagaaaaagagatagccaatttccaaaatttttcacaaacaaacgcgcagagaaacaaattccagaacaattagtatcggcgtaattattctgagaatgcggttggaattcctattactgttgagcagaaaatgagatagccaattttccaaaattttcccaaacaaacgcgcagagaaacaaattccagaacaattagtatcggtgtaattattctgagaatgcggttggaattcctatcactgttgagcagaaaaagagatagccaattttccaaatttttcccaaacaaacgcgccgagaaacaaattccagaacaattagtatcggcgtaattattctgagaatgcggttggaattcctattactgttgagcagaaaaagagatagccaattttccaaatttttcccaaacaaacgcgcagagaaacaaattccagaacaattagtatcggcgtaattattctgagaatgcggttggaattcctattactgttgagcagaaaaagagatagccaattttccaaatttttcccaaacaaacgcgcagagaaacaaattccagaacaattagtatcggcgtaattattctgagaatgcggttggaattcctattactgttgagcagaaaaagagatagccaattttccaaatttttcccaaacaaacgcgcagagaaacaaattccagaacaattagtatcggcgtaattattctgagaatgcggttggaattcctattactggtgagcagaaaatgagatagccaattttccaaaattttcccaaacaaacgcgcagagaaacaaattccagaacaattagtatcggtgtaattattctgagaatgcggttggaattcctattactgttgagcagaaaaagagatagccaattttcccaatttttcccaaa

SEQ ID NO: 43941 - DNA, 1312 bp, Heterodera glycines
agcaatttctgatcactgatcagtagtgatcaaacattgcgccgattgcccataaaaatgggggatccaggcctggatttttcctggatccaggtccaggccatttttcggcaacctggatttttcctggatttttgtccaggaaatcaaggtccaggtccaacatggaatccaggtccaggtccaggctttttttcaaaatgtcgatctctagtgttttccctttcctcgctgctcttcactctccattcattcgtcattttttaaaatttatactgcatttaaattaatcctcctctgactcatttattttctttccatttatttaattgtaaaatgcttaattgccccccccccctttaattgttttggtagggcccaacaattatttttccaatttgacatttttccataattgactgaattttatcaattgtcgtcacgcaaagtcatcggattcaatctaagtgccagcagatcctcaaaatccataaagtgactacatatttagggaaaattttcgaaaaattggctcacaaaattgaatggaaccttttttgcatttcaatttacgacgaggatgacatcggggatgggccagtaatgaatgaatgcttatccgaaaattcttaattttattgcgtttctgtttttaggcttctcgacgccgcaactccaggcccaagtgatcagcagaactgattgaattggtgggaagtgatcgatccatctgaatcattgaattgaaaaaataatttgaggcgattttgacgtgatcataaaaatgtcttcttgttgcaatgatcaacttggagccatatttaaaaaactaacaaatttaaatgcctaaaaaaattttaaatttgtttaattattaaaatttaaatttcttagaaattgcaaaatttcaatttatggaaattaaaaaaaattccaattttgtgaactctttccatttgcttaatcctttccaaatttgtctcttttcctctgatcaattaagcctccctcatccaaaaaaattatttgctcgaatttccgtgttccgaaaaagtgctgctgcgcgacttagcgaacccccccccccccccaaaaatatccacttaatcctggcactaatggattccatttgggtgcttgctgcaaatggacatgccgccaagcacttccagtgctcacaattttcaagcatatagagtttggcacagtttttttctcggatttgggggcaccacatcatttggcccacaaatcccgtggccacacaaaattccatattcaccccccgtcgcgcacactaaacgatgtgccc

SEQ ID NO: 43942 - DNA, 1142 bp, Heterodera glycines
  unsure (1)..(1142): unsure at all n locations
gcgacggagggcacggcgcatgcgaccattgcccaccgccgaganncggcacccaggctattagagaaagaaagagatggaagagaatggcaagggaagaaaaagcgaagaaagtgcaaaaacagaaaatggcaaatacaaagcgaatgaacagaatggcacagaaatgcacattcaaaccaacccttcttaagtaagaagcatacccaattcttctcaatttggcccattgtccactctgacatttcatttcccaatttccacgcctttttcccaattttcccactttcgctgtgtcccagtcgaactcgcgacattcagtgcttttgccaaagcagaagcacggctggcacccctcggggttctctctgtccaaataaattgtgccggatttgcatcggtcgcatcgctcgccctccacgttgcgcttgcacacgcattggtcctcctcgcacgtgtcgaagttgagtgagccggcgctgtcgcaagggcacggctcgcaaatcggatgattacgaaagccaagcgcgcaatgctcgcagcggcggccgccaaagccgagcttacagcgacagtcgccgggtcgctgaaaagggagggaaagtacgaaaagcattcgcaagcatcggcagagccaatctttgctcaccatctgctcagtcacttctgtctcatctcttatgcattggttgctttcagctcccaccaaatcgcagtcgcacggacggcacgcgtcggtacggtagtgggacacgttggtgggacggtagaagccggggaggcatttttcacagttgactcccactgtgttgtgctaatggcggggaacgggggggggggggggttaatggtgcgcgtgctgttgactcggcttcacttggcattccacgcatcggccacccccctcgtaaatgccctcgggcggggggggaataaaatataaaataattatacctgtttcttcacctatataattgtataaaattttgttttgtgtgatttaatattaagttatggtttatattatttctccttcttttgtgaaataattgcctttttatgcaattatttgctcaggatttattaaaatataatatgcatagatttgaattattttccatattttgtttttatttttttat

SEQ ID NO: 43943 - DNA, 1577 bp, Heterodera glycines
tgaaaaggagaatctttttctaagtgaatgctaagcaatttgacatctcagaaaaaagttgtgggaattccaaatttttattacgttataactcaagtcctaggcagctctttctaaccaaaatgctaaatttcttcttttttctattgattctaaatgttcaaagtgattttgtacccttataaccaaaattattagaattttcgaatttggtgttttttgtgtgttagagatgtgaaaatagtacgccaaaaggagaggaaaagaaatgcaaaaattttaatcactccataactttttagttaaccctttttttgctcttaaaaacccttacattttgttccaaatttttttctctatcgatatgcaaaatttggtgcaacttgtatgcatagaaaaaaagttatatggagagaagtaaatgttgttttttacattattaagaatgaagagatagtacataaaattgagataagtaaagataaaaattaattgtgacagaacgccaatttttttctgtaattatccataaaaagatttattgtcgcttttttttcttttttaccgtccatgggagggcaaactgacaataccgtagtctcttctcgttggatgataagagaaaacacagacagagaaaaaaagggcctacacataaacaaatgaaaatgcaaaaaaaaatttatatgtcattttctctaacaccacaaaaccaacaaacacggactgggcgaaggtcggcaaaaaatttgcgacattgcaccgcgggcggaagcgcgacggatgccaccaaatcaaacgggggcaaaacgtcgttgtcactgttggaggtggagaaaaagtcggcagtggcatccaaatggggcggtggcaatgtcgcggaatacgactgcggcaactcgttctaaatttgttttgctcagttaacaaacaaaggcaaaatttgcattttgcagtgatttctgcgaaatcccaacaattttccgtgcccatttccctcaaatttctgccgacctccgtcactgccgctgcttttgcgttgggttccgtgccgagcacatgcgactgaccgacgatagcgaacagtcgcaagtcgcaattatttccgtctttttcggccaatgtaaaacaaataggttgtggtttataaattttaatatacatatactgtatataattaaatttctaattaataaagtacattcatgggtaattatacagtttgacccacataaaattttttgcttttaatgataaaaagtgtttccaggggttttcggggccgctgatcatgaatatgaactctatttgacgaatttccggacccctaacccggaattcaaacattcttgaaaaaaaaaaatttcagaccaagcattaatgccaattttatttgtttttttgatgaattacgtggcatcagtgcttggtctgaatcaatatattatgagcatcacaccggagaatcatggagcacatattttggtacatttaaaaccatttttggaaaaaaaaatttcaaaaaactttcgtatttcaggttagggtttcggaaattcgtcaaatagagtttatat

SEQ ID NO: 43944 - DNA, 1000 bp, Heterodera glycines
tctccggaacggattagcatcggggttactagatagaaaattgtcctaaaaagagatagccatttctctgagaattaattcacaatttccgcagctcttagggtaatggaaaaaattttgaagaggctctccggaacggattagcatcggggttacgagatagaaaattgtcctaaaaagagagccatttttctgagaattaattcacaatttccgcagctcttacggtaatggaaaaaattttgaagaggctctccggaacggattagcatcggggttacgagatagaaaattgtcctaaaaagagatagccatttttctgagaattaattcacaatttccgcagctcttagggtaatggaaaaaattttgaagaggctctccggaacggattagcatcggggttacgagatagaaaattgtcctaaaaagagatagccatttttctgagaattaattcacaatttccgcagctcttagggtaatggaaaaaattttgaagaggctctccggaacggattagcatcggggttacgagatagaaaattgtcctaaaaagagatagccatttttctgagaattaattcacaatttccgcagctcttacggtaatggaaaaaattttgaagaggctctccggaacggattagcatcggggttacgagatagaaaattgtcctaaaaagagatagccatttttctgagaattaattcacaatttccgcagctcttagggtaatggaaaaaattttgaagaggctctccggaacggattagcatcggggttacgagatagaaaattgtcctaaaaagagagccatttttctaagaattaattcacaatttccgcagctcttacggtaatggaaaaaattttgaagaggctctccggaacggattagcatcggggttacgagatagaaaattgtcctaaaaagagatagccatttttctgagaattaattcacaatttccgcagctcttaggggaatggaaaaaa

SEQ ID NO: 43945 - DNA, 1242 bp, Heterodera glycines
cgctttttgtaaggctaatagaccattttgagagctttcgaatgataccaagattattggatttgtattacaaataaaaaagcttaagtggaaaaacgagctggcgccgaaacgccagcgccgaaacgccagcgccgaaacgccagcgccgaaacgcgtgggtcccaaaaattttatatcaaaaattaattatttgaattaattggaatcaccggcgttttgagcctttttgtctgctcccaaacttggcaaattaatggtcatattttatggtatttatgttttcataatttttaattttgtatatttactagcatttaaaaattaatgtgaaatttgtccggtaaattgcaaaagtacatcaacccaatttttgatgttttccggatggaaagatatcgatttgggtgaaaaaatactagaaacaatgataatggcggacggttatcgcatttctgagtctaaatgcttacagtgtatgtaataattgtgcgaataagcgaacaatctacctaatccttcacacattctctgccataaaaccaaatatttcattggcatatccaaattttggtgcatattttatgaaagtggtcctaccatcggcaattaccatttcttttttttcgcagaaaccaaaacactgcactattgctaaaataaatccccgataggtgcctaattgtaattgtgtctcatttctttcctcttgaatttgtggaaattggaatttgttttgaaatgattgacgaggaaaagccattttagaaaatggaaagtgattcgaatccgcaacaacagtctgtgcctgtgcagcaattgccgtccgacgcttcgccccaaccgcagcaaaacggcggcggagattcggcggacaaaattgggccggaccaaatgcgtttgttgagcgcacagatcgccgcatacaaaatgttggcccgtaatgagccggtccctcgtgcactgctcagagaggttcgtacaagtccaaatcattcatcgtcggattggaacagtgccaattttgcgggtgtcgaaaccgcaatttctccgattttgaaatccatttgtttttaatgggtttgtttaattaaccacgtaaagttcggcacttaactttccggattgaattacatctgggtcttggttttgccggtgatttctctcgaattccgaatttggctctaatttgccggtctacgattcggagtaaagaaagtcgtatggttggagatccaaaaa

SEQ ID NO: 43946 - DNA, 978 bp, Heterodera glycines
  unsure (1)..(978): unsure at all n locations
tggcctcagtttctccagcgattggcagctgtcgaccctaataaacatgcagctcgtctgtgtgttaaagaaatttgccgagttaattgacttgtgtaaatgtggcctaaggcacaaatgctgtggggaactcagcactggggatgctgaacctaaagttggtggtggtgttggtatacgagtgagtggcgtattgccatggttgacaagccctatgagttcgtggatcggaactccttgcctggggaccagtgtgcttgcattcgaaaaaacacgagacataagcgcccgaaggcctttggcctgaggaagtgtcctaaccgggaaatccggagtgctcgtgtgagtgcctgtgcactgccctcggagctgtgtccagcggcgagatggttcttcccaagtccgggaagctcggatgcctggccagcgctgtgtcattaccacttgctctgtctccttcgctgcccatgcgcacgcttgcgctgaacggagttgtttctgctgaaactatccgtctttacaagacggctgtaatagcggcgcttggcaacgctcgctagcagctatctggttgatcctgcctgaactgatgtgttcatttcaaagattaagccatgcatgtgtaagtttaacctgccagacagggaaactgcgtacggctcattacaccagctataatttacttgaccttgacttcttacttggataactgtggtaattctagagctaatacatgcaccaaagctccaatctccccagagcggagcgcatttgttcgccacaaaaccaagcgccctccgggcgtccagtgttgactcagaacaactaagctgatcgcacggtcttgtaccggcgacgtgtctttcaagtgtctgccttatcaactttcgatggtagtgtatctgactaccatggtgatgacgggtaacggaggataagggttcgactccggagaaggngcctgagaaatggccacta

SEQ ID NO: 43947 - DNA, 918 bp, Heterodera glycines
acaaactcaatgtgacgtcggcggcctttaaaaggcggcgattgttgcggagaaaggcaatgacattgctctcgaattccctgtgatttgaaattgcccattgctgatacgataatccaggatttaaccaatatttaaataattaaaattaaattaaattaatcacataataattgtatttaaattttcccattagggttgccgtctgaatcccgatgttcttcccgtcccgaatccctcggccggcaattttctcgaccgagcccggaaaccctgaccctcattagtcgacaaaaaattctgagttcgctaagaacagggcaattcgtgtcccaattttccggcttcaacttactctatgcaaatcgttctaaagccgcggataaagtgcggcattgtcacctcgggcaattccagtttttcgatgatgtttttgggtaggaatttgtaaatcaccgctttctgattgacgggttcgccgagtggcttgagaactgtcaaacatctgagaggaaaggaactgagaagattgtcgaaaagggtcaaagacggacgaagaacggttcatgccaggaatggcacggaattccgatttccgacatttttgggtctcggaatgccatccctggttcatgccaggaatggcaaggaattccgatttccgacatttttgggcctcggaatgccatccctggttcatgccagggatggcactgaatttcgatttccgacatttttgggcctcgtaatgccatccctggttcatgccaggaatggcacggaattccgatttccgacatttttgggtctcggaatgccatccctggttcatgccagggatggcacggaattccgatttccgacatttttgggtctcggaatgccatccctggttcatgccaggggtggcactgaatt

SEQ ID NO: 43948 - DNA, 917 bp, Heterodera glycines
cgtaaaaaatcgaactgaaaaccgttttttaatgggctatgaaaggtgggaaagcggaaataccgacaaatccggaaagaggcgttgattaaacagggaaaaggaataatcggaattgggtacttccattgtgatgaacgggggcatagccaatttcacccttaacttttgaatttttttagtcgcatttcccattttatccatcgcttattttcaaaaatttcgtttactttttaatctgttgagcttgaaaaagaaatatgtatttcttctcgcttaaaaagacttaaaacgttattattaacaaaaatgataattatatgaaaaaatttaaaaatattagaattgaggaaaagtaaaaatgcgagatcacttttcgctttttctaattgcacgccgggcacacctgcagcgactcgtgcagcagcaaatcgcagtcaatgcaaaattgggcggaacaattcggacaaacgtacgccttgcgcagcagcgactcgtcgcaggagaaacagcacttttcactgcaaaaagggaagaaacgctacaaaaagcagccaaaataacaaaaatttcagtgccagagaataattcttttgcgcggtgccaatttttttcgcaatttttcagtcaaaatttggcatttatgataggagccgctttgaatgtttagagattcgttggaggttttgagacattcattcgacccacccccacctcttttacacccccccccccaagcccgtagccaggaaaaaatttcggggggggggggggggaaagggaggggtccggtccgaagacctttttttttttttttcaaatttatccaataatttttttttttcctgctgggtaacaactggtctttttcactataaatgaccaaattttgaccgttttacggcaaaaaacttgta

SEQ ID NO: 43949 - DNA, 1369 bp, Heterodera glycines
  unsure (1)..(1369): unsure at all n locations
taaataaatttccagtctcatctggaaaaattntgctacataatctaaattctncctcagaattgnggtgcatgnttatcatgagatactnaaattggttattggtcgcatcatgatatgcatccatgaaataattcagtctttttgggaacagttgtgaccncaatgttctcacttgtaattggccggaagggttgcgcattaaaaccagataatgtgcgttggctcttgccgttttaatgtcccgaccatagagactctgggttacaaaaattacgcttacgttccaattatgggagcccctggtaaagagtagatcgaggaaagtattctgcatattaagcattaaatcgtcaagtatcagtaagaggggtttttcctgttctttaatcttattcatgtccggaatcccgttaaaagtctcaacgccctccccgattaaccctaaaatactatcattcatctcaccataacaataaagaattttcttaggcgatggttcaattagattcttatgatgttttaaaaaccgtaatagccaacgggtcttaccactcccggtagcccccgagagaattagactgaacggaccgcgaaacatttttaatgcctcttatttatttgacctatttatattttcatagggaacatgtttcgcgcatttggggcatagccagaaattatcaaaaaatgatgtaccgaaatgcaaaagactgtgctttttacacctgctacaaatctcgtaatgacaggggcagtaatgacaacacttaattttatgtggacagttcattttttcaatttaattttatttttttggttgctatttatagaaggggtatataaaggagtgaaaggaccatttgattggtaccttgtatcaaaaaatgcaaaaaccgataatcgtaaatataattgctctcgctaatctcggtaccggtattaaactaaactctctgatgatcaccgaatgcgaatttaattataaccctagaaaattcaatgccgcggttatcaaatgtacaactcccatcaaagccaccgcattattatgggaatccgggaaaatgatatgtttggggacgaaaagcctgatagactgtgaaaatgcgataaaaattttcatagaaataattaagggctcggggtgtctgggggcttcttacaccggacacacggttgaaaatattgtttcgacctttaaattcggacatgaaattgaactgaacgagtttcgaaaaaatcgtcgtgccttttatgaacccgaaatattttgcggtttaaatttcaagcggagtaaaagcatgacagcgttaattttctggaccggtaaagtcgtaattacgggaactanaaacaattctgaaat

SEQ ID NO: 43950 - DNA, 1208 bp, Heterodera glycines
tgcaggtcgcaaacaaatttcactatttacctattttttatattttttgcaatgtcaatatttttggatagaaagtatataaattatttttacaagtcaatattttgaataaattttatgtaatattttattttatcatggctgcatatggagagttcaccacaaataaacccgaagtatttccatttttattttaattctcacgaccaattttaaaaatttatttaaattatcttttaataaaatcaactatatttgactattcgtttattattttaatattttttaaaatcaccaatcaaattcagcagttaacatttgttcgtttatttttttagaaataaataatgttatagaaaattcttctatcgttttaaataatatatttaaatattttttttaatataatcaaatatatttgaattcatgtatttataattcaaaaaatctagagagaaaaaataacgaatattttaaaaaataatttatgacacaatttatttactgttatatggtactaaataaaatttcttagacaccaggaacgatttccatgtcataacggtcagcgcaacattttgccatgaatattggtaatttatagggataaactttaaaataaattttttcatttcgttttattatgtaattattcttatttactttcattaattttaatttttaaaaatattttcaattttgattatatattttctagcttttttaatatttaattaagagttttattaattattggatttttcaatttcattgcagaatttcaacgtaatttttatggttcaaattgtattcatttgactcggcatcacaaattatggctcattcaattatttttagtttcagtaaagaatatttttattttatttttctagcaagttattaaatctgtttctgtttttatttatttttaatttcggttgcatctgaaaatttcaaaaatgaaatttttcggaaccaaacttagtgacaattttaatattattagatggcaaaaaatctaaaaagcgagttttgttgctgtttaaattgagactgaaggaatatattcaaaatatgttttcgaaaaccaaacacaaaagaaaaaaataaattgagcatagttgtgaaaaaatttctattttttttaatttgcccatttataggtaggtgcgtttggtattttattacttttttgttaaaaaaatttc

SEQ ID NO: 43951 - DNA, 1092 bp, Heterodera glycines
  unsure (1)..(1092): unsure at all n locations
gctcaaattnaaattaaacttaaaacgttatcaaatgtacaacaaatatatntgaattaaaaaaaatcatgaaaatatttaattaccaacccaaanatttccgtcttaaattaatgataaattattttttcaattttcggtccattcatttggtcactttgcgcttttgttgcgagaaattatacagagaaattatacaatttcaaaacttgtttcgtgaaaatttggtttttctttttcgttaaattctgttaggaggattgatttgaattagagttgagaggtactggtaccgtaccggtgacggccggtaattaccgctttgttggtaccgtacaggttttttcaaaaataaatgtaccggtatcgatttgtctagaaccggtaccgccggtaaaaatacactggtaagaatggtggactgggtgagaaaagagtaggaaattagtgaataagaaatttttgagaaaaattaaattatttatttcatttaattacgtattcatatccatgcatatgtatctgatttttattattttttgcttgggttcaattccccactgggatttttttttcatattttctttaccattaattgaaaattaattaataaaaaaatattccaacttttttttcattttaaacagcataaatcccaaaaattatataaataatacaaaaaaaagtgttaatagacaaaattaccgaaataatgataatgtaaaaaataacgaaaaattaactcttcatgaatgttcatatacatagagacttcggattcaagagtaattttatctcaatactgaagtgtttaattaaacaagttattttttaaattctaactgaaaaaatcacataaatcaaaaaaatcattttatttttaaaaaaatttcgaagctattcattaaatttatcatttgaaaaattatttaattaaaaaaaatagaaaataaaaatacccaaatccaacatagttttattctgaaaattaattttaaaaaatatttgaaagcaanataattcacaaaaaatatataatgaaacacattttaattgattttcattatatgtataattaaagtacagcagaag

SEQ ID NO: 43952 - DNA, 941 bp, Heterodera glycines
ccctaattagactgactaatgaatgccctccccctgcaatgagtaccgcgagttgatgtatgaagactcggccgcgcccataaagaaatactgcgaattgtgccaatcgttgcccacttacggcgtcactttcttcttggtaaaggagaaattgccaggcaaaaaccgactgataccgcgactgctcggcgtcaacaaagattcggtgatgcgagtggacgaacggaccaaagcggtgctgaaggaatggccgctagaacaggtcgcccccctttttaaattggtaattattggacatttcttttttaggtccgtcgatgggccgcctctttcaaaacgttcactctcgactttggcgactataaagacggatattattcggtgcaaacgctcgagggcgaacgcattggacaggtaaagaggggtaattaaacagaaacaaaggcactgttatttagctaattggcggatatatcgacatcattctgaagaaaaagcgcattgtggatagtggcggaattgagggagacgaaggggcgacgatggtggaggtgaaaaagagggggggggggggacgaatgacctaccaacaaacgggtgggggacaaatgatcaactaacgaagagtatggcgtttgacttttccgttatgggccgctcttcaaattttaaaaaagcaaaaggaaagcggcaaataacaaaaacaacatttgtgccaacaatgggtcaaaaataatctttggcatccattgctaatttatttatttttgtggtaaagaaataattttgtcatttttcgtggcccaaaaaaatactgacaaataatcaaacaaaaaaaaagcaagaggacaaatgaccaccaataaatgtgaagaatgaaaaaagacacacaaacccattcgctccctttgaaggacattgtcgcgccggccaaagcgact

SEQ ID NO: 43953 - DNA, 1424 bp, Heterodera glycines
  unsure (1)..(1424): unsure at all n locations
attgattctggtgctctattcnccgatggaattgctgatgatgggccaaatgcaactgctggccaagcgttgtccaaatggttgcacactccgagcaaaaatggccaaccgaagcaattgcatcgcaataattattttggtccaccaaagctggaatgggtcaacaacttcaaagaggtgtgtctagccatattttctataaattgtttagttttttccaattttttatttagacatttcgccgtgccaccacttctgtcagttacacaattcaactttatattattgtggaaccaatgccaattgaaccatttgaattggtgaacgaagtgacaaatgagaagctgacactgaaacatagcgaagaattagactataattgcctgtataattggctgttgaaacggtgcccaattggggagacggcgccagttaagtggaaaaaccgcgaaaattcgggtgctaatttgaactatatcagatttgagctgcgatatgccaattattcgggtgccaatttgaacaatatccgatttgaggtgtggggtggaaatagttgcattgggtgagcagcaaaagcaatttttgattgttgaaaaaataaaaataattttaggccattgtcgctgccagcggaagaagaagaagcggatgaaagcaatgaaaattaattatatctgagaaatgatcgatctcaatttgttgtgcttattttctctcagaaatgcttttttaattgtttcgttccaattatataaaaatatgcttttttgttgagcaatttattaataattagggtttgtaattatatggatataaaaacgcgaaatatggccataaaatatggaccaaaaatcgcaaaatatggacagaaaatggcaagaatatggacataaattttccgaatttatgggtaaattttcaaaaaaaaattttttcaaatttattaaattctagtaaaatacatctaaaatggctaaatacggtataagaactcgtttttagaagaaaacaagcaatttctagagaaaaactaccaaaaaagcgaaattttagcttttttggttatttggttattttttacataaatttattaatttttaagaaaatttaaatttattcaatattctcgagaaaattttggaaaaattgtttttttttgcaaaacttttcaatttttggggtcaaaaaggccaatttatctgttggggccgtcctaatagaggtttttttgaaaaatgccaaaatatggataaaaatgccaaaatatggaaatatggacataaatcgcgaaatatggaaaatatggatatagaactccttcctagaggcttcaaaccaagctaaaaacatgtttttcatgcgtttcaggcctccaacagtccaagaaaaaaatatggatttccatataattacaaacccta

SEQ ID NO: 43954 - DNA, 1248 bp, Heterodera glycines
aaaaaaaacccaaacctttaaaaaattttttaaaaaaataaaatagagaagttttcaaaattaataaaaattttaaaataagagtcaccggcgttagcaccatagcggttctttccctgtcattttggtgaccttgccaaatctggtgcgctttggatcagtttaaataaaaaaagataaacttaaactttttgacatatttaagaagagccaggttcgatgaagttttggtaagccaaaaaaaaatccaaacatttaaaaatctataaaaaatttaaaaatgagaattcattcgagattttctggaaataagcttaatagggcctagttaagctgtaaaaaaaatttggggcgatttgaaagagaatagaaagaaccaggttcgatgaagttttggtaagccaaaaaaaatccaaacatttaaaaatctataaaaaatttaaaaatgagaattcatgcgagattttctggaaataagcttaatagggcctagttaagctgtaaaaaaaatttggggcgatttgaaagagaatagaaagaaccaggttcgatgaagttttggtaagccaaaaaaaatccaaacatttaaaaatctataaaaaaaataaaaatgagaattcatgcgagattttctggaaataagcttaatatcgcctagttaagctgtaaaaaaaatttggggcgatttgaaagagaatagaaagaaccaggttcgatgaagttttggtaagccaaaaaaaatccaaacatttaaaaatctataaaaaatttaaaaatgagaattcatgcgagattttctggaaataagcttaatagggcctagttaagctgtaaaaaaaatttggggcgattagaaagagaatagaaagaaccaggttcgatgaagttttggtaagccaaaaaaaatccaaacatttaaaaatctataaaaaaattaaaaatgagaattcatgcgcgcttttctggaaataaacttaatagggcataggtgcagctgtaaaaaaaagagcgggcgattcgaaagtatgaatagcaagatcctggttcgatgaagttgtggtaagccaacaaaaatccaaatatttaacaaataccataacaaaatataacaatgagaattcctgcgagactctccggaaataaggattattggccttagttaagtccgtaaaaaaacctctggggcagacttgaaagagaatagaaagaaccaggtttgacgacgttttggtaatccaacaaaaatgc

SEQ ID NO: 43955 - DNA, 981 bp, Heterodera glycines
ttcgaactgctcacgggtgccacgcatgcccattcgccaagccctcgggttccaactgctcacgggtgccacgcatgcccattccaactgctcacgggtgccacgcatgcccattcgccaagcctcgggttccaactgttcacgggtgccacgcatgcccattccaactgctcacgggtgccacgcatgcccataagccaagccctcgggttccaactgctcacgggtgccacgcatgcccattccaactgctcacgggtgccacgcatgcccattcgccaagccctcgggttccaactgttcacgggtgcacgcatgcccattccaactgctcacgggtgccacgcatgcccattccaactgagcacgggtgccacgcatgcccattccaactgctcacgggtgccacgcatgcccataaaccaagccctcgggttccaactgctcacaggtgccacgcatgcccattccaactgctcacgggtgccacgcatgcccattcgccaagccctcgggttccaactgttcacgggtgccacgcatgcccattcgccaagccctcgggttccaactgttcacgggtgccacgcatgcccattcgccaagcctcgggttccaactgagcacgggtgccacgcatgcccattccaactgagcacgggtgccacgcatgcccattccaactgctcacgggtgccacgcatgcccataaaccaagccctcgggttccaactggtcacgggtgccacgcatgccatttcccaagcctccggttccaactggtcacgggtgccacccatgccattctccaaaccctcgcggtccaactgttcacgggtgcacccatggccatttcaactggtcacgggtggcacccatggccattccaactgaggacggggggcacgcatgcctattcgtccagacctcgggatccaactgagcacgggggttacccatgcccattccaactgagaacgg

SEQ ID NO: 43956 - DNA, 1077 bp, Heterodera glycines
ttcattaagttgcgacaaatggacggtctttaaaggccatttattgttaaaaccgttggcaattgacggcacaaagggacaaaataagggcgccattttcacacaattgcgagcaatttcgttgttgctgaaaatgaatatattttgtgaatgtgcaaattttgttaaaagtttaatttgatatattagaaagcaattgtgaattaccgaggaacatttgcatcgaattccatgaaacctttgcaagaattttggaatttagtgaacaaattctgaacaattcgacaattctaaaaaataataattattttttgataattttaaaaatgcattctaccgaaaggagaaagtcccgaccatcgcttctttcttccatggaatgatgagctttccttctccgtttacgagtatttgtcgtcttttctgcatcacttgataacttttttaattgcgaatccatgtaaaacggtgtccaaatttgatagaattcattacgcggtttttgctggctaaattttatcaataatgttatttctgatatgcaaattgcaaattacagtaaagacatacttttgcgtttccgatgattgactctgactttgataaacaaattgatttaataattccaattcatcgattaatgcaaattccttttcaacgaataacatttttatctgcaagtttcgttcatttcatacaaaaactttgttcataattaggtaataattaacagttcagttaaaatttaactctaatgactgatcggttgaaagaattatcagaaactcgcctgcatttaaaagcaactaagacaaggcattaataatttagaaattttaaaacatattgtttacttttttaaattttaattcgatttagggttacacgcgaagatggctcagtgatcgaagaagagaaaactgaaaatggcgagtttgttgtaatttttgagcgagccaatggaaatggaaatccgagtggatttaaacaatccaagcgaatgcaaaagggtcgtggctatgtcattgacctctcgcccgacttgcaagtggccaatgttagcaaaagccatttatt

SEQ ID NO: 43957 - DNA, 843 bp, Heterodera glycines
ccgtacgaggccgcaaagcggccgagtgagtacctttggcgcaaaaatttggtgagtggggccgaaggcccccgtacggttgagtcccagtgattgaaatgctggtgggttgagtcccagtgattgaaatgttggtgggttgagtcccagtgattggaatgctggtgggttgagtcccagtgattgaaatgcaggagaattgagtcccagttattggaatgctggtgggttgagtcccagtgattgaaatgctggtgggttcagtcctggtgattggaatgcagtcccagtgattggaatgttggtggattgagtcccagtgattgaaatgctggtagttcagtcctggtcattcgaatgctggtgggttgagtgccagtgattgaaatgcaggagaattgtcccagtgattggaatgctgttgggtttctgttgggttgagtcccagtgattggaatgctggtgggttgagtaccagtgattgaaatgttggtggattgagttccagtgattgaaatgctggtgggttgagtcccagtgattgaaatgctggtgggttgagtaccagtgattgaaatgctggtgggttgagtaccagtgattgaaatgctggtgggttgagtaccagtgattgaaatgctggtgggttgagttccagtgattgaaatgctggtgggttgagtcccagtgattgaaatgctggtgggttgagtcccagtgattgaaatgctggtgggttgagtcccagtgattgaaatgctggtggttgagtaccagtgattgaaatgttggtggattgagttccagtgattgaaatgctggtgggttgagtcccagtgattg

SEQ ID NO: 43958 - DNA, 1453 bp, Heterodera glycines
  unsure (1)..(1453): unsure at all n locations
aaaagattttgaaatcgatttttaatgaagattcactgtttttagggtcggttctcagcaaatttacccttcaaaatgccaacagaatttgccacgctggcaattttgccacaaatgcccttctgcgcttcgcccaattcgtccaccgttttcgtcaatttgtcaatgcgttgctgctgcgtgcgctgctcagtgttttctcggactttgtcctttacaaaaaataataattttgttttgtcaaatattatttttgattttcatgaaaaacatttcatttccggggagaaaaatttaaaaaattccgctaaattttctaatttttcccatttcccacctctctgaggtcggccattgactgcgaacattgctgcaccatgtgctgcaggtagtgagggtactcttccgcgtccctttgctggcgaatcaacacgttgtttacctgcaaattaaaatgcaaataaatttctgtaaaaacacattaaaaatggaattttttcgaaaattaaaaattcagttttctttaagcaaaaaataaaaaattctatcattttatagtgccaacattttaaccttttcgaattcgtatttcgaggtgtttctgtacagttcgagtctctgctcgagctgccaaattcggtccgattgctccccgtttttctctctcaattcggccacttccttttgcttttgtcgtttcatttccgccaatttcgtctccaatttgtccaactgttcaccgcgctgacgaaaatgctaaggaaagaaaaaaaagatgtaacaaaacaactgaagaagcatcagaatttcaaaaaagaaaaaaaattccaaaattcaaaaaaactgtttttgtttttgggttagaaatttccgagttttgtattttttctccccacctccccaattctctcttccaactgcgctttgtccattctctgttgctccgattccgtcgtgtgcttttccaccaatgccttcatttcgtttcgaagctaaattttcacgaaaaaatctgacgcgggaggggaacgtaatgctaatttttccgaaaaagcccaaagaataataataaatttggaaaattggcatatttgtgagtgggtgcacatcctaatttcgtcgccgaaattttctcaaaatttgtcctgtttcgctatttgtttttttggttggaaaattgccaagtttttgtgtatattttcctccccacctccccaattctctcttccaactgcgctttgtccattctctgttgctccgattccgtcgtctgcttttcctccgatgccttcacttcgttacgaagctgaccaatgacggaaactgagggggaaaaggcaaattgacaattggaatttttctcagagaaaattttttaacgactttttttgaaaatattttaaaattatttttaatattttntgtagattgaggagagaggaggaatgagcat

SEQ ID NO: 43959 - DNA, 1561 bp, Heterodera glycines
actagagatcgcattttgaaaaaagcctggacctggattccatgtggacctggaccttgatttcctggacaaaaatcgaggaaaatccaggtccaggaaaaatccaggctcctcgagacctggatccagggcctggacctggatttttttgaaatttattttaaaaatcaaaaaaatgtttgaaaaaattaattatttgcttagaagcataaaatccaggcctggatccaggtctaggtcgatctctaatattcactaatgtttcaaaacagtcaagaatcttgaaacaaattcatttttttgcctatttttcaaattttgcattaattgcaatggaaaaaacagaaagaagcaaaattgttttgttttctgtgttctctttggcaaaaatgatttagccaaaaactcacaaaatcaacgccatttccaagtcgttaagaaattcgtaatttgaaaatctttaaatgcttccaaatttagcattttggcaattacaaattttttgtgttttgttgaaaaatttattatatttagtgcaaatttataaggaatttttttaaaaataatattggttgattgatttttattataatctttaaacatttaggcatcgtctcggcaactgtttgagcttggccatatccctccctcattattgggaatctgcttgttgtgccgggaaaatgcacaaatggcaaattttgtaaaaaaaactattacttaggtaatttagcgtattttattttttagcaatgcccaacattgaatgtctcttgtcacaacatgtttggccgttgcagaagcgaaatggcaaaaacaaattcatgggatgacataagggttcgtaaagtatcaaatcttatttttcaaattttactaatagactaattgtaagatggaaatattttttaatgatggctattttcctgtaaaaaatttgaatttatgagcaataagtcaaaaatttccgattcattttcgaattcttttgtgaaagatcaattgaaattataaatgcataaataattttgtgtcgcattttccattttggaattttatgcaaaaaataaaaatctaattaaatttggaaaaaaatatacgtgcagttcataggtttgaactttcaaccgatagagacactgggaaaggcgcttaaccgactgcgccatttgcacgcacatactatcgctttcatttttcacttttagctttattttttcatgggatggcataagggttcgtaaagtatcaaatcttatttttcaagaaaggtcagaataaaaccagataataaatatataaaagcaaaattttttttcaggaattaatattcgccctctcttttttcaagtgccatgccatgcaaaacagtcaatgcggatgtaaactaagcatattgatatattttattttattaaaattcatattgaatcttttttgtcatactcattgtcttaatagcttaattaattaattaataagttaataatgtttaatttggttgttgttttggttgtaatggatggctcttttctcatctcttttttaatatcgctttttt

SEQ ID NO: 43960 - DNA, 996 bp, Heterodera glycines
  unsure (1)..(996): unsure at all n locations
ttagagcaacgaaaattggttgaatcgtgaagtttctacntcacttctcaaaatgnttngataaattgcaaatatatattccaaaagtctgttgacactttctgaaaataaattctatactcatgtattttccacttattagattttgcaggcttattgctgcatgttctttgacacttcttcaaaataacctatgccctttattcgttcaaaacagcatctttgttgtttcgctttggattgacaagcccgatgataaatagctcgagcgcaaaacgcgtgcatgtttggaaagtatcgttcataccaataattgagggtttatttttaaatgaaattttatgataaaccttattatctcagaagctatttaattgattcggatgtttttatcgcggttaattagagcaccgaaaactggtttgaatcgtgaagtttatcatttctaactcacttctcaaaattgttgataaattgcaaatatatttttccaaaagtctgttgacactttctgaaaataaattctatactcaggtattttccacttattagattttgcaggcttattgctgcatgttctttgacacttcttcaaaataacctatgccctttattcgttcaaaacaccatctttgttgtttcgctttagattgacaagcccgatgatgaatagctcgagcgcaaaacgcgtgcatgtttggaaagtatcgttcataccaataattgagggtttatttttaaatgaaattttatgataaaccttattatctcagaagttatttaattgattcgaatgtttttatcgcggttaattagagcaacgaaaattggtttgaatcgtggagattatcatttctaactcagttagcaaaattttggataaattgtcacgtacatttattcaaagagtcagaaaggactatctgaaaataaatcatatacacagttgccctagtaagataggntccgccccttatcgtgcaaaacagctaattt

SEQ ID NO: 43961 - DNA, 937 bp, Heterodera glycines
aaacggaggaaatcgtaaaattttgtagagtctatttttttttttggaaatttcgtctccaattgactaaaatttagcatttcaaaaaaccaagggagaaatttttggaaaattttgaagaagaaatggtaaaaaatttgaaaatttattgaaaattatttttgtttttgaaggtaaataattggaaaatttacggaaaattaaaattatggcaattttttgccgcatttgagcaaatttattaacaaaatcccagcaaatttaaattaatttcccgcaaactttcaaaattgatgataatgatagaataagattttatttttaaattagaaaatttaatggacacaaatttgagtccaaatgtaattcttgacataattttttcaccattttctcccctgacccttcgcttccggcgataaacttgcggcacccacagaatctcgactctcgagcaccgaaaaaaacatttattatttatgcaaattaattattgccattttactttatttgccatccaaaattgttgtgtgggaaaacggaatctgaacaatcattacatattcattcatttttgttggctttcgcctcctctaaaaaatgggaatattttattagcgttgggcctttgattcctaaaattatttttccattttaggaataattatcgaacaaatcttagcgagatttccaagccttttttatgggtcaatctcaacgaattgcaaaattctttcaattttatttttgaatgaaaaattttgggtttcaagggatttgtttaatgccatcggtttttaaaaatattgcctgagtctcttgtactgattaagcctttaaattttttatgttttaactgatttcggtaaattttttaaaattaatttttcagttttcaaaaaacacaaattaaatttctagtcacaacttgcttaaa

SEQ ID NO: 43962 - DNA, 1423 bp, Heterodera glycines
aaaaacaaatttattttaaatatctatcctttattataaaaagattggtattagttaatttcaataaaaaatattaataataattaaagggtttttaatttttatttcatttgaaaggaaaacataatgtcaccaattgcacttaaaatgtgaattacaaaaaggattaataatattccatcagtgagttaattgattcaccaattttgtattttatgagaaagaattggcactgtgacaaaataccagatgaatttgaagaatatgaacggacagaatgccaaaaatatcgcaaatatttggacattttgtacgaatatttgtacagagaatacgtcggaattccaacagtgaagccaaaatttgtgtttaaaaaggaaattgaaattgaagggccaataatttatgcgtagatttggataatcctacttatggtcaatccaattttttaaatattttatttaatataataatcaaattacgcagccctctgattaaaccaattaaatttaaaaaatcgactcctattttaaattatcatttgatgccaaagatttttaattttaaattaagggcatttcagatttaaatcttaatatctccaattaaggataattcttgggaaaataagaccttatctattattcgttttgctaagaaaattcatttcaataatattgttttgattttgagttgttttatatgtgctgtgttatagataatataacagattggctcgaaccaggtcatattttaaaaatttgaccacaaaacaaatcatttaaatgctacgactgctaattgcaaattaaaaataggaaaatgtcggattttattcctattaaaaaaatatttattaagacatgaaggaaaaatttgaaaacaaaattaatgaactgaaaaagaatcaaagtattttcatcacctttttgtaccttttcgttgatccaattttgtttaattgaaaaattgaattcctcctcatttaatccaacaatcttgataccaatcgaaggcctaaagttggcggcgacgaaatggtcgcgccgaaatggcccgagcccttgtaaagggcttttaaatagagtgcgccgggaccgggaccgggacgggaattcccggtcctcagaggtcccggtcccggattttgaaaagctcaggtcccggtcccggtagggcaaccgggaaccgggaaaaacaagcactggtaagaatgggggtctgagtgaaaaattaggaacgaaacttggagttaaaggaaacaatttaaaaaaaaaattaatatattctttaaaagtgtcatcgacaattgtgcaaatggcctagtggctagtatccttgactttcccttcttctttcccttggttcaatctctttgcaaaaagtaaattgttttaaattttctttttgtacactccattgg

SEQ ID NO: 43963 - DNA, 1232 bp, Heterodera glycines
  unsure (1)..(1232): unsure at all n locations
caacaaaattntgctttaagaaccttcagattcagtcagtcttaacttttgtgtacgctaaagcatttttatctttcttcagctacattgaccattccgtgatcaaatttttccgctccaagaagcgattctttgacaaaagtggcaccaaattggaagtgtttgtgcattcaattgatacgtatgtccaaccgatttgggatgtttttacccgcgaaatttggcctatttttgcgaaaagcattcgtcatttgggtcttcataatgccaatgctttggacaatttgcgcagtcgcatttcaccgacacttctcactgatcttgatcaattttcaatcgattccggttatctgtgccccgatggaattgctgacgatgggccaaatggaaatgctggtcaagcgttgaccaaatggcttcacactccgacaaaaaatggacaaccaaagcaattacgtttccgtgcttatgtgagtccaccaaatttcgaatgggtcaacaacttcaaagaggtcgtctcgccagaattttcgtcaaattgtttttattttaccaattttgtttagacatttcgccgtgccaccacttctgtcagttacaaaattcaactttatttttgggtggaaccaatgccaattgaaccatttgaattgatgaacgaagtgacgaaagaaaagctgacactgaaacaggagatcgacgaattcgacttaaatgtgtataatttgggaaaaccgcgaaaatccgagtgccaatttgaacaatgtcagatttgatctgtggagtttcgataaatccattgggtgagcagcaacagcatttgaattttatcgaaaaataaaatatttaattaattttaggccattggcgccaccagcggaagaaaaagaaggagaagaagaagcggatcaaagcaacaaaaatgtcgtctgattaagtgtacgaaaatgaataattaattgtatttgagaaatgatcgatctcaatttgttgtgcttaatctctcagaaaaatcgattcagaaggcaagataaagtatttcgtgcatttgaaccggttttgctgcatatttagaatttttcgaaaattgaattttcgaatttttgttcgagtccgggtcaggggttcgaaatgggccgaaatagatataagagtcgaattcttcgacccagaaaacccataaaacatcagaagtcgaaaaaattttttgaaaattttctttatatcattga

SEQ ID NO: 43964 - DNA, 1380 bp, Heterodera glycines
atcaaaagaatataaaattaaaatatgaataaaattgtatatatttttatcatttgagcaaatatattacagtcgagatttctctagttgtttgtcaagaaaattaatcgatgaatgttatgcatatattttattatgtgagaaaaatttgcttaataatattttaaaaaaattaattataaaattttgcggttttcgcgcaacgcccttttttgcggttttcgcaaaatagctatttttgcgggtttcgcgcaacgacgcggcaccgaaagcgcaataaaatcagaaataaattaaatatgcaataaaataaaaccattaaaaaaaaatttatgtccttatttggtgtttttagataaactctaataatgagaaaagttattaccaacttcgccgaactgaatggttctcatcgatagacacttttaaattcttatttatttattccatttaaccggatatttaagaagataatttatgtaaaatttcgaaagataatatttttgaaaaatcaaaataactattaatttttgcaagtttaagggcctaatgcccaaataatcaaatttacaaaagagaatatgacgtcatgaaaaaattcctcttttaaaactcaaattaaattcaattactccaattaaatgtaataatatttaaccaacaggcacaaaccatagaaatctgatcattttttgcatagaatccggtcattttttgataaaacttctgcatccaaatgttcgttctcattcaatttgctccgctccgtctctgtcttcagttcactcaccagttactatggcagcatttactatggcagcatttagtataaaaaacataaaaaatttgtaaagttgattattttgaagaaccatgggggtaatgaaccttttaagcgcccaaaaataaaatcaaagggagacggtaattaaatcagataaaaacgtaaaaatattcaactaaaatgtcaaaataatacagcgaccaattattaattctggcaaaaatccactttatattcccttagaaaatgatttaatttggaaatttattccattttaggaaaatgggtaacgaaatggccatttttgtggcaatataattgtcccttgaaggcattttcggaaattcaaagcaaggacgatcaattgccgtgcccaaacaagggacgatcaattgcagtgtgccaaataagctaaaatgaataaaaaataaattaacgattaatgcggactgagggaatttgtaacttaaatctggaaaataattcatatttgatttgaattcgatcaatgaaaaatgcaaaaaaagacggcaaatggaaaaggaaaaattagaaagacattttcaaacgaaaatggaaatttcagacgaagaaaa

SEQ ID NO: 43965 - DNA, 1381 bp, Heterodera glycines
  unsure (1)..(1381): unsure at all n locations
gatcagcggcagaattgaaaangttcaattcgaaatgtgaaaagcggaggttgaaatcgcctntaaataggctggctcaaatgnaagagaggagatccaaaaaactcgagaacacgctcttcaaaattaccaattctcgagttaattcttcacatgacaaatggacaattgtgccaagggaatgaaggcaaaggagggcaaaggagggcaaaggctaagcaaacacaaaaaaaaaagcatttaaaaaaaatagcactcgagaattagttgttcaatgcgagatcaagtggacaaagaaagcacaactgttgaatgtttgtgaacatttttataaaattcaaaaaatgatgtcattaagttgcaattcatcactaccagggatggcacggaattccgatttccgacatttttgataaaaggtcggaaattttcggaatttttttgattttttttcaaaaattagcaatttttaaaaagtttgaaaaaagcgcgccgaaaaaatgtgtaaataatcaatccctttcccaaaaatgttttaaaataatgtaaaatgacataaaaaagattttgatgaaaatcaatgaaataatttttcatgctattaagaattttattagcctattaaaatatttataaaattttagtatattttaaaattttcgacttccgatttccgacttccgaaaaagttttggggcctcggaatgccatcccttatcagtgatcactaccattttgaggaaaattaaaaaagtgtcatcattttttcattagaatttattagagttgagcggtaatcggtaattgcaaaaaaaccggtaccggcaccggtaccaactttttcaaccggtaccggtaccggtaccggtaccggtaaaaaccggtaattttagaacataaaaatttttggacaaaattttccaaatacaaaatttttattcagttttcgcgcgagtgcctgttttttagcattagaattgttcagaagtatatgtatattcaggttgaccaagtttttttttcaaattcaggacatagaacactaaaattcagatgtagacctcaaaattcagattattgcaaaacaaggggtcagcagccaattttccaattttgcgaaggggtctccggccatgtaaattaatgtaaatcaatgacctttttttgctttcaacaccgctttttacgcggcacgttttttccaagacttttgggggacaaggagggccggcggtgccgatcaggggtgggcgaagctcggcttagtactcgaagccgaagccgaaggcgaagcccaatttttattcgaagccgaagtccgaagctcgaagcccaaaaaacccgaagttttcgaagttttcgaagccgaagccgaagtttt

SEQ ID NO: 43966 - DNA, 1023 bp, Heterodera glycines
ggaagaggggaaaatgccaaaggatggcatttggaggggggggagagaatgcggaaggcagccgactgaccgtcctctttgattccgtaagtgaccaccaacggactaaacagagaatcattagaaaattaattgctccaaaaatatgaacaaaccgtgtgttatattcccacactgaaaatgattaatcaattgaactgatcgtccaaatgtgataagtcaaatcaccgaccgatcagtgcgcatccgacgagcgcagcaaaagtggccaaaatgacaatggccagccaaaggaggcgcaaatgacccgacgtctgaacagtgtcgcggatgccgtggaaagttgtgttttgctatggagggacagttaaaaactgtacagcattcattttggcatgacgataaacaccgtaagcatcgtacagtaggaagacactgtcggctcggcatttgcacccgcggcgcccaaaggtagtggggaataactgctgcttcttcggatgatggtgctgctgctactgttcgaattggacggtgagcgatcgcgcgggtgccgcagggatttcccctcgggcgctgccgcagacattttagtcgctaattgcgttaattggtcgccaattacgctgcttttcgaatgacgccgaaggttcaaagtgtcgcaattgacacaaaagggaaatgaaaatgggtatttagactccgattttccctcactttttcatttgtcttcgcttggcattcggccgtccgcaacattcgcagcaaaaatgccgaaaaatattttcacattttccatcgttctcttttccactgcttttctcattttcattttcgttgtttttttgctgtttaaaactgccatttctgtgcacttttcgtccgtctttcatttgctgaatattcaaaaaattttaaaaatttcagatgaattttccgttcaatgaatgccatttcaaatgtttttttttaccttttgctgttccctccacttttattgaataaataaattccactaaatta

SEQ ID NO: 43967 - DNA, 973 bp, Heterodera glycines
ttctttattttcaaaataattaatttaaaattaaaactcttattgaatcattttgttgtgaatattttatatttttttgggtgctttggattggtcttagctgttaggccgagcataggccttttaaatttttatgaattttgaaatatttaatgatgataattatttaattatttgcccacaaaaataataaaataaaaggtggaaaaaatgttttgttgggaaaatatttatatacattctaaaaattctcaaaaaaacttgtactgaaatttctcggccttttttttgggggggggggggttgatattatctagtcagttcatttaaataatttttatccaaaaaatttttttttgggttttcggggcagtccccctgaaccgatgcgcccagatttatggggagaccgaatccttcgggaatagcttccctatagtctgtactttaattctgcgttggagttttgctccccataaatgtttgagtaccccaaacggacacttgaaaaaatcgatttttttgttttcggggcagtccccccgaaccgatgcgcccagatttatgtggagaccgaatccttcgggaatagcttccctatagcctgtactttaattctgcgttggatttttgctccccataattgtttgagtaccccaaacggacacttgaataaatcgatttatttttgttttcggggcagtccccccgaaccgatgcgcccagatttatggggagaccgaatccttcgggaatagcttccctatagcctgtactttaattctgcgttggatttttgctccccataattgtttgagtaccccaaacggacacttgaaaaatcgatttttttatttcataaatattttttcagaaagtgctctaaagcgcaccaaattgtatttacatgttagtttaggcactctgatgctttttctatcaaaaagggagatggagaaaaatttttttaaaa

SEQ ID NO: 43968 - DNA, 1471 bp, Heterodera glycines
caattaaaaaaataattaatttaaacttataaaatttatttatcaaaaaaaaattaaattaaatataattttttatttattaactcaacaaaatattttaaattaattaaattcattgaaaataacgtaaaaatgcacaaaaaaataatgttacaccgtccggattcgaacctgccccccccccctcaaaatgatgccttagaatccccaatcacacagggattctgaggtcttgacgatgtcaaaagtaaaatctgatcacgtattcgtgatcagcggcccaaataacccctaaagacatatttttggaagatttttgtgagaaaaatttttccactcaaaaaccatgtgctcccccctttggtcccgaatcccaaaatcacttttatttttgtatctttttttaaaaatgtgatagaaatgccaaataaaatttatataatagagcaaaaaattgcggatttttgtagtattttacttttttcaaatagcttttcagaaggcagttacgaatttttttctgaaaaatctaaaatttccagaatttctggaataacttttttcatattgatgttagaaaacctaaataaatcccataaaattctcctgatttttctctatttttaaagctttgctgtatgaaaattgacttaccctgaggttagttatgaattttcaaatattaggccaaaatcccgagggccaaaaaattgccaaaaaataaagaatttttaaaaaattcccaaaattctgaaacttaaaatagacatcatattcgtactcagcaccttattttaccccagaaaaatatttttcacaccctttttcgacccaaaaaaaattttcgaaaatttctagggggcctagctcgaaaatttttgaaaatttccggccatataatacactattcgatagcattttaaaagctctacaattttgccctaaggcgttttttcgataaaatcaacccctaacgagttatggacccgggactcaaatgtcccgctcaggccaaattttttttctatttccgggaaaaaatcgaaatttttccgaaaaaaataccagtcgatagagctcgaaaaactgttgcttgaaagtggtctccgttttcccaggaaaattcgttaaaaaatcctaaaattcaaaaaccccaaaacctacttttaggcctaactcgaaaaattttgaaaattttcgaaattttaaaattttgaaaaatcgagctcattaaactctacaataagttcgctggcaccccctcccttagaccaaaccctgacgtggcattcacctggtactgaagtgggaaaaaaaaattaactgagtctccgtgtctgtccaggtccgggatttggtctgatcaaaaaataaaaaatactggattatagaggacacttctgcggagtgccctcacagcgggaattttttgatccgagtttcagaaaaaaagttatggccgtcaaacgca

SEQ ID NO: 43969 - DNA, 1675 bp, Heterodera glycines
  unsure (1)..(1675): unsure at all n locations
cgacttagtttcagcgactaaaataaaaaaagggaaatgcgttctttttggcgaaaaacggctacaaatccgttgctctctggcgctacctgcccttcgtattgcgtccacaatttgtgtccacagctgttccggctccatctccattcggttgtcgctgtccgacgagcacaacaatttgatgctctcctcgtggccatggatcagtgcacagcccgcggagggggaggcgtcgaaaacgcacagctaagaaaacagtaaacagcactttactacgcaaaaaaaggaggcgattttgcaacgtaataatccatcggtcaattaattttccctttccggtcacaaattggcaaaattatgactcattttaaaatggcctccgctggacaaaatttacaatcgccgcatttttgcaaaaattcgaacccatggttaaacggaaatagtggataaattaaattccacccaccttcaaattcgtcgtgccaacatcaagtgccaaaattaatggacagttcgacgccatttgaattcttaccaaaaggagcgcatttaatggaaaattacaacaaaaataaagggttaagaatcataggaagtggaattcttctcatttctgcgaataaaagtaaaaagaataatttgtaaatatttaaaataacaaaaatgacataatttaggcatcggaatacagtaaacaatgaaaaatgccaaaaggagtgaaaaatgggaaagtattggacggaataaaaataccagcaaaattctttttccatggcggaaggcaaaatgaggtcataatttaattttgtttttattcccgtaaattcattcactcgccgattgtcctcatctttttcttcgataaatcgtacccttttggcgcttcaagtctgaaaaaaaaacaaaatgggaaatggaacttttttaccctttttttgagggagggtagggctacagaatccgttgtgaaatcaaaaaaaaatacaagtaaaactattggaaaatcgggcaggaaggggacagtgacgcaaaaacttttgaaaaattgtggcgtaaaagttacaaatattcgttgcttttatgtcggcttcccccgcctaccggccccaactatgggagagagtaagtaaaaatgtagacagaaaaacatagatttgttaaatacagcacaactcacttgtacccgtacatctcacaccagccaatcgggaacagttcacgagacctaaaaaatttccgaattttttcgtgtccccatcatccgttccccggccacctgtagtcgaacagctggtccatttcgctctcccatccgtcaaaatgcacttgcagcagacgaccgcggatcgcacaaatggtggccggacagaccaagttgggctcgcattggtcggtggcctccaatttggcaccgacctgaaaatttagtatagcaaaaaatgttaaaatacagacaaatttggcaaaataccccatttattttactatgaaaaagcgtaccttaaaatactgaagttttgccgccgaaggaagtgggtcctggcaatgaaaaagatgaaagaaattcaaagcgtaagtgtaaatttaaaaaataggcttncaaaaagtgcattgggcgccggaatcgctcctcagggcgcaaataatcgggccacgaaaaatcgccttcagt

SEQ ID NO: 43970 - DNA, 1420 bp, Heterodera glycines
tatcaaaaattttttgtttgctgccttgattcatgtgatcgagtcaggctcatgcacacggattaacaaaaatgtggccaagtagccgagaatgtacttgcgcatccaccagggcaccttaaaattgagccaaaaaataagtgagggcgcggttttatttatttatttttaaagaatttagaataaaaattatttagttattttttaaaacggagcagggcattacgcgtctgccctggttggtggtgccacgtctgtgaatgttcagcgtgtacacattcatcgcagttgccaggcaaactgaaatttttaaaattagcaaaaaataaaatcgccaaaaaaacggggataaagcacccacacccaccaattgcaagtgaagcgacgtagtacatgccgattagtggcaccgcctcggaagtgggcggaattgattcggtgattgattgcaggtagacgcccatcgacagaatcacctgcagggattgttgaaatgggattagaccctttcgcatggaattccttccgaccctgacacaaagttgttaaaattttgataaaatcgccgaaatttctatgtttataaatttaaaaaaaaaaattcggatggggaaacgacagggaggggggagagggaaatggagtgcaactctggtccggcatggcgtcagaatttttgacaaaaatcgggtccggaacatagtcacgcatctgaccgtgttcagcatgttgatcttttcgccggtctctggcggcatgcaaaatcccagcaatgccatggacgagatcagcacacagggcagaatgtggttgaacacgtagaacaacggccggcgtcgcatgcgaatggtcgcaacaatcattggccagctggcacgcgcgtctgtcggaaaacggatcagtgtccgctcggcggtgaagaacagcaggtcaaactcggtggaattcgtgcggaacacacacacatattgtcctagttcagttatagttggcataacttgtgaattctcataattttcttaattaataggaaattcaaaaaaaaatcaaaaaaactttcgagcaattttttaaaaattttacgatgcattaatatgtaagtgttttgaaaaatttttcaaaaaatcgctgaaatttttcaaatttttttcttgaaattttaatataaaaattttctaatatttctttgaattgtttgattaccatgtaattggacaagtcgccctggtccgtggtgaggccaatgttaatttcacgtgcgtcgtgggtgccccagctggcgaatttgagagcaccttttaaagcatggaaaataatttctatttgaaagataatttttattattaaaaaaaattaaatatatttaaaaaaatattattttaattttttttgacgatttctttaagaaatttggagcaca

SEQ ID NO: 43971 - DNA, 775 bp, Heterodera glycines
aataagttcatggcctccacgataaaatccaaactgcgataccatctcctcactcaagtggtggagaaggaaatgcgttcaggtggaacatttgattgttccgacctacgcaaggcaatcacttccattgttgaagtgaaggaagaagtacaaagatgtacacaagtcttccgtggagaagaaaaacccagaaattttcctcctcaaattcagaggaacaatttccaagggagaggaacaaatttccctcccaaccaatttcgtcagggtcattggcgacccaacaacagaaatgagtctgaggggatgatgtcttcccaaatacacagatcatttaacactgtcaatcagagggaacaaacacactattctcctcgagaacgaggaacgaacccactttgttctctttgtagtgacatgggacacgcacgaagcaagtgtccaaaatatccaacacctggagcacgcagaaggcggcttgcagatcaacaacgatgttttaattgccttatgcaagggcacaattctcaacaatgcagcccatcaaagaggtgcccaaaatgtggtgaaaatcaccagttcatgatttgctattatgagggagacgctccgagaggaagcactcctcaacatacaaccaaaggagggactgttcaaaagaaacagtcctccaacagacgagaaccacctcgtccaacacaaaatcatttttcggcaataaacgaacccttaggaataagggaaaaaccgtcggaaatagcaattttcgacggaa

SEQ ID NO: 43972 - DNA, 951 bp, Heterodera glycines
tccggcacttccacctctttgcacttctttttcccgtcctacggttcgtccaaactgaagtccaaattcagcaggtcgtactccgtcagaaagtcgtcgttcagtgtgtcgtattcgctgacagtctcagcttttctcggccttcgcttcatcggcttattggcgcctgctgacagtgagtgagtgatcaagaaggtaattgctcttaatctctgatcagaaaaacgacctttcggttgcaattcgccggtgtttccaatgtccaaccgatcattcattggaatggttgtggtccgtctgatcggatttttcaggccctctcggctccaaactgactgggccaactccggctccaaaatgctgaatgcgtgtctcaaatggcccactttggccccgtccgacctctccggcatgtcgaatccgccatcgtccggcaatcccgagatgggttgtccacttctgaccacaccggtgagcaacagcagcggcagcagaacggggaacagtacatgaaggacagcctcatcggaccaggaaatttggtgtcgcatttttggggaattaggtcagtgtgtgagcccacagcccgggggctttttgctgttgccgcgggcgggcgatctccgccgatcatttggacttccccagcccacccgacggtgcctttacacatcgatcggaggacaaaagccggttgttcgcctcgtcggggcctggatattggacggatcagcgaccgaccgatccgatgcacataccgccacactcattagccacgtaattcacaccaattgctgctgttgtggcgatgggaacggtcccacgccccttctccccctcccctccccccggccatccatcattcgaaaaagcaaagcgaaaaacggcggatggattgtcgtcgatgcacaactcgttctttttctgccgttcattgtcctccccttccct

SEQ ID NO: 43973 - DNA, 1060 bp, Heterodera glycines
  unsure (1)..(1060): unsure at all n locations
aaatcacaaaaaaaagaactttcgcacccgctaaaggcacctacagaggaattttacggtcgcagaattttcgcacagtttcatcacagtttggcnccgtagaattcccaaagattgcgctggtggcaccggtgttgtcctccaacgcacccattggcaaaaacaattcacaacaagacacagaaacaaacccaccaaaacaagcaaataaacaataaaaagcaaaactaacgcacttcgagtggactttaaattcagtattttttgtgttaatttaatcaaattaattgtaagaaaagaaaggcaaaagatttaatgtgtaaaatatccgaataaaaagcatcatttgtgggtgctgcaactcttggccattttggcaatgcgcacattggacaaaccgacgaacgacgacatcccgcaaattggcacgatcatttgatgccgcgaaatgcggtccatctgggtaagcaaaatttaaaaaaatgaggaggggagagttgcaaatcacctttttcagacggtgaaaacgctcgctaaggttttgaggaatttgtgacggagaaaacaaaattctgtcgataacttaaaaaggtaacagtctaaaaatcacataaaatgacatcgaaccgtcctcctccgccacctttccgccttcgtttcccactttttttcgtttccacgagtggtcgtcaacaggaggaaaggaacagttccgtttcatcgaccccaacttcgttttgatttgtctaacatttctccattgttcaaaacgaatccgcgcgaaacgcttcaatacttcctggaccatctgacaaaaaggggaaacaaaggttgtggattcattaattaaaataaataaataattgcattttgaaaccagttgaaattcataaatattggtcgtgcaactcacaattcgcgtggtccctttgtgtatattatttccagngtaaatgttggtcagaaggtacttanattttgatgacgaaaagggatgaaatttggtgcatttgttcaaataccgaatcagtggcacgccgtgggcagttcgaatgtgctg

SEQ ID NO: 43974 - DNA, 576 bp, Heterodera glycines
  unsure (1)..(576): unsure at all n locations
ttagaagctcactattttttgctaggcttagatcacatgcgattttcggcactctgataattttagcgctcataatgggatgtataaaggcgattgtagaaggaattggaagctctaaaattgtttgaggagctttttgagcgtaattacgattttacttacaccattttttgctaggcttagatcacatgcgattttcggcactctgataattttagcgctcataatgggatgtataaaggcgattgtagaaggaattggaagcgctaaaattgtttgagaagctttttgagcgtattacgattttacttacaccatttttttctaggcttagatcacatgcgattttcggcactctgataattttagcgctcataatgggatgtataaaggcgattgtataaggaattggaagcgctaaaattgtttgaggagctttttgactgtaattactatttttacttacaccattttttgctaggcttagatcacatgcgattttcagcactctgataattttagcgctcataatgggatgtataaactctattctataaccaattnnaacccctaaaa

SEQ ID NO: 43975 - DNA, 398 bp, Heterodera glycines
aaaagcttatataaaaatacaattgtgaataaaaataaaagtacaatccacttaatgggcaaaaaatatattgatggattttattgcctcgaaccaatatggaaaatatttaaaaaatacatttaaaataattaaattaatttattaatataattttctgtactgaaatgactccatccctctgaaagtctctcactgatttttgtttttaataaaaaatcagaaaactataaatgttagttttattgagatttaaaaatattataaaataagcgcattaattaagtagattattattttttaaaataattattttgcttttaatttattaataattattttgctttaatttgatcactttgcactttttcgtgcttcgacatagcacccatattagg

SEQ ID NO: 43976 - DNA, 1107 bp, Heterodera glycines
  unsure (1)..(1107): unsure at all n locations
tctcaggtgataacnttttttgaaacttaatgaatttttttgaaatttcgcaggataatagaaaacacttagggctagctaaaaataccaagataataaaatttgattcattttgggtgaagttatgaataattttctgtcaaaaaatttccatttgatggttttttgactaacgcccattttgatgggttttgactaacgtcccagcaccgttttactgatacattttaaacacataatttattttactcttcttccgtttaaaaaataaataaatgtttatttctaaatttgtttgctgaattgacctttgcttcctttgcttttttttgtaaaattgcgaagttatctttccacagataattttgtagcaattaaattgaaacaaaagatcggaaaatgatattttgtcaattagatgatggaatggcgatttaatcgaattagtggcggatgacgatgaccataatcagatttatcaaccaatcactacgctataagaaaaccaaattcttgcaaaagatgagcataaattacatcaaggtttaaaaaagtgataatcggaataataaattaataatttaattgaacaatttcacagaatatgcccacatttgcgatttaataaattcattaataataattagcgaattgagaaaaaagtggcaatttctgcgataatatggtccaaattggcatgttagttctttgaaacgaaaatgttcagaaatgttatataacttggaaaattatgtcattttcggcggatttcttccaattttggcactttcgctatttttggctttccgtttgtcccacagtgattttgtgcacccgccgagtccacttttttctgctgctgctgctgatcaacgcaggcgaaaagatgacgcgtccgatcaatttgtgctggcctccgtccacgtgttctcccccctccccgccgacgatgcaccgttatcaccgacaaaacaccgacaatttaatttgggagttgttgcgaatttgctcgcncaacttcttcccgtcccccccccccttccactatttatgggtaacgtcgaaccagccaatgcaattgccgacgaccgcggttattaaccggtc

SEQ ID NO: 43977 - DNA, 1426 bp, Heterodera glycines
aaggtggatgagggaaagaagagggaagggagtggaaatatggtggaagaagaaatgagagaggaagaggaggcgagggggagaaagaggcgagggagagggaggggagaaggtggatgagggaaagagagggaagggagtggaatatggtggaagaagaaatgagagaggaagaggaagcgagggggagaaagaggcgagggagaggggagaaggtggatgagggaaagagagggggaggtgagaaaagattgagagatggaataaaaaaaacagaacatggaccaaagcagaaagtggaaccaaaacaacagcctctcatcatgcagcagctcggacagtctgtagagattcaattgaatcggcttcaaaaagaagagtccgtccggagagtttggggccaaaacggatgaacggaggagggacaaacggcggtggagagagcggaagagaaaatgccgaaaaaaagatacaaatggcacaaaacaaacaaaacaagtgataaatagtgttgataagaaagaatgggaagaaacactttaggagaagcacttcagtgccccgaaacaatggaaaaacggaggcgaaaggcggcggaatgtaagcgaaatgccaaaggaggggctaattaggctaattgggaagacaaaggcaatgcgcgaaaaggaataggattcaacaagtagtagttgctttaaatgccattcgaatttcaaatttccttctggtcaccgcccgtcccttcctttttaatgggttttaattttaaaattaaaattcgtagagcgtatgaatatgaaaaataactctctttgcttaagagtaaaatcaaacttctccactacgaaaagtgccggaaatacgacgagaaaaactgccgagaaaagaaacggagcgaaagtgccgccgaaacaaaggccgggctaaacaaaggacggaagggaagggcgaaaggaggacaaactcagaatcattattatcattatcgagagttaagctaagaacattaattggcataaagggaatgcttttctttgttgttggaattgcgaccgatcattaagtgaatcaatcagcggaagagacgcggagcaatggcaccgaaaatgcccttccgttcgaacaatgccaccaccgatggcacttgtcaaaccgaatatctctccttttttgggtttgggcttgctactgaattccatgagtttttcgcgcatttcttcagctgataattctttccccaattcaatttaaatgataaatgtcagttttatgtgaaaaaattaagtaatgaatgaatgagtataaatgcaaaactaaggaaattgactgaaaagactaaggaaaaacgaacgaacgaacggacggagggcattgatcacaatggaagaaagtgcgcatggaaacggagcacaaaaaagggcaaaac

SEQ ID NO: 43978 - DNA, 1033 bp, Heterodera glycines
aaacaaaaattcattatcactaacttcttaattaatcaattaaggaacctccggaaaaagaattgtaattaaaggcccgctgattgataaataaaggctagaattgccgctaattaattcccccctttgatgattaattgatttcctcctttgatcaagccccgctaacgatgtcataattgattaaggcccgatgattggtgtctctattaattgcttaattaatgccagttaattggttcccttacttcgatcaaaaccctctaattgattaattaatgccctactaattaattctcctcttttttatcaagggcttctaattaactaattgattccttcctttgaccaatgcccgctaattgattaattggttcacccctttgatctatgcccgttaattgaagtcctctaattgattaattaatgccgactaattgctcccctcctttgatctaggcccgtttgccgcccactttttcggtctgtacactgccggtgtttcgtttttatgttcctttgctgttgcgttcgtttgcatcgccatcagctccatttggcctcgtacggcttggtgtccatgtcactgattatcaccggatttgtgttcactgtgttcgccgtttttcaccgcgacggaggcggcgaggaagagaatggaccagaaagtgatcaggtaaaaatgccgtagaaaaaaaacagggtccgaattcggcataggggaaaaacttttgtcgaaatttcactctcgaaaatttatcattcgggattaaattgttgggggtgatgttgaaaatgtaccggactgaattgggatttatcaggactgaatttggcattcgataccgaaacgtaccgggttgaattcatcgagaccggcggatttaacattcgattcttaatcattttggattggattgatccgaaatgggttgagcattcgagactgattcgggccgtgtttaattgatccgggattaaagcatcgaaattcgaactcttttttttcccaatattcttttgaattatgaga

SEQ ID NO: 43979 - DNA, 700 bp, Heterodera glycines
  unsure (1)..(700): unsure at all n locations
aacatattttgaagcgggcgcgaagcaccgaggccacgaagtgttcttacgagccccacaaatttagaaatgggcgcgaagcgcccatcttagggcgtaaagctgcctacaaccccttaataacttttcaaaaattcatttgttacatgttacatgctaagagaggaaattcatgaactccctccgttttcatgtaacatgtaacatattttgaagcgggcgcgaagcactgaggccacgaagtgttcttacgagccccacaaatttagaaatgggcgcgaagcgcccatcttagggcgaaaagctgcttacaaccccttaataacttttcaaaaattcattgatttcattatgttaatacatgttacatgctaagagaggaaattcatgaactccctccgttttcatgtaacatgtaacatattttgaagcgggcgcgaagcactgaggccacgaagtgttcttacgagccccacaattatagaagtgggcgcgaagcgcccatcttagggcgaaaagctgcctacaaccccttaataacttttcaaaaattcattgcatttcattatgttnatacatgttacatgttacatgctaagagaggaaattcatgaactccctccgttttcatgtaacatgtaacatattttgaagcgggcgcgaagcaccgagggcacgaaagtgttcttacgagccccac

SEQ ID NO: 43980 - DNA, 992 bp, Heterodera glycines
tatttatatgcacatttgatatataataaaatggcatatcggtggggcataatttgtatagtttaattccgtgtttcatcgagatgacctacccgtttgggtacttatacagtttacagggtacttttcacatacattttttttaaaatggctgtgcttttctaaattttgtggagggcaccgcccaactcgccgcacctttgttttatggctttctcgccgccattgaaaaaatgaatgtgaaaaatttggattcgataaatcatttaacgaaatattcttaatcagaactttttccctaaaatcgctgctaaggaaagccgaaaattctagctattttttatcgggacaacaaatttagacaattgccagttgctgatgcgaacaaccccgaaaatccatgaatgaattttcatgatttattatggaaacattttttgcaatcaaaaaggtctgtctataggtctttaataaaattcacgtttcatcacagttaatacatattaggcgaaacaattgatcacaagtcatttgaaatgataacacagagatacaacacattgataatggtgatcaaccaacaacagacaattatggtcgcttaaacagtaaccaggcgacataatactgtacatacagtgagatacaataatacaatctttacagttgggatcatatgtgggaatagggtcagttgaatgtatcctcctcctcctccctcttcggcggttgtcttctgcatctctcccatccatcggtcgtttgtcgtgtcatctcatcgcgtggttcttcgtccattcacgggcaattcggttgtactcctcgcggttgtcgcggtacatagtcgcaatgtcctgccgcagcgcactgttcggattcgggtcacagagaagcgaagagatggagagcagcactgaaatggagaggggataaggattaaaacggcatttccaaatgtgaaaaatcccattttcaaacgacaaaatatcaca

SEQ ID NO: 43981 - DNA, 1550 bp, Heterodera glycines
  unsure (1)..(1550): unsure at all n locations
aaattgtaaatttttntggagttaggtattttgaaaatttcctgtacctatccggggtagttccgcagtaccaaaaataattgccgaaattacggccccaccaaattagttaaataaaaatttaatttcaagaaaaaaaaccgttgtaccaaattttataggcatactccacggtccataattaacttaacctgaaaatatttcaacgcttattggttttaaaaaaattttcgttactttgagttttccatgattttattttttgcaaaattaattatattttaagctaataaagattcttttctcaagactaaaattagacttctaaatactgtaaattttattgattggataatgattatttaaataaaacttttaaaatattccaaaaaaacaaaaagaaaaaaaagaaactgaccaaaacagctgaaatgagtgcaataatgataattgccacaattaattgatgcactgcttctgtgatttgttgatcgccaagaattgaatccaatcgcaaatcccataaactgtccacaattcgcttgccttggcccgtctgattgcttggctgatattctgccttagcaaaattttgagtttaaaatttaaatagaaaacagttaaaaattgattattaataaaatataagaaaaattgaatttttgtaagctaaggacgtccttttaaaaaatactctgttatggcatttaaaaagatcattgaagcaagaacgcataaaaatcgaatttttcattaattttttggtttttggctaaaaaaataaatcattttcaactaaactcaaaaaaatttcgtaattaaaagttaacattagcagttctctgcttttatgaaatttctttatgaatttaaaataatattgatttactattatgttgctaaattaaaatgaattacaaattaataaaatgtctttataaatgaattaattttgtcaaaaaaatattctataaatttataaatttttttatttaaataacaaatcacaaacattgggttttctgctgctgattgaacttgatggtggtgggactgttttcatttgtcgataatcgtttgaaacggaggccattgttgaggttgattgattataattgaaagttttatttttaatcatcgagaattaaaaataaatttaaataaataaattatttgtgttttaaaaaaaaaaaaattaaaaaaggaaacaatttaaaaataagaacggactgatgacttttttgtgatcattcacacaatccagtgcttactgactgaccagatcacaagtcattatatcaattaaagttgctcaaattaaaagcggaccgcggaaaacgatcaatttcttatcgaaaagtggcgatgagtgacattaattggtaaaatgaaaaaattaattaatatcaaaatgagaaacgaagaagggtcggcaaattgcgttaatttaatttttctagataataaaattattttgaaatttttggtttattttttttacgaaattagaagaattccaaaactaataggatttttttcaanatttttat

SEQ ID NO: 43982 - DNA, 998 bp, Heterodera glycines
attaatcgtatttatatatagcattaaaacttgtaatataaatatttcctaataaagaatttcccagaaacctaatggaaattattgcccatctcttttcacttcttggcattacccggacaaaatctgtcgagcccaagttggcacttcggccgtgtaactcctattcaaaaagtcaaataaggcagtaagaatctgtacatcttataacaaagtgatgttaactttcaatattattactttaccaaaatcaataaaatgtaacacggtctctggatagaccattgacgcgtttcacatgaaaatgtaacgtactaacgattcattcaattcagtcgctcatctcaccgtcagaaaaggacctacatgcgttattataggcctctgtttattcgttccaagagataggttcagtccttacattcaaaattaagagagcatcacccaaagcgagaaagagtaaatgaagaataaaatccggctctttgatagaattcgtcagaaaaattataacgatttcatcatttctaccccccccccccccctacatggcgtcaaaacgtcggcgccaaaacgttttggttgttttaatctattttagaaacaaaaagagaattttgaaattttttattttcgattttttattcgaatttcggctccgggttccgaattggtcgaaatggatgcctggttcgtgagcagcgaccctgaaaaccattggaagcatgttttcatgacttttgaaaacaaaaaaattttcttcaaaaagggaggcaaccaacaaccatcggcagtattaccttcgcgaaaaatacgttttttttgttgttttacaaaatttttcgaaaatttttaaatttgggtgtttttctttttttattatggcttggcgccaaaacgtcggcgccaaaacgtcggcgccaaaacgtcggcgccaaaacgtcggcgccaaaacgaccctggcgccaaaacgtcggcgccaaaacgatacggacccc

SEQ ID NO: 43983 - DNA, 1298 bp, Heterodera glycines
ggtagggatttaatagtgactttcagagatagccatttttgtcaataactatttttcgtgcgttttcaaacacactattagtgctttattcaccgctacaatagaagacaaaagttggtgtccaattcccggtagggatttaatagtgactttcagagatagccattttttctcaagaactatttttcgtgcgttttcaaacacactattagtgctttattcacgctacaacagaagacaaaagttggtgtccaattcccggtagggatttaatagtgactttcagagatagccattttttgtcaataactatttttcgtgcgttttcaaacacactattagtgctttaatcaccgctacaatagaagacaaaagttggtgtccaattcccggtagggatttaatagtgactttcagagatagccattttttgtcaataactatttttcgtgcgttttcaaacacactattagtgctttattcagcgctacaacagaagacaaaagttggtgtccaattcacggtagggatttaatcgtgactttcagagatagccattttttgtcaataactatttttcgtgcgttttcaaacacactattagtgctttattcagcgctacaacaaaagacaaaagttgatgtccaattcacggtagggatttaatcgtgactcagagatagccattttttgtcaagaactatttttcgtgcgttttcaaacaaactattagtgctttattcaccgctacaatagaagacaaaagttggtgtccaattcccggtagggatttaatagtgactttcagagatagccattttttgtcaagaactatttttcgtgcgttttcaaacacactattagtgttttattcagcgctacaacagaagacaaaagttgtatccaattcccggtagggatttaatagtgactttcagagatagccattttttgtctagaactatttttcgtgcgttttcaaacacactattagtggtttattcaccgctacaatagaagacaaaagttggagcccaattcccggaagggatttaaaagggcttttcaaaaaaacccttttttttctaaaaatattttttcgggggttttcaaaacactatttatggtttatttcacgcttcaaaaaaaaaaaaaaagtgggggcccattccccgggggggtttaaaaagggtttttcaaaaaaaccctttttttttaaaaaaatttttttcggggtttttaaaaccccttttaagggtttttttccgcttacaaaaaaaaaaaaaaagtggggggcc

SEQ ID NO: 43984 - DNA, 1030 bp, Heterodera glycines
cagcttaacattcaaatcggtcatgcgattctccagagtttccaatcggtctttagtctgacgaccattttgagcatgcaaaaattgcaaagagtgaaaatcgtcgcgcaatttgtccaactctttgccaatgttatggtcacagccttaacaagtgtctgtttttcctttttcttaattttgatttggtcactttttcttccattgttttctccaagtccatcggccgtttcaatccaacggaaatcgcttgggctttcgtttcggctgttcgtcacaaatgtatggcacgtgttgttcaacgacttttgcttgttcccatttggcggttcgatgtgcaacaaacggttgaggatggaatcgtccaggcgagaagcatgtgtctgatattggtaaatgcaattcctttttttgcataaatgttttatcactcgcctcatttcggctctcttcctgcgacgttcccttgcggctttggccgtgaaaaggttcctcgctttcggttgtgttattcgtggaattcaaagtggacgaggcggtcgaagaagtcaaagacgaatcggaagaagccgaagctgaggaggacaagtgttggggacggttgggagcggacgaaagagaacgaaattgggggagaaaaggcgaaatggatggcgaattggtagaagaaggataatgaactgaaacaacaaaaaaggaatagagagagaatatgatggcctcttataaaaggaagtgtataaaagtttaaatcggaaaacaatcagtatgtaaatttggtatcattgggtagagcagaatcgaattttttaattccagtggtatctcacattatttatattttataattagctataaattaactaaaattatttacatgttgatttggatttgaacttagagataaaccctcattagaatttggttttcttaggctcaacttttcaatttttgtcacacatcgctaaaattaaaaattcgcaatacaaaagatcctgctctatccaatgaaacccatttatataccttt

SEQ ID NO: 43985 - DNA, 1114 bp, Heterodera glycines
ttttatagcagtccacactattggcacaattcaagtgcgaagtgccaatccaaacaacaacacaacatgaacaacattggattaagccaacagataaatgtgcattcgatcaatttaaatcactaattgatacggaataaatttaatcttttttcatttttaaattaaaaaaataaatatccctctaggttttcgtgaaattttttataatttgtgaaaattatcgcggtactaattactaatctccataatctttatcataaacatggccatcagctatacatttagaaatgcaatttccgattttaggcattttgaatttaatttcacagtttacgatttcggtgggcgtcaatggcatctcctaattgtgccctatgcattaaaaagtgccataactttttcacggttattcaatttgccattctcttaaattaaatgaaaattcattttgattgacattatcgtgagaaagacaaatttttgtcggttttgcgtttcttgccttgggaaattttcggtctcgagcagaatgtattattcatttttgggccttccgtttcagcggcaccattttttttttctaaattatgggaaaattttcttttttaattcattttcaatgcgatttctcagaaattctcatgctattttaaaaagctcttttccattcattcatttgacgaaatggcaaaatttgcaatcaagctttacgtttcataagcacaaagaatttaaaatgaaatttagagaaaataataattcattttaaaagcaccaaatatttctcttggatttaaaagataatggcgccaattaatatgagctcagaagatccggtatgaattaatatgatataaaataatatataaatatatttttatttattttcagctttatttggcctaccgttctgtcggtccgtccgccgatttaattgtgccggccgttgcgctgaatttggttgttttggttggcattgtgttgaacggcacagttttggtggtcactgtcaaatccaggcaaatgccattggcattttttattttaattatcataattgaattgaatttcaatttctatttttcagttccctccgcggctccgccaattt

SEQ ID NO: 43986 - DNA, 1489 bp, Heterodera glycines
  unsure (1)..(1489): unsure at all n locations
aatagcgtagcaatggctgagagacaggagtgagactatgtgtcatagtttatttgtaagttatttttgacgagttcaacgaacgagtcacaccactgctacccgtgcaaaaacagcgcatcaaccgtttgacactcaagactttctaatgtccaattttgctgcactgaaagcttcacagaatttgctcggccaattccagcaacatcaacagatgttgaataattgtcacgcatcgcccgctattcagcgtcaaagatccatcgattatgacacggagcgggagaagaacagcgaaatgggaccaatgacgggcggagttgggacagcgatgtcaactgccgatttggtcaccgcacttgggacaatcaaagcgcagaacaacagcagcaatatcggaacggacaaatgtgaggataatgaaaaaacaagaaggaatttgaggaatttcgttaagtaaattctgacatggaacacctcaagcgggacaacgaattccccgtttattcgccctctcaattggccaattccatcatttcgcaatgcaaaactgaccaaccgcatcagtcttcggcatccgttgacttctccaacggatggagaatttcatcagacgcacggagggatagcagtgagccggacggagaaattggctcggacatagccgaatcatttggtgggtttgttactttgggtctcgatatttgccaccatccccaaaaccgaattcaaaacataccgagaagcattatgtcgttaaataagtaacaggaagtaataacattcgaattcattgttagaaatattattgccacagtatgacgtataatgaacttaccgtctcaacaggtcgatgcattgttcaacaactgcaaacagtctcaagaaagaatccgatgctcgcagtgcaaatgcgccgggaattgatggacgtgtgcttcaaatacgaaatgcaagcatgcgtcatcgacggtggccatggttgactcgccattacttcatgtgatttttttcccttcaataatctcgaaacttttgtttgtttgttttgcgtttgtcagggaaaatttcctatgtggtacttcttcctcggctttttcttgataagtatcacaacaaatattatttgtctcttcaattcattttcctatggagaagtcaacagattaaacatactgaaccattttggcaaaattcatacccctgcatttgattttgcatattcccggttgttatttgattattggtcactgatcacctcttccgatttcaagtcatccaaataccaaaatttttgattctctaataaatgtattttaatcgaataaattatttatttgttgaaaatttatttctccttttataaaaagtaaaatagaaatttcctaataaatttggcggtttaacagctaancataagataccattctcagtntagcacaaaaagggctttattttcagacaanatcgcgaattaacacaaaaaaac

SEQ ID NO: 43987 - DNA, 943 bp, Heterodera glycines
atatttagaggttatccccagaaaaatggctatctctttttttgataatttttatacacatacaaatgctctcgagcatgatagggagggcggtgcgcaatagaccttttatttttgagggaatttttaaatttatactctatcccagaaaaatggctatctctttttttgagaaattttatacctcacaaaagcgcttgcgtatgagacggagggctgtgcacaatcgccattttatttcacagaggatttttatatttagaggttatcccagaaaaatggctatctctttttttgataaattttatacacatacaaatgctctcgagcatgatagggagggcggtgcgcaatagaccttttatttttgagggaatttttaaatttatactctatcccagaaaaatggctatctctttttttgagaaattttatacctcacaaaagcgcttgcgtatgagacggagggctgtgcacaatcgccattttatttcacagaggatttttatatttagaggttatcccagaaaaatggctatctctttttttgataaattttatacacatacaaatgctctcgagcatgatagggagggcggtgcgcaatataccttttatttttgagggaatttttaaatttatactctatcccagaaaaatggctatctctttttttgagaaattttatacacacacaaaagcgctcgagcatgatacggagggctgtgcacaatagccattttatttttgagagaatttttaaatttagacgctatcccagaaaaatggctatctctttttttgagaaattttatacctcacaaaagcgcttgcgtatgagacggagggctgtgcacaatcgccattttatttcacagaggatttttatatttagaggttatcccagaaaaatggctatctctttatttgataaattttatac

SEQ ID NO: 43988 - DNA, 1329 bp, Heterodera glycines
ttttatttttgagggaatttttaaatttatactctatctcagaaaaatggctatctctttttttgagaaattttatacctcacaaaagcgcttgcgtatgagacggagggctgtgcacaatcgccattttatttcacagaggatttttatatttagaggttatcccagaaaaatggctatctctttttttgataaattttatacacatacaaatgctctcgagcatgatagggagggcggtgcgcaatagaccttttatttttgagggaatttttaaatttatactctatcccagaaaaatggctatctctttttttgataaattttatacacatacaaatgctctcgagcatgatagggagggcggtgcacaatcgccattttatttcacagaggatttttatatttagaggttatcccagaaaaatggctatctctttttttgataaattttatacacatacaaatgctctcgagcatgatagggagggcggtgcgcaatagaccttttatttttgagggaatttttaaatttatactctatcccagaaaaatggctatctctttttttgataaattttatacacatacaaatgctctcgagcatgatagggagggcggtgcgcaatagaccttttatttttgagggaatttttaaatttatactctatcccagaaaaatggctatctctttttttgagaaattttatacctcacaaaagcgcttgcgtatgagacggagggctgtgcacaatcgccattttatttcacagaggatttttatatttagaggttatcccagaaaaatggctatctctttttttgataaattttatacacatacaaatgctctcgagcatgatagggaggacggtgcgcaatagaccttttatttttgagctaaattaatatatttaaatttatttcatgaattttgtcaatttccttaaataccaatattttaattttcaaaaaataaatattttccattgctttagtattggctgacttgcgtgaaggaattaaaacgtgatttttcacaaaaaattgtaattgcatcaatcatggcatcgtttaaccaagtgaaattaaattattatttggaaataaaataaaatatttttaaattatagcaagattgggaatttttggcatcccgttctgaagaagcaggcgctgatgctttggaacttaatttgtcgtgtcctcatgggatgggcgaacgtggcatgggccttgcctgtggccaagtaattcaaatttcaatttttaaatatatttctttttcattctgaacaaaagtagaaaatatttcaacttattttatta

SEQ ID NO: 43989 - DNA, 779 bp, Heterodera glycines
actttattgggaaaattcctagaaaattttaatttaaaaatttgaagtggatttaacatatagaaaataaaaagtttagcgaagtaaattaggttttccaatattagcagagataaagaaataatacgccaaaatgagagatgtatttttctttgcactctctattttttggttcatctctcttttattttttaaaaggtaattttttttttctttaaaatcggaattttcaccattaaaaaccgggttggtctcatcggccgactctcttcgtcaccaaagccaaaatttagcgttttgatatccaatttaaacttagaaaacacacaaaaaaatattcccctaaattatgctttaaccgcctgggtgtcgaaatgtccgaattttctcaggtggcgaaacgtccgattttggcttaggtggcgaaacttgtgccggtggcaaactgtcggctcgtcaacaacttccatatccactgaaaaaattgataaaacaagacaaatttatgctaattaaaagaatggttaagtggaaaaagcgtaagaagagccaaccaacaaaagtgaataagaatggccaacgaaaaggccaactcggacattggaggaatcgataagcacagaaacgatgggagacgatgttggctgttgtggaagtggcagaacggagagggcaaaccgtcgccgaatggcggacagtgagcagaagggggggggggggaaggtcagcgcagacggcgaacatcgatagaaatggacagaaaaagcggggcggggggg

SEQ ID NO: 43990 - DNA, 1059 bp, Heterodera glycines
  unsure (1)..(1059): unsure at all n locations
gcgtggattttgctcccccataatttgtntgagtacnccaaacgggacactgnaaaaaaatcgatttttttgtntcggggcagtccccccgaaccgatgcgcccatatttatggggagaccgaatccttccggaatagcttccctatagcctgtactttaattctgcgttggatttttgctccccataattgtttgagtaccccaaacggacacttgaaaaaatcgatttttttgttttcggggcagtccccccgaaccgatgcgcccagatttatggggagaccgaatccttcgggaatagcttccctatagcctgtacattaattctgcgttggatttttgctccccataattgtttgagtaccccaaacggacacttgaaaaaatcgatttttttgttttcggggcagtccccccgagccgatgcgcccagatttatggggagaccgaatccttccggaatagcttccctatagcctgtactttaattctgcgttggatttttgctccccataattgtttgagtaccccaaacggacacttgaaaaaatcgattttttttgttttcggggcagtccccccgaaccgatgcgcccagatttatggggagaccgaatccttccggaatagcttccctatagcctgtactttaattctgcgttggatttttgctccccataaatgtttgagtaccccaaacggacacttgaaaaaatcgatttttttgttttcggggcagtccccccgaaccgatgcgcccagatttatggggagaccgaatccttcgggaatagcttccctatagccagtactttaattctgcgttggatttttgctccccataattgtttgagtaccccaaacggacacttgaaaaaatcgatttttttgttttcggggcagtccccccgaaccgatgcgccccagatttatgggggagaccgaatccttcgggagtagcttccctatagcctgtactttaattctgcgttggaattttgctccccataattgtttgagtaccccaaacggacactagaaaaaatcaattttttttg

SEQ ID NO: 43991 - DNA, 1124 bp, Heterodera glycines
aacttaataatgcatcattctgtgaatgccaatgtcacataaatattaaaagtacttaaaaaacattttttttcaaaaaaatttgaatgacttggaaaatttgcaaaaaataattttaattttacttaaaaaaatgcatttaatttttctgagaattctttctttttgaaataaaattaatttggtccattaggcagaatgaacccaatttccgttttttgtgattaagctttaagcgcgtcattatgcttttcctatttaagggcatgacactgttgcgcatggtctaatgtggtatcaacgaacaaaaaatttctcactttaaaagtattttttttaataaaaaaggtttctgtggtccatggcatgccatcccgaataccagcaaaaagtacatgccgaaattgttgaacattttggcgcaattgatggtgaggaggaagacgatgagcagctgctgcaattgactgcctctgatgtgaacaaattgccgtatttggaccgttgcattcgcgaaaccatgcgcatgttcccggtaatgatgagaatttggtgccacaaattattaaattgccacatttgtactggggatttcaaatgtttcattaaacaaacaaagctagagctccccataaaaatatagatttttaacaaaaaaaaaatgggataaaaattaaaattgataatcattatttgtctatttttaaagcaattaaaaaaaacattttaattcctaaacgtaatgggaattaaaataaaattaaaaataatcataattcaattttagctgattcccatattggagcgtgagcttcaggccgacttgcgcatctgtgacaaaactttgccccgcggggcaatcgtcgccattatgccactggtcattcaccacaacgaaaaagtgggggaaggataaaaaaaaataaaaatttaatcaatggtgaaatgccattggaaaattttgtattttattgcctcaatttgatcaatttttaaaggtgtggccacggcattgggaatttgacccggacaattttctgcccgaacggatggccaaacgtagcccatatgactatttgccgttctctgctggcccccgcaattgcttaggtgtggagcaggga

SEQ ID NO: 43992 - DNA, 1041 bp, Heterodera glycines
agcagagaaagcgcgacgaggcgatgaaggcgatgctgcagccgttgttaatgcaagtgatcagtgctaacggaaacacgccgttggaagcgaatgacgtcaccggcatgttgaagagaaaggcggtgaaacgccctttagaaatgtctgatgccattgccgaggataaagcgtaattaaaatgtgtttctctgttgccattctcaatttttttttttttttaagtgaagccgatgttgaacagaacgcgaagatgccgagaaatgaaacggacggcggaaagggcgaagagcgaccgacgaaagactgtgaagcgaatgggaactgacgcaatcaatgcatttttgattcggaccttccttcaaacctcgaacattcccattttttgttgttttccaaaggttgccttcctcgacgaatatgccacttttgttttatttatctgctcttgatctgatccttatttattttttgatctgatatattctgtttgatcttgattgcaacaatttacgaaatgaaatctgtcaatttttatgttgacatttttgggggaaagaacggttcggtgccagggaagaatgaaagtgaaatgggtaataatactgccgatgatcaccctaaaaagtcgaaaattcatttttgtgttcgacctgtactagagaccggacaactggggtcggagggatcccgactgaatcccgatcaatcccaaagattttttttcgggatcccgctggattatcgggatttgctaaaattctttttttttcttttttggttttgtgccaagtttggttaaaatgcttatctaacatttagaattgatcaattcgattttgaaaaatagggatgggaattatatcaggcttttataaatatttcaaattcgaatatcatgctcaaaaaatagattttatggtcaaaaattagaacatttaacaacattgctttaaatagtttttttttacaatttaaatcaattaatattaatttttgtattttcgcctcctatgatcatttttaacaatttcgaggaaa

SEQ ID NO: 43993 - DNA, 213 bp, Heterodera glycines
gctcgagcaggacctgcagaagctagcttgatggggatcagattgtcgtttcccgccttcagtttaaactatcaagagagggaggggagcggcgcgtagcgggggaggtgggtggcggaagaagaaaagggtggggggagtatgagtatgatggtcaatatggagaaaaagaaagactaaaaggaaatacttattcaattcaaaaatgtagat

SEQ ID NO: 43994 - DNA, 1009 bp, Heterodera glycines
tcaactcaatgattcgtcaactcagccaaatgtcaacgattcgtcaactcagccaaaatgcgacgattcgtcaactcagccaaatgtcaacgattcgtcaactcaatgattcgtcaactcagccacaatgcgacgattcgtcaactcagccaaatgtcaacgattcgtcaactcaatgattcgtcaactcagccaaatgtcaacgattcgtcaactcaatgattcgtcaactcagccaaatgtcaacgattcgtcaactcagccaaaatgcgacgattcgtcaactcagccaaaatgcgacgattcgtcaactcagccaaatgtcaacgattcgtcaactcaatgattcgtcaactcagccaaaatgcgacgattcgtcaactcagccaaatgtcaacgattcgtcaactcaatgattcgtcaactcagccaaaatgcgacgattcgtcaactcagtcaaatgtcaacgattcgtcaactcaatgattcgtcaactcagccaaatgtcaacgattcgtcaactcaatgattcgtcaactcagccaaatgtcaacgattcgtcaactcaatgattcgtcaactcagccaaatgtcaacgattcgtcaactcaatgattcgtcaactcagccaaatgtcaacgattcgtcaactcaatgattcgtcaactcagccaaaatgcgacgattcgtcaactcagccaaatgtcaacgattcgtcaactcaatgattcgtcaactcagccaaaatgcgacgattcgtcaactcagccaaatgtcaacgattcgtcaactcaatgattcgtcaactcagccaaatgtcaacgattcgtcaactcaatgattcgtcaactcagccaaatgtcaacgattcgtcaactcaatgattcgtcaactcagccaaatgtcaacgattcgtcaactcagccaaaatgcgacgattcgtcaactcagccaaatgtcaacgattcgacaagtcaatgattcgtcaactcagccaaaatgcgacgat

SEQ ID NO: 43995 - DNA, 1103 bp, Heterodera glycines
  unsure (1)..(1103): unsure at all n locations
gcctgcannggtccaggctatnagggaagctattccggaaggattcggtctccccataaatctgggcgcatcggctcggggggactgccccgaaaacaaaaaaatcgattttttcaagtgtccgtttggggtactcaaacaattatggggagcaaaaatccaacgcagaattaaagtacaggctatagggaagctattcccgaaggattcggtctccccataaatctgggcgcatcggttcggggggactgccccgaaaacaaaaaaatcgattttttcaagtgtccgtttggggtactcaaacaattatggggagcaaaaatccaacgcagaattaaagtacaggctatagggaagctattcccgaaggattcggtctccccataaatctgggcgcatcggttcggggggactgccccgaaaacaaaaaaatcgattttttcaagtgtccgtttggggtactcaaacaattatggggagcaaaaatccaacgcagaattaaagtacaggctatagggaagctattccggaaggattcggtctccccataaatctgggcgcatcggttcggggggactgccccgaaaacaaaaaaatcgattttttcaagtgtccgtttggggtactcaaacaattatggggagcaaaaatccaacgcagaattaaagtacaggctatagggaagctattccggaaggattcggtctccccataaatctgggcgcatcggctcggggggactgccccgaaaacaaaaaaatcgattttttcaagtgtccgtttggggtactcaaacaattatggggagcaaaaatccaacgcagaattaaagtacaggctatagggaagctattccggaaggattcggtctccccataaatctgggcgcatcggctcggggggactgccccgaaaacaaaaaaatcgatatttttcagtgtccgtttggggtactcaaacaattatggggagcaaaaatccaacgcagaattaagtacaggctataagggagctattcccgcaggattcagtctccccataaatctggggggcatcgggtttcggggggaactgcccccaaaaacaaaaaaaaaaattttttt

SEQ ID NO: 43996 - DNA, 1240 bp, Heterodera glycines
  unsure (1)..(1240): unsure at all n locations
ggggtttggtataacgttttagaaatagcgtagaaaacagcttcgatatcaagaaaccaagtcaagtccagaaaggaatattttaaaacgatttcgttttgttttggcattatgataccgaataactttcggaaattatggaaacaaaattggagaaattcgaataattttttgactgcaaatttttttccttttttgaattgggttcaaaaaaattttaagagaatttttgattattaatttgaagtcttgaatttatttgacaaatccaagacttaaaactgggagaagcaaggggctgtggctgggggcctaaaatttgggccacattggagaattaattctgatttctgaaaaagtcccagaaataactattttttctttccataccttcttgtagagctcgagctgctctttccaatggtcttatcccggtctcgatccgtgccgaactcacaaagttatggagtgaaatgtgaaatattgttttcaccacaaggcattttttctgaaaaccggattcaaaaatctggggtttggtataaccgttttagaaatagcgtagaaaacagcttcgatataaagaaaccaagtcaagtccagaaaggaatattttaaaacgatttcgttttgttttggcattatgataccgaataactttcggaaattatggaaacaaaattggagaaattcgaataattttttgactgcaaatttttttccttttttgaattgggttcaaaaaaattttaagagaatttttgattattaatttgaagtcttgaatttatttgacaaatccaagacttaaaactgggagaagcaaggggctgtggctgggggcctaaaatttgggccacattggagaattaattctgatttctgaaaaagtcccagaaataactattttttctttccataccttcttgtagagctcgagctgctctttccaatggtcttatcccggtctcgatccgtgccgaactcacaaagttatggagtgaaatgtgaaatattgttttcaccacaaggcattttttctgaaaaccggattcaaaaatctgggggtttggtataaccgttttagaaatagcgtagaaaacagcttcgatatcaagaaaccaagtcaagtccagaaaggaatattttanaacgatttcgttttgttttggcattatgataccgaataactttcggaaatatgggaaacaaattggagaaattcgaataattttttgac

SEQ ID NO: 43997 - DNA, 815 bp, Heterodera glycines
tagagtagagcgggaccgggaccaaaacacggacaactgagtacaactgagtaccgaggtcccggttttgaccgggaccggggacccaagtccgggttttttcccggttttcccagccaaaaattcccggtttttcaacccgaataggtcccggtcccggttaagcccaaaattcccggtcccgctctacctctagtttcgagaattgcaatggaatcatatgtttgtggattgaattgtggcgatggtggaaaaacagcctcagagtttggcattattcgtccacaattggcacacggcagtccgctggcggcggccgttagtaagtgtgccaacagcaaattttgccaaaccgccgccgccactggcagaagcagcagatggttgtttgccagaacgtaataaatatgctccgtttcaaattataaggtcaaaactttgaagacatgtacatatcgttttttaaagagcaaaaaaaaacctgaaaaattcatataagcataacttttatgctgaacaaaaaatcttttacagaaactcgatcagatcattccttcatggtgatctgaaaaccccaaaatggcttgaaatcaggatatcgaaaaaaattcctaggggctggaaaattttcgaatagcaaaaaagtactttatttcttaagaaaacagtgcatttgacagtaatcttaatcacttcgaaattaatcgtacatcgtccggagtctcagcaaacagaagtcgtagagaaatgcggttttttgcatttagtagcaaattttgtgctctttctgtccgccatattcgtcttccacgaaa

SEQ ID NO: 43998 - DNA, 1308 bp, Heterodera glycines
atgaatttatcttagagtaattaattaatatttactctttttcaattaattgctaattaattaattaactgtctaagattgttttgaatttaggatagttaattaaataattaatgactattttaaagtgattttcggtttaattaaaactagggttgttattaattaattgctaataattagtagttatacgtctcagataataaacctcagataattatttaatattaattaattaattaccctctctcagatggttgctctgcctgttgttgcctttgattatgctttccgtgctgttcgccggtgtcattgcgttctgtcgccagtcccgtaaaggtgccatcattttctctggccttggcttggtcatttttctcgtcacatggcttctcttttctgcggcatttccgctcactgtggtaaggccaacaaaaaattaatttaaaatttaaaaaaatagttggaaataatttttagcgggtattttgtaatcgtctatcggatttatgcatttaaaactgtaaaatttagttcatttaaaaaaattgctaaaattttaatgggaattactaaactttttttgaatttttagttacaaatttcaaatttctccaatgaactctcaactatttcacttggattttcaaaatttgtcaaaaaaaaactccaaaaattaaatgattttcgactatagtatcattttaaaattgttattttttgacaattgctcaaattcggcacgaatctttatttgttttttcaattttggcattctgttttctctctctttttcaaaggcttatgccgatttctgctcggatggtcgccctttctgcgcacgcatctcaacgacgagctaattgatgtcatccaattttactcggactgcacaatgcaggagccgaacacaagccctggggcaacatcaaaggcattggggtaattaattattaaaaaatactgtagtcggcttactgtcgggaatactgtgtttcccttgtcatggaaggcatggcggaattaattaattaaaataccgtatcctgggtattttcgtgaataccatatttcccctgccatttaatgaattttcagtgataaattagtgcccggggcactgccgctggcaatgattcgtcaacttagcatggaacagaatgaagctgaacacaaattggaggcactgcttgcacgtctgttcaacggttcagcggaggtaacatcgaaaaaacattttaaattaattatttaaaatttaattttaatttgtttttgagggattgagggtgcccactggctatatat

SEQ ID NO: 43999 - DNA, 686 bp, Heterodera glycines
atacaaaaacaaaattcaaaatatcttaatttctgtcttctgagtgagccatgggaaaaaagtagaaaatcaaggagcctagccactaggccatttacacaatagtcagtgtgctttaaagaatttattaatacttttttaaattttttcctttgacttcaaaattcatcagtaatttttcactcagacccccattcttaccagtgcttgtttttcccggtatgcatataaaaattaataatttgacaccgaaaaaataaatcttttgaattggcaaaacgttttatgtaatttgaaaaataaaacgggcacttgaaaattggaaatcagcgaaatttttatttatgataaaaatatcggaaaagaaaaaaataatataaagacgaaagccattcaaatcaaaaatcctttaaacacttcaaaatcattcaattcgaaaatgaaactgttttccatctgttcagtgttgcaaatggaattcccaatttctcagcaattattttgtcactaatttttggattgttttctttaattttgcgatatttccgcatctttctcaatttgtcctcattcgtatatttattttgtgcttaaaacgaaaataaaaaattaaaaataatacaaaaattttctaacttttatggtattttggcatcaattcttttttccattttcgaaatgtaaat

SEQ ID NO: 44000 - DNA, 824 bp, Heterodera glycines
  unsure (1)..(824): unsure at all n locations
aattttcaattttttatagtctaatctactcaaaaccgttcagaattcaataaaaataacattcacggtgcgaaaaatggggtttgacaagtttattggggaaaaaaagactttacaaaataatacccctgggagaagggagtgggaaacatgatttcaaaatttttgttgaaatatttgtcgtgctctgaagggcgtgggaggggggggtgaaggcccaccacgaggccgcgaagaggccgagtgagtaccttcggtgcaggaaaattattaaattttaaaattttttaattgctttttaaatatgccaaaaaatgtaggcttaacttttttagtgaaaattcgatcactcatattttttgctaattgagcagaagcgtaccaaactatgcagggatactccccggtaaaggactaacttacactgaaatgagcgccgagctagctggctcaaaaaaaattttcgaaaatctgagtctttcgtttttatttattttttgcaaaattaattcataaatattttttcagaaagggttctgaaacgcaccaaattttatttacatgttagtttaggcactctgatgctttttctatcaaaaagggagatgaataaaatttttaaaaatttttaattcctttttaaacaggccaaaaagtttaggcttaacttttttttcagaaactgatcagaagcgcaccaaactttgcagggatactgaaaggaagagaaataacctattttanatattatctagtcagttcatttanataatttttatccaaaaaatttttttttgngttttcggggcagtccccctgaacga

SEQ ID NO: 44001 - DNA, 905 bp, Heterodera glycines
  unsure (1)..(905): unsure at all n locations
caaatgatgaacaccagcaatgacaagtcgagatgaccatcagcattcgggaacaccaaaacaattcctctcaaaattctcttatcaaattgacctccaagaaaattgacctcccaatataaagtgaacgaccggcccttccactatcaacggcctacggccaaagtacagtacaactgagttttacctcattgaaaataaaagaaaaatgctttattttactacatcatatataaatttcacccattaaatagtgacttttttaaataaaaatgactaatacacaaatataattttgttcattgtcgaaatcggtcactgtcgtaatcagccactgtcggaaatgtcggaaaacagtaaaataaatgaaaatagttcactgtcgaaatcggtcactgtcgtaatcagccactgtcggaaatgtcggaaaacagtaaaataaatgaaaatagttcactgtcgaaatcggtcactgtcgaaatcggtcattgtcgaaatcagccactgtcgaaatccactgtcgaaatcggtcactgtcgaaatcagccactgtcgaaatttcctggcaccattagaggagttggaaatttattagagttgagcggtaatcggtaattgcaaaaaaaccggtaccggtactgaccggtactgcaaaaanccggtaccggtaccggtaccaactttttcaaccggtaccggtaccggtaccggtaaaaaccggtaattttagaacataaaaatttttggacaaaattttccaaatacaaaatttttattcagttttcgcgcgagtgcctgttttttagcattagaattgttcagaagtatatgtatattcaggttgaccaagttttttttttcaaattcaggacatagaacactaaaattcagatatagaactcaaa

SEQ ID NO: 44002 - DNA, 1190 bp, Heterodera glycines
  unsure (1)..(1190): unsure at all n locations
ttgggtgttcgttttgtaccaaaatgactccgaatagtctgangcaccgcttcctccgcaacatttgtgctgtgcaaagaaaatgctaaacctcatgaaatgggataaacaaaagcttacataaaatggatgggaatccatcagaggtgtcgcctaaagtggcattttgtgggaatgcatttgtgtaaattgtgcgagttcacccatttgtcgcgatggtagcgattttgggccattttactgaggtactcagtcatatcggtgtcatcagggaacttaaaaccaaaaatggagaaattaaaaagtggtgggaaccgctcaattaggcgctggccattttggcgcagaacgaatcatatcatttttatttaccaaccaaattaaatagtcttggtatgattttaaatggcttgatagtgcctattaacctgaaaagtttaaaataatttagctgagacacaaaaaagttatggccaaaaaacctcaaaaaattgcattttctggccattttggtgcagcgcgctatatctctttttaagcctaatataattttgaaattttgcaggctaataaagaacatttagacctatagcttaatatcaatatcatttcatttggttgaataaaaaaaaagttatgaaactttaaacttgtctgcgcgaaaattgcctatgccaaagtgaccctgaccccccaaagtcaccttaaaatgataggcaaacaaaagaataaggatgagcaatttgcaatgtatcaacaacagaagcagcacagagaactgagttcagaagaatgattttttgactgttttcaattgggatggtaatttgcatatttgtgcatattcgcgatttatgtgcatatttggggatttatgcaaaaaatcctctattaaaacggccccctctattagagcgatcattttgactctaggaaccgttaatagtcaaaaacattcatttttagttattttctcaaaaatttaataaaaatgtaattctttaaaaattggaaatttatgccaaaaataagttcaaaatggaaaattttcgattttattcattttctgcaaaattaataaataggctcggatttatagttgctaaaaactgccaaaataattaatttttagtttctaaaaaacccccaaaatagttactaaaaatgggtaaatagttgccaaaaacttc

SEQ ID NO: 44003 - DNA, 1091 bp, Heterodera glycines
tgataattacaaacttagaaacttttcaaagaaaaaatttattaagttttttataagaaaatttcaagaaaaaaatcaaaaaatgtttcagcgtttttttggaaatttttttcttgaaaaatcttagtaattcatcataaatttcaattcattcacctcattgtccgtctgctcaatggcgcagcaaaagtaaagcgaagcgtaactgagaaattaaattatttatttaaaattggttttcaatatggcacaccgtttgtacacaactttcgtgtccttatactcgaggaatgcgcacattttgggcttccgtgacaaaatggtggttaccaactcacgggtgattttcttttttgcctgaaaatgcagtcttttttaacaattttgtaagagctaaagtatgctagctaatattgaacggcaaatgcatttttccggtaacggtaaaaacaaccggtttttcagagatagtcggtcggtaaatctaccggtcacaaaaaaggccggtaaattttaccgtgccgctcaccacttgtttaatctctaaataaaccgggacaaaaattaaactaaacaatcagataattaatcacaacgggctagtgcaattttgccatcacaaacaattagtagtcaaatccaatgtgagagcagccatctaagcaattaaccgctcccgaccccactgtcaatggtctgctcccgctgtgtgtgttgcccaccttgtccggatatgcgacgtaccacttctgcagacggagcttgccctggcgcgagaacagcagcatgtaattgatcatccttttaataaaaatgggcaaattatggtaaatgaaaaccgaggaaaaaaaagggtattataaaaccaaatcgaaaaaacatagacaaacagacgcatgcgccccaagactttttaattatgcaaaattagcttgattcataaaaaatttattgcttcttggacataattaggaactaatggtggataatgacagaaagttccaagtcaaagaagcaaatttttaaaaagacaaatgccaatcacaatggaggcataaaattgtttcatcacagttcacaatcagcagtgg

SEQ ID NO: 44004 - DNA, 1292 bp, Heterodera glycines
  unsure (1)..(1292): unsure at all n locations
atcaaaagtttatcgattggattccactcagttcatgccattttttctaaatttcatcncagagtccnttaaaacaattntaattgcctgtctctgtgttcttngcgaattcgggtcccgactcgggactctntgaaatataccctggaccaccaggcatttatctcatccgtgttgggtttgagatttttcacaattatcaagccctttttacttggtcctaatttcgttcgtctccttatttttttgattctgccaattgttaggctgttgttgtacctctccaatttgacaggtgacagtcgacgcgatggagcgcctgttgaagagttgccatggctcgccgtcgctgaaccaattcattgagggctatttgctgatggtgcaaaggctgctcgagacgaataatgcacatatggaaaagctggcaaccggtcggtgtgtaatttgggcgaaaaattgaaaattcatttctctctcaacaaatttaatttcataatcaaacacaacttctatagtttttcctcggggtcttatccgcttttctccgtcggcacaacgcgggaaattttgattgcaatttaaccaaattcttttaaaaaaaattaaaaagttttgccaccgaaaaattttaaataggttttacaactgaaaattacatctttattaaatttgagaaaatagtaaattattagaaaattgacggttctatgtcagttactcaaaccccaacaaaaagggcgttactcaaaaatacatttgacacttttttaaaatctgtctttttttgcttagatttgtttgagcgcttctccaccattgaggaggactcgccgtcctaccatcgccaatacgactttttcatctccaaattctccgcaatgtgtcatgcacaaaacgatgtgtacgtgagctcacagcgctacaacggattgcgcgggttgagaggtggcctaacaaaaaaaaattctaaaaaattttttgaaaaaatttccaattttttactatttgaaccattcatttttaggtgtcatttggaagtcggcgtccgatgatttgcaggccaacatctgggagaagcagcacatgaacaaaattgtgccctccattctgttcaactttcaacatgacgacgaaagcggtgggcaatataaatcatttaaatgccgtgcagaaaaagttttaactgttttgaaatgtccatgctgcacattccatccttcgcatcatcattttctccctaccaattaaaaaaaaccaagcggtttctagtaaaaaaattgaaaattttt

SEQ ID NO: 44005 - DNA, 990 bp, Heterodera glycines
ttgattatctagtgaaaaagtgaagaaaaactacaccctttcacattgccgcccaccttttggcccattaaacattgctgtaacacaaatttaaatttttaattttataaaaattgaaaatttggaaaatcaacaaaatattggtccctacccgacggagtgaccgtaagcgaagcaccggtacgatttgttggcacttggagttggaaggccacaacggcgccagcggaagtgccaagccaaaggcacaagcccaattttggcactaaattttttgaaaaattagatttttggatttttaaattttaaatttttcaagaaaaaatcttaaaaaatttttatgagaaaaattcaaaaaaaataaattaaaaatgtatcagcgattttttggactgaaaaaaactgtaatgcatcataaataacgctaaatctttttttaagttctttttaaaaaattattaagaattttttttttaattttcgagggaagaaatgagcgggtggaaatgacgaggggggggggggggggaacgacatgcttcaaattatttttacaaaaaaaaattaaatttttaagaatttttctgacccaccccttctgatcgccggtgagttgatgaactgaaggctgcacacgtgttcttcctctccctgatcatcttcaccatcacccgccgattgtcctgcaacttttgctgcaattttgtgctgctgcttttccgtgcaggcttccgccggcggggaggaagggcgcgaatcgctgcttaaacgcccttaaaatgcaaaattgaattttttaaatgtccatcttaattacccattttatttattaccgttgcaattggtggacgaatggtgtttaacgaggccggcactttgtggtggcgatgttgtgccggcagcgccaaattcttttgggcttccgtcgccgtttccgcttgagctttgagtcggattgaaggtgaaagcctttgaaaatttggaaaaaaa

SEQ ID NO: 44006 - DNA, 1100 bp, Heterodera glycines
gggggggggggggggaagggcaccccccccccagggggccgggaagcgagtgagtaccttcggtgcaggaaaattattaaattttaaaaatttttaattgctttttaaatatgccaaaaaatgtaggcttacttttttagtgaaaattcgatcactcatatttttgctaatgagcagaagcgtaccaaactttgcagggatactccccggtaaaggactaacttacactgaaatgagcgccgagctagctggctcaaaaaaattttcgaaaatctgagtctttcgtttttatttattttttgcaaaattaattcttaaatattttttcagaaagggttctgaaacgcaccaaattttatttacatgttagtttaggcactctgatgctttttctatcaaaaagggagatgaataaaatttttaaaaatttttaattcctttttaaacaggccaaaaagtttaggcttaacttttttttcagaaactgatcagaagcgcaccaaactttgcagggatactgaaaggaagagaaataacctattttaaatattatctagtcagttcatttaaataatttttatccaaaaaatttttttttgggttttcggggcagtccccctgaaccgatgcgcccagatttatggggagaccgaatccttcgggaatagcttccctatagtctgtactttaattctgcgttggagttttgctccccataaatgtttgagtaccccaaacggacacttgaaaaaatcgatttttttgttttcggggcagtccccccgaaccgatgcgcccagatttatggggagaccgaatccttcgggaatagcttccctatagtctgtactttaattctgcgttggagttttgctccccataaatgtttgagtaccccaaacggacacttgaaaaaatcgatttttttgttttcggggcatttaggcactctgatgctttttctatcaaaaagggagatgaataaaatttttaaaaatttttaattcctttttaaacaggccaaaaagtttaggcttaacttttttttcagaaactgatcagaagcgcaccaaactttgcagggatactgaaaggaagag

SEQ ID NO: 44007 - DNA, 914 bp, Heterodera glycines
  unsure (1)..(914): unsure at all n locations
catgaaaatgtaaatggagattatgggacttatcagctcggtccttcgcaaacactgattcagtttatatttagaggataanggagtganaatgggtggaattnccaaaaaggtgaccaagaaaatnngtatcgaaatattattgacgattatcagctcggtcattccgaaaacactgattcagtttatatttcgcgaagaatgagctgtaattttgcgaattagacaaaaatgatcataaagtaacaaatgagagaatttcacattctgctaattaggctttaaatataaactgtttaagtgttgcagacggatcaggttgataagcgccaataacctcagatttactattttcgcgaccccactttttgaattctgacattttcagctcattacgctctaaatataaacagcatcagtgttccggaaggatcgatttgaaatcgccaataacccccaaattacaatttcctactgtaaacttatacagattacatttggatataagaaattgaaatattgagaatatcacaaaagtgatcatgaaaattgtaaattggagattattgggacttatcagctcggtcctccgcaaacactgattcagtttatatttagaggataaggagttgaaatggtggaattccaaaaaggtgaccaagaaaattgtaatcgaagattattggcgattatcagctcggtcattccgcaaacactgattcagtttatatttcgcgaagaatgagctgtaattttgcgaattagacaaaaatgatcataaagtaacaaatgagagaatttcacattctgctaattaggctttaaatataaactgtttaagtgttgcagacggatcaggttgataagcgccaataacatcagatttactattttcgcgaccccactttttgaat

SEQ ID NO: 44008 - DNA, 1138 bp, Heterodera glycines
  unsure (1)..(1138): unsure at all n locations
ttttgatatgtctaatggagtatgcgacgagctctggaatgatctcaaaattgatggatgtgggtgacaaagaaaaaaaagtatagatcaacaaaaactgggctgggccgaaccgtgcgggccgaaatgagccggtccggttcattttgtttccaacgttcagtaaagaatgggtcataagtttgaaatttgcggaatgccttagaaatatattcaatttcaacattcagaatataaacaattttttgtcaatttaactttttgatttttttcacaaaattagaacatcagcagctgttggctaacccattttcagctgtgtttcaaggatatattctccatttttgctaaaattccattggtttgctctcactttgtttatttatcagtggcatttttgcactttggcaatcgaaagggcgcggcattgggtttgaatttgtcactgatcacacatattcttggcattttgtcttcgtctccgtccgtccatcggtcggtcggttcggctccttctcagtgcgcttatccattctgagcaatgttcacattcgcaatgtttattggcacccagcgctgctgttgcggactccaacgccattgctgttgctgccgtttgacgcgcttcttaatgagtcaaaggcaaaaatgccaaaaacggaaattagaagccaaagcatggcgcaccatgccaccgttgtcggccgcgtccgcatcaaaagggttgttggaattagcagagacggcagcgaccaaagacacctgaagcatggcacttttgaccggtgttcaatgaatgcttataaaagtgcctaccaaaaggatcacaagcaaagccagaggggcaaatttcataatgagctaatgagtggggatttggttggttttgattgaatggtgtggacggcgtgtgcttttgccttcgtttgccctcccttttatacggcaaattgtcaaaaatccaattaatattcatcgcatgcaaagagtgaataacgctgggattggccgagntaaaggccaagctggccaaaaaagtggtgaagcttaccatttgtgaacttacaaattattgaatgagtgcggagccgaaacgaacaaagtgatgactggtcgcgaaattggcatcgtccaaagg

SEQ ID NO: 44009 - DNA, 641 bp, Heterodera glycines
gggcgttatttgaaaaatggcactttttgaattttaatacaacccaaagggggtggctaccctttaagtttgaaaaaaatttttttgtcatggttagtcatgaaaatatgatccttggagttttggggattgctgattacaaatctatcatcttaaaataagtttttgcaaactaaaagggcccctgtggtttttaaaactgacacttttttaaatagtggcaaaaattgctttttcagaattctctatcgcataaatttttttgatttttttttgcaacagtcgtgctgacgaagatcgccgtgagcgggacaggggacgagaacggcggaagcaacaccaccatcatcaccatgaacaccaccatgagcatcgacggaaaagtggacggagaggaggaggagagggggagccaccgccgggcggctgggacaagccgaaatgggaggacgacgcggtcaaaaaagaggcggaggaggggggaggagaagaagcggagaagcagcaacagcacaggggggagggggagaaggaaaagccgtcatttgtgcccagcgggaagttggccaaggacaccaacacgtacaaaggagtgttgatcaaggttcatctccgaatagggaaaatttgaattccttttt

SEQ ID NO: 44010 - DNA, 1605 bp, Heterodera glycines
tttccagtttttaaaattttgaaaattttcaaaaattttcgagttaggcctaaaaacggttttcgggtttttgattttaggaatttttaacgatttttctgggaaaaacggagaccacttccaaaaacatcatttttcgagttctatcgactggtaattttttggaaaaatttcgtttttttcccggaaatagaaaaaaattttggcctgagcgggacatttgagtcctgggcccataactcgtcaggggttgattttagcgaaaaattgtcttagaacatttttgtagagcattttaaatgctattgaatggtgtactacatgatgtaaaattttcaaaaattttcgagctaggccccctagaaattttcggaaattttttttcggacgaaaatgggggtgaaaaatatttttctggggtaaaataaggtactgagtacgaatatgatgtctattttaagtttcataatttttggaattttttaaaaattctttattttttggcaattttttggccctcgggattttggcctaatatttgaaaattcataacaaatcgaagggttgatcaattttacaggtataaagccttaaaaatagagaaaaatcaggagaattttatggactttatttggaatttctatctaaaaaaggaaaaaagttattccagaatttctggaaaaattcgaattttcagaaaaaaattcataactcggttctgaaaagatattctggaaaaataaaatactacaaaaatccgcagttttttgctctattatataaattttatttggcatttttatcacttttttaagaatttttataaaaataaaagtgattttgagattcgggaccaaaggggggagcataggatttttgagttgaaaattttttcaccaaaaatcttccaaaaacatgtcattagggctaatttatgacgctgatcacgaatacgtgatcagattttacttttgacatcgtttagacctcagaatccctgtgtgattggggattctgaggcatcattttgagggggggggggggcaagttcgaagccgggcggtgtacattatttttctatttatttttgtgttatttttcagtgcgtttaatttatatttaaagatttgttgcaaattaataataaaagaatttatgtaaaaaataataattatgttttaataaagaatttcatattatttttaaattgaatttataaaaattaatttcatattaatttaaatattcaattcttgtacatttcaaaattctctttttaattaataaaaggaataactaagtttattttttaaaatttataataaattgctttcaatataggagaaattcagtaccaactttgtccagttcagtcccgggtgaataactcattagggtttgaactgagcgagggggtgccagcagacttattgtagagttcaatgagctggatttttccagtttttaaaatttcgaaaattttcaaaaattttcgagttaggcctaaaaaacgtttttttggtttatgaattttatgattttttaacgatttttctgggaaaaacaaagaccacttccaaaacatcatttttcgagttctatcga

SEQ ID NO: 44011 - DNA, 721 bp, Heterodera glycines
attaaattcccaaaaaatgacaattttagagtaaaatctttcgcccccgggcgtcaccttttggctcctccggcgggtgccttccttgaaaattactttaattaattaattttttgtaattaacaattatcactattaactgaaatataggaaataaaataattaatgtttgttttttacttggttgaccggcgcaaaaatggcacgacagcgcacataataaaattagaaaaataaaaatcatattttgcaggttgagcttattaaacgtaataaagaaaatatttgcataaattggcaaatgaatgctaatttgtaaggcattttatagcgatgtgaaaaggctaataaatgcatttgtgtaaaaattatctgacggaaattaaagaaaaaaaggctggcaccgggattatgtggaatttacaatcacaaaatattgggatgcttcataaaattgccataatttttgccaaaagcatatgaaaatcaccgcactttttttatttttatttttttgccttgcattattttaagtgaatattgaattttatgagaatattatatttaatatagcgaaatagattttatatattgtgtaagtattaattattattttacaaaaatctcataattttattttacagttaatgaaaatccattatttaaaatgcttcataacattagactgaatttttaaaaatatatatttgccacattttaa

SEQ ID NO: 44012 - DNA, 517 bp, Heterodera glycines
cgataaaaggctacaaattcttgcttatccgatgctgaaaatttgaataatagagggatctggcggtgccggtagaaccgccgtggaaaattttgaaaattcgagtacaaattatgataaattctttaaaaaacgcaaaattgtttcaaaatatttgttaaaagattttatacgcaaagcttcggctataaaaattaaaaagctaaaaaagaatttattgactcaagatcccgcgaggaactcgcaattttaaatgagagatttgcggggtcttcgctgattaatcccgtaaatccagttcggcagaaaatttaatcccaatcgtcaactttgtccttaaataaatctcagcaaactgttactataaggttggctttatatcaaattacctctatttgatattaaatttttaatctggaatgccatgactagggatcggattcttagttttttaactattttttctgcggctttaactcgacgagaaatgcacgaaaaacacattctttttcgaaaa

SEQ ID NO: 44013 - DNA, 659 bp, Heterodera glycines
  unsure (1)..(659): unsure at all n locations
acctaatggatgtttaattaccgtatatgctctaattatagcccagtctctattaatcccgcagtctccaattattccccagtctgtctacgaggtgttttgaaaaataatccctctatcataatcccccagtctctaattatccccccttttctgaggaggttgaaaaataatctcccatgggctataattagagcatatacggtatgcaattcattgcttgctttttaaacatttgatatgtttaggtcaatcagcaccttaagaaggcgcctggaagtcctaaaattgaaaatttggtaagtcaacctttggaaatgagatgattttatttcggctcattgacacacgtttcgtatttcgtgttaactcgcaggtcggatgccacacgtccaaccaatacataaaaaaatatctatctgatttcaactataccttagcccaacttttctaaaatctttaaaaattcaaatatctttgatccttaactgcgaattgcaaaataaactggcaaaggtatagattattggtccgttccgaaaatttttttaaataaaatttgaaaaaattgtttttaggggtaggtagtcttaggcnccgagcncgaatccggcattattagaaggtttagaaccccgaacccggattcgaacaaaagt

SEQ ID NO: 44014 - DNA, 1493 bp, Heterodera glycines
  unsure (1)..(1493): unsure at all n locations
ctccgatgccttccctatcaaaaagggggagaaaaaaaaatttaaaaatttttattgctttttaaatatgggaaaaattttaggtttactttttttttataactggtcagaagcgaaccagattttgcggagagcatcaaaaagacaaagaaaaagcactgctatgatgctaactccaagtatttctgaattttaaaattttttattaatttttaaaagcttcactattttatttttttagcaaaatccattcataaatattttttcagaaactgctttgaaacgcaccaaatgttaattaaaagttaaataaggctctctgatgctttttctatcaaaagggagatgaataaaatttttaaaaatttttaattcctttttaaacaggccaaaaagtttaggcttatattntaaaaagtttcatcgaacctagcgcactaaaatcgatataatctctccaaattttgcaggccttctccattgtaaaggactaacttaacctgaaaaaatgccaacgcttgttgtttttaaaatttttcaaaattctgactttttcattacttatttattttttgcaaaattaattcataagtattttttcagaaagtgctctgaaacgcacaaaacgttatttaaaagttaattaaggctctctgatgctttttctatcaaaagggagatgaataaatattttaaaaatttttaattcctttttaaacaggccaaaaagtttaggcttatattttaaaaagtttcatcgaacctagcgcactaaaatcgatataatctctccaaattttgcaggccttctccattgtaaaggactaacttaacctgaaaaaatgccaacgcttgttgtttttaaaatttttcgaaattctgactttttcattaattatttattattttgcaaaattaattcataaatattttttagaacgtgctctgaaacgcaccaaatgttaattaaaagttaaataaggctctctgatgctttcactatcaaaaagggagatgaataaaaaatctaaaaatttttaattgctttttaaatatgggaaaaattttaggcttaactttttttttataaactggtcagaagcgaaccagattttgcgagagcatcaaaaagacaaggaaaagcactgctatgatgctaactccagtaattctgaatttaaaattttttattaatttttaaagcttcactattttatttttttagcaaaatcaattcataaatattttttcagaaactgctctgaaacgcaccaaatgttaattaaaagttaaataaggctctctgatgctttttctatcaaaagggagatgaataaaatttttaaaaatttttaattcctttttaaacaggccaaaaagtttaggcttatattttaaaaagtttcatcgaacctagcgcactaaaatcgatataatctctccanattttgcaggncttctccatttgtaaggactaacttaaccctgaaaaa

SEQ ID NO: 44015 - DNA, 1431 bp, Heterodera glycines
  unsure (1)..(1431): unsure at all n locations
tttactaaatgttgttgaaatattttttataattatcatttcaataaaaatgtgcaacaaataaatgggtgaaatatgcataacaataataataaatttactatttttttctaaattattaaaacattaaaaaaaaataaataatgcttatgaatttgaacaaatttatataatttaataaggaacaatgaacaaaaatattttgtaatgtagtggaattgattaaaaatattattttaacactgttttattttgtttatttggccaaaaagaactttataaaaatgataaataaaaccaatcacacaagttggaaaggtcatttgtaaagggatcataaatgaaaatgtaaattacctttaataaaagaataaaaattgcaaaaaaaaataattagaaagtagtaaactttaaagcttaataagttttctatctcaaaaataaatgacactgttaattaaaaaaaacaataaatttaattactgacaactgtgaaagtgaaaattaaaaataaatgataaatacttatgaaactaagttaaaaatataattgatggtaaaaaaataaaatttatacccatttgatattctgctcttgggaaaatgtacaagataaatataagattattgactataaaaattaattttattcttttcattattataaaatattttactaaattaaaaaaaaggaatttagcgaatagcatcgatgctttttgccaatgaataccaatttttattaaaatatatcaaaggtgttttcttgtctagacttggttaatatgaatgaaaagatagtgataataaaacatctcttctgcaattattaatagtttttgtaatttttcacaaataaaatataattctttaatagaaaccagcttacagagcaaaaattgctgattcttttattatgtgaatttacaaaataatatacaatatagaaaagggagttctgaattttttgaaatatcaaattttataaaaaatttctcgaataaattaaaaaaaaaaaaattaattttaaggatacaaattccaaaagaacatatattaattctcctgattattttctatttttaaaacattgtacattaaatttataaaattgatcacactgattatttgaaatattaaaaagagaatattaaagtagctaataaaggcatacaaaaatttaaaatatattttattagttgatttcattaatttttagttaataaatttctagttcccagtatttttttggttaaactaatttataaattgaatcgttggctaaattttaaattaaggtttttattaattttttaaattcaattaataaatttattgcaaatttgattttttaaaaaaattaattaaatgcttaagattccgatatacaacaaccatgtgaaagatgagacctgccanggcatgcaagct

SEQ ID NO: 44016 - DNA, 746 bp, Heterodera glycines
  unsure (1)..(746): unsure at all n locations
ataatgtttaanttgtgagtattatttaacgaaaagagcgccttagggaaaggaaagaacgaaatgagtgaaatgagtgagtgccattgtaaaagtgagtgagacaatgccaattcagtcactcgtcgccctcattttttttatctatgccattttctaatactattttttggggggaaaagcaaattcaaaaatattaaaatgattacctcatattttcgccaaaaccgttccacaatttcgccaatgcctttcttcgcattttgttttcgttgcccccccccccccatcttccgattattaataattgtcatttcgtgaccgtaagggccattcaatctctgcgcatgggatgatgatacgataccatctctctccagcgccgctaatagtgctcaaattgggaggacaatcgctgctccgtccatcccaaatgccccccccccccaccccctcttttccggtgacatccctcggccacaaaacaacacacctttggccgcccattatccctcgtcgcaaatggccaaaacagacagcacagcaagcattcagcccaattcacccacaacctcttcatccgcccccttccgtttaaaatagggatggggagagaaggcaaatccattagaaggcaaaggcgcccgcctctcttcccccccccccaatcgcgaaactcttccatttcctgcggacgatgagtccatcttcatcatccatgcatttattgcgtgtcgtgtcactcc

SEQ ID NO: 44017 - DNA, 1774 bp, Heterodera glycines
  unsure (1)..(1774): unsure at all n locations
tccatttattccaatcgcctatgctnttaaggttttgtctttgactttgcttttttgtccatttattccaatcgcctattgctttaaggttttgtctttgactttgctttnttgtccatttattccaatcgaccacgttaattcattctctatacatttagtgtcttatttcatgaaattatatataatttaattttaaataaagaggcaaatttttacagaaaataaatagacgctgactaattagctaacatttataaagaaagtagaaatttgattaaatgcatatacaaaatattacttttttaaaatttgtataaagttcctagtcgtatgtgctttgcgttggttggttggcgtgggtgactgtggtggttgggccgtttttgcgatattatggctggaaaaaagatgcgatttcgctatggggagcgcggccgtctgggttcaagtgcttgcttgcgcttgtgctcggcattgaacggtgatggctgctgctggggtgccacctttgtcgtggcctcagtttctccagcgattggcagctgtcgaaatgaataaacatgcagctcgtctgtgtgttaaagaaatttggcgagttaattgacttgtgtaaatgtggcctaaggcacaaatgctgtggggaactcagcactggggatgctgaacctaaagttggtggtggtgttggtatacgagtgagtggcgtattgccatggttgacaagccctatgagttcgtggatcggaactccttgcctggggaccagtgtgcttgcattcgaaaaaacacgagacataagcgcccgaaggcctttggcctgaggaagtgtcctaaccgggaaatccggagtgctcgtgtgagtgcctgtgcactgccctcggagctgtgtccagcggcgagatgttcttcccaagtccgggaagctcggatgcctggccagcgctgtgtcattaccacttgctcggtcgccttcgccgcccatgcgcacgcttgcgctgaacggagttgtttctgctgaaactatccgtctttacaagacggctgtaatagcggcgcttggcaacgctcgctagcagctatctggttgatcctgcctgaactgatgtgttcatttcaaagattaagccatgcatgtgtaagtttaacctgccagacagggaaactgcgtacggctcattacaccagctataatttacttgaccttgacttcttacttggataactgtggtaattctagagctaatacatgcaccaaagctccaatctccccagagcggagcgcatttgttcgccacaaaaccaagcgccctccgggcgtccagtgttgactcagaacaactaagctgatcgcacggtcttgtaccggcgacgtgtctttcaagtgtctgccttatcaactttcgatggtagtgtatctgactaccatggtgatgacgggtaacggaggataagggttcgactccggagaaggggcctgagaaatggccactacgtctaaggatggcagcaggcgcgcaaattacccactctcaacgcgaggaggtagtgacgagaaataacgagaccgatctcttatgaggccggtcatcggaatgggtacaatttaaaccctttaacgagtatctatgagagggcaagtctggtgccagcagccgcggtaattccagctctcaaaatgcatagaattattgctgcggttaaaaagctcgtagttggatctgtgctagccgtccggtgcacactttgtgtgttactggtttggttggctttt

SEQ ID NO: 44018 - DNA, 1179 bp, Heterodera glycines
  unsure (1)..(1179): unsure at all n locations
agaataggtacttaaataggtaaaaaaaaatctcaaaataggtattaaataggtacaaaaattccaaaataggtaccaaaataggtaaataaaaatttttattgacgattttttagtggaaaaaagcaaacaaagagggaaaattttggttctacatatctctttgtaaacgaaaatttaaatatattaatattttcttatattgacattttaaattaaaaattttgtcaatagaaaaaataaataaattttgggataaatttttgagaaatttttccaattcttagggtgcatttttgaaaatttttttggtcgattcttatgggtatatttttttgattttattgcatttttgttaagaattttttgaaaatccttaaaataggtaaccaaaatgccgaaataggtataaaaataggtacctaggtaataggtagaaaaatcccgaaataggtaaaaataggtattataaaagtgggtgtagaagctccaaaccaagctaaaaactcgttttttatgcttatctcaacgttacaagtgcgcaaaaattgtaggtatttaactaaaaatcgcatccctatttatcacaaaattttgccaaaatacctttttgtaagaaacttttggctgggcctttacgacaaattttgggtaaaaacaattttgaagcattctactaaacaaattctaaaaaattttctcagtgatgaaatgatcagtgacgaactgaacagtgacgaaacgatcagtgacgaaatgatagggagccatatgagttatttaagaaatcagacaaatttttcgtgccaggtgatttcgacangtgagtgatttcgacagtacggtaaattgaaaaaaacgagtatatgaaaaattggaacctaaaatgaagtggtatgagcacgttcaaagataaatttaggattacgattttcaaaatcttcgaaggggcttgtgggtcgtgattttgctctcaatgtcacaattcatttataatttttcacaattatttcaataacaagtataactttttatgtacaagtcgtagccctaccattcaaaagaaaattcggtagaaaattttgtgctctttaaaggagcttattcaaaattacctggaaaatttcccaactccctatgaattttttttctaaaatttcagcgaatttcaacggattt

SEQ ID NO: 44019 - DNA, 935 bp, Heterodera glycines
gtgaatcacaagaaaattcaacattggggcttaaaatccggagaaaagtcaattggtgcaatggtttttcgggatttacctatagaattaaagaataaaactgacaacttattaactgaaaattataggtgaatcacaagaaaattcaacatttgggcttaaaatccggagaaaagtcaattggcgcaatgttttcgggatttacctatagaattaaagaataaaactgacaacttattaactgaaaattataggtgaatcacaagaaaattcaacatttgggcttaaaatccggagaaaagtcaattggtgcaatgtttttgggatttacctatagaattaaagaataaaactgacaacttattaactgaaaattataggtgaatcacaagaaaattcaacatttgggcttaaaatccggagaaaagtcaattggtgcaatgttttcgggatttacctatagaattaaagaataaaactgacaacttattaactgaaaattattggtgaatcacaagaaaattcaacatttgggcttaaaatccggagaaaagtcaattggtgcaatgtttttgggatttacctatagaattaaagaataaaactgacaacttattaactgaaaattataggtgaatcacaagaaaattcaacatttgggcttaaaatccggagaaaagtcaattggtgcaatgttttcgggatttacctatagaattaaagaataaaactgacaacttattaactgaaaattataggtgaatcacaagaaaattcaacatttgggcttaaaatccggagaaaagtcaattggtgcaatgttttcgggatttacctatagaattaaagaataaaactgacaacttattaactgaaaattataggtgaatcacaagaaaattcaacatttgggcttaaaatccggagaaaagtca

SEQ ID NO: 44020 - DNA, 1387 bp, Heterodera glycines
atgggatgggacaaactttgccgcagaaaatttctaatattttttcttgaataatttctaaattttatatttttaaaagaattttcggcttcgagattttgggatgcaccggttttcgagatttttttcaaattttcgaggcccttacaacttatgtttttcgccatcggaccataaaataaaaattcacaatagaactcagcccaatgaaacccaaatttatttatgttttttttctgaataaaggactgtcttgaaatgatgtatacaccatttttggggttttaaatcaaattaaattaaattgcgctttcccccagggaactgctcgcgtgccgcgctacgccattttggtggacgacaacgaatattcaatggacaaaatccaacagttcacattcgtatgtccaaataaatgtttgattgatttggccatttctttttaaaggccctctgttttggacaccaaattgtctcttcgtccatttctctccctgcgccggtcagttggactttaattttcatttgcattttaaatatttgtccatccaattttcccatttttcctttcacacaggtgtacattgcactggaatacgtatgtgtaatatatatatatatatatattctcttggacattatttctgtttcccaaagaggagaccaccctaaatttctgacagtcatttcccagggacggtcccaggatttcggcttggacggggtaccacacccgggcgacgattttttttttttttttttgcttttccagtcctttttttgcgatgcacttttggaacaaaattctggggaacgcaaggggtacgtcgccgcctgaaaaaatctgaaatttttacttttttaaaatagattttgcaccaaaaattttttttttttttgaaaaacgggtggacgaggtattgaagggagtggtaccaatcaaaaaaaagaaaacgatactttttagctatattttcgcatgacatcatcgtcatcattttgattgttttttatgtgcttcacatacaataatgttttggctttttaggccaaacgaggccgcaacaacttcaacacgaaccagcagtcggctgaggcgagagcggaagactgggacaactacgacacactgaacgaccatttggggttcgagaacaaaacgtatttgagcaaatggcgcgtcaatgcctaaggggcggatcgaacgagttttttcaaccaaattaaagtgattttttccctttcattattatgtacaaatataaatcaaacatttactctttttcttaacttttcttttcctcctttctcatttttcttttttattgctcattattctttattattacgacacatttttttgtttttgctctctcagcaaatcttt

SEQ ID NO: 44021 - DNA, 496 bp, Heterodera glycines
agacgcaagcagctgatgtactggtcggccttccgttgctccaaaagcacctccgcttgacgacaaagaagccgttcatcctaaaataaaaaagcattcagtgcattattttcaacgggataaaaagaaaggatgtacagtcggagaaggtcacttcccgtgcttcattaaaataaaatttaatttttctggaattttaatatttttaggttaaattagaccaactagcaaaaaaagtttcatggctagactacgccttgtatattgggaggggtgggaaagaatgggcacggctttacagggatgtgggagcaagaatcatagttgaggtctttgagggtttcgagtgcaagttcggactggtccaattgctgaagaattgttgagaggttaatccgtgcgtcgatgtgccccggttggaaagagatggcagtctcatacgccgttcgtgcaagcccaagttgaccaagagcctgcacaaattatgttggaatga

SEQ ID NO: 44022 - DNA, 890 bp, Heterodera glycines
acaacgaagaatggttgggatgaaccgattggattgggaaatgcattttaaagtggtgatcggaattggaatgctaaacagcaattgctaagtgaaacgattggttggaaatgccgtttcaaaaggagtgccctttccctttgctcagagtgatcaccgtccaaccgaccgtcatcacattcagctcccgtgcttccgcggatggttcgcactgatcgatgagattctcgcaaaaatcgacgccgacgccggaaaggccctgctcagtctccaggaacagttgcaggtcctgtcaaagtcagcagaatgtttagatggtgaggatggtcaaatcaactcacatttgtgttcaaatagtctttgttggcgtagcgtaccatcaaaaagtaaatttcgggccgtgtggacatgtctttgtaagcttcgatgaattgcgcctcgtctaagcgtcccttttgctgcagttgcgcttccccgccgttgttctgctgctgctgtgccgcgctcgtcccaatttcctaaattttgccaacttttgttttcaaaatgccgctttttgaaaaatattggcatttcgccgtttcggtctcccaatatttgttccgaaatttgcggaccttcatttttttgctgattcgatttgtcaatagtcgcgtgttcagagatcggatcagtcgcatcgccgctttttcgctgattgttccctttttgtccgcgtcagcctcccgaaatgccgtggccaaccatctctcacgcaaatttggcggcactggtgagatgcttccgctcgcggtggtgccattggtgccgggcaccgttccgctggccaatgccattaatccggtgacccacacattggcatcacccgcattaagcgcaatgagatccaa

SEQ ID NO: 44023 - DNA, 1317 bp, Heterodera glycines
  unsure (1)..(1317): unsure at all n locations
taatcagcaccgtttttttcaccccagtgaaaaacaacgtttaaatttttaagtttatttcccgtcgggaccgcaattctacacctttgcctaattttttgaaacaatgaatttaaaattttgtgtgctagtaaatgatactgagaaagccaacctaaaagccagcaatcaactcgctctctccaaatttcttcatactgtatgtaccaaagattagcaaaaaatcaaatacggactacgcatgcaaaattggaacagcaaaaccggaatttagaaaaatcccaatgttaacaccacaagtgtgataaattaaacaacaaaagtttggaatccaattctttcaaagaaacaaaaaaagaaacaaagcgaagtataaatataacatccgcaaaagatcatcgtcagagaaagaaacacggagaaatgttcacaatcttcattattcctccacaatgtagcctccgagctgttcttggtacacctaaacaattaatgaaaaacagtaaggacggcctcgtcatccacctatccatcaccccacatacttcaatgacgtcgtcctcctccatttcaagtgatttgggggtgtcgtcgtcattgacgcggcggccatcgaacaaaaagcgcaaagaagtcacctaaaaatgtggacacaatcagtgtattggtaatttatggatggnggtgggtggacacccctgtttaaactttaaagatcccaagtctggcaaacctggacgccagtccgctcggcgtacgcctttttcagcttgcccatggatgtgccgtatttgacccggaaatgcacttcatttgagtcctaaaatgaacaattaaaaggtttggtctcgccataacacaaagaaaacagacctggccaacgaccttcagtttgatgtactcagcaggctgagcgcctccagctgcaccggttcctcctgcgtttgttccactttcgtcggccattttgaaaagaatggatagaaatgaagtttaatctgctttaaaacattttaaagatgtacttgaagaataccatagataaaaccaatgattctgcaaaacccgagctcagacaactattttggaaccaacacgcttgctatataatttaatatggcaccaaatataatttgtgtagacttttgccagcccaactcaaattgatattagagacggcatatacaaaatgcgtagccgttagcgaaattttagatatttgcaatttaattacttggcattttaatatcaatttgcggaattttttccgctattcaaaaaaatgatgaatattaagattaacagaacattatggcg

SEQ ID NO: 44024 - DNA, 1176 bp, Heterodera glycines
ctcacttcttccatctccctcatatacaccgcttttgctctcaccacggccgcgagatgattggcttcagcggtggcctaataaaaataaaagcaattggcattcataaggagggaaagcatcaaaatgcttacatttagaattgtcttcggttcgggcatttcagccttgctgaacacctcgaaataagcctaaaaatttgaacttaaatatttcaattcgacgcgaaaaagggcacatttatgtagccggcaagctctcggcaagtgatgggctgaccgccaatttgtttgacgaccaaattgttggggtagaacacatagttcgcaagtgaactgagctgtgccttgaagtcgagttccattcctaaagggaaaaccaaaatgctttgaattcagtggacagacaaaaagataaaacaataaacacactgtcaagttcgcctcggtagtgtggatttgtggcaacgtagcggccggggtgaggcatcaaaaagcagcgaatgttgtcgaaagacgagcgaatgtgacggcgcagctgccgaagttccgggtgttgacgggacgtaacctggcaaaattaaacatattttttaacaaatccatcgacaagccgtgaataaaatacgggggaactgatcctggggatgtagtacatccgtttacgcatccgattttatatactagtcaaattgagtacctccaatcgtttgtcaagaatgcgttggccaccgattgagccgtactccgcgacatgaggcacactccagtcacggacaaggaacaaaagcgactgaaattgatgagagaaagggtcaaccaacaaaaaagagcattgcctggaacggtttgctctttttgtcctcgtccagcgccagtcgggcgtactctgtgaacagttgcaagtgctgcagatggtcctcctggatgttcttgttgatgttgaaaatctgggaagcaaatgaatggaaaacggatggaattccttaaattttattcaaaaattcttttcagtttaaaacctgaacagaggaaaccatcgtggacaacgcgaaaacggtggcgcaatttttgaaagtgctgacactgtcgaaaatgccttgtgtgtccatgaggaggacaacgacctggaaaatcatcctaataaagacagaccaatgaatttctagggaattaa

SEQ ID NO: 44025 - DNA, 449 bp, Heterodera glycines
agtcccctcctttccatactaaatacagtaattactaattggtaaacactattatataaatactgtaatgggtgcattttttaccccaaaaattgggcgatttgatcagcgatgagaaaagaatgctgatcgactgattgactgactgaccacctgctgctgctcccctctttctcttgtttgtcatttcccctcccccgggcgctgttccatcgaggacatcgatcaccgccaccaaagccaccaaaagcatatccacccatccgatcgggagggaatgcttttttggtggccggcgatccgccgattggctctgctgatcggcggctccaaaatcaggaccagatggacattgcccccccatcgaaattattattgaaatattctttctacagtaaattttgatgatgatctatgatcactatatttattttaattctaatgccttt

SEQ ID NO: 44026 - DNA, 1220 bp, Heterodera glycines
  unsure (1)..(1220): unsure at all n locations
aagcaaaagtccaaggtcggtttctttctgaactgattccaattcnaattagggtatctgtcccttttccattggcttagccttcgcgtcctttgccccgtaatgaaaaacggcggacccgagtttctcatcctcccagcgacgtccgtccccgccaggcaattcgttctcctccacatattccgttggaataattttgctgctcgcatcggggacatgatacctttggaaatcattgtaaaacatggcaaaacagtgccaattcacctcggcaccttaagcacattccccgcctcgtcatattgcttcacatagtgaagcacttcctttctgtacttggcatccaattgctctcgtttggtaagcctgaaaattgagtttgaaacttattaaaatttcacttatgttttagtaaaatggaaaatatgtccttttcatttaattattttgtcattcgttcgaaataaaacctagatttttttaatgagtagaaatgcacccataaataaattatttgttgaattgcacttacttttcattcgcaaaaatagtctcatcatcgtgaaccttcgcctccaattccatgcgtttgtcctccttgcgcttcgccaaataactcttccgactttcgtatctcaatttgcccatcatatcgttggcttcgtcgtccttttctgaaatgttcaggcgtttcgtcgcctccgctttgctcctcgcttccgactttgacatgacgtgccgcgtgttgtgcttctccctttcccttatccttttggacagtgcgtcgcgctcttcgatgtccttttgggcttcctcttccattttttcgaaatcggactccgaattttcctccttcgccccattctcttgcaattgaatagcctttaaattttaataaaatcagttagagtgttcaacaattgcaatataattagggctcgaaattgtatggatatcatattttttacgcatatgctatgaagaaaagggctcaaaaatagcatttctgcattaaattttttggtttggtgaaggtttttggtccatataaatccatattttgggggttttcgggaataaatccatattttcgccattttttgccttgttaagcctaattttttgggccattttttggcaaattttccccaggaaaaatgagaaaaaaagcaaaaaatacaattttaaagaatactttttgaaaaattttaaaaaaataa

SEQ ID NO: 44027 - DNA, 1518 bp, Heterodera glycines
  unsure (1)..(1518): unsure at all n locations
cacaaagggcggacacgggaccgaaggggggtcacaggcgcggaagccaaatgcgccaatgtgtttgattgggagccgacaaaggaattggcccagcaaacgtacgaccaaattgagcgatttcgaaagtatttggacaaacccaaaatacggtaaaaaatataggaaatctataataaaaaataatgtaataatttttgtatagaagtgtgctcgctgttagcggaatcccaatggggcaacaggtggcggcgatcaacgccggggtggacattctgacgtgcacaccgggccgaattcggggccttgtccaggagggccaagtcgagcttgaccaggtgaacacctcactccatcttgcaaacattctgtttacatacagatacgttttttcgtgctcgatgaggccgattctttgcttggtggccaaagcgactcggcccaaattgtgcacgaattgcactcgcgaattcccaaatattccgaattcggtgagcgtttccaaatgatcgtttgttccgcaacacttcacaacatggcagtacaacggctggcggtgggtcgataattcgtatattcccaaaacataaaaatgaatttttttacaatcagactcagtatatgtacttcccccaatggattgatctgaaagggcaggattcgattccggaaactgtacaccaggcaagtctaataaatatttattcatttacacttaaaatggaaaattaaggttgtctgtatggtcgatccatgtgaggacaaaagttggattcggcttcgttcaaagcctggccaatcagttcaggtcactcgcactttctccgtcttttttctctttattctcactcctcttctctctttctctctctctctaactcccctttctccttgtctaatgatatgtccttgccgtcgctttgtaagaccgattctgtccacgcacgtgatcagcttcggcccggaagcgacaacccagaaacactgtcggaggcggtcaaagtgttaaaaggggaatatttggtgaaagcaatcgaagagcacaaaatggaccaagcgatcattttctgtcggttcgctttactgcaaaataacttggaagagaagtgggataagaaatttagaaccaaattggactgtgacaacatggagaagtttttggcgccacgcgggtacaaatggcgtttgtttgcacggcgaccgaagcgcggacgaacggacgcggaatttgctttcgtttaaggcaataaaaagcaatttctgctgtacttctcaacaattgttttaggaaaagatagtgcgctttctcatctgcacggacgtggcggcacgaggcctcgacatcaaaggggtgccctatggtanaggaagcggataacttgcccattttccatcttttacagtggtcaatgtgacattgcctccggcggaagaaaaggcgaattacgtccaccgaattggacgagtcggccaagcagaacggtcctttgaagcattccaatgttttttcgactgaca

SEQ ID NO: 44028 - DNA, 870 bp, Heterodera glycines
tctcagaagaatagatattctcagaaaaatggctatctttttttttctacaccgttgtacatgtgggggtttccccaaaaacgcattactatctgcggttgagccctacaaaatgtcgggttgaaaattgctttctcagaagaatagatattctcagaaaatggctatctctttttttctacaccgttgtacatgtggggtttccccaaaaacgcattactatctgcggttgagccctacaaaatgtcgggttgaaaattgctttctcagaagaatagatattctcagaaaatggctatctctttttttctacaccgttgtacatgtggggtttccccaaaaacgcattactatctgcggttgagccctacaaaatgtcgggttgaaaattgctttctcagaagaatagatattctcagaaaaatggctatctctttttttctacaccgttgtacatgtggggtttccccaaaaacgcattactatctgcggttgagccctacaaaaggtcgggttgaaaattgctttctcagaagaatagatattctcagaaaatggctatctctttttttctacaccgttgtacatgtggggtttccccaaaaacgcattactatctgcggttgagccctacaaaaggtcgggttgaaaattgctttctcagaagaatagatattctcagaaaaatgggtatctctttttttctacaccgttggacatggggggtttccccaaaaacgcattactatctgcggttgagccctacaaaaggtcggtttgaaaattgctgtctcaaaaaaatagatattctcagaaaaagggttatctctttttttttacaccgttgaacatgtggggtttccccaaaaa

SEQ ID NO: 44029 - DNA, 1111 bp, Heterodera glycines
  unsure (1)..(1111): unsure at all n locations
ttctaatcctcnggctggcactaaaccccccccccccccttcccgggggagggttgtgttatccggcaccgatttccgccttctcttttcttacttttgctcccgtcgcgccttttgaaaaagtgtctcatctcccggaaaatttgaaagcatggaaatgggagaagactttctttggggataaattcagagagcaacaaacaattcttttatgacttctcctgcgtaggaatgactgattaatttggggggattaaactttttgcgacttttttttaaataacacgaagactttcaattgttttaggaattttaattttgttttttcgcaaggtttttgattatgatgatcttttattcatattgttatctttttaagccatcaaatcggggcggagggcttaatgcatttattgggcttttttgggtttgggcagttatgaatttggggaatatatggccataatttgggggcgagagaggtgggcaaaataaaaaaaaaggactgaaggggtgggggtattaaaaagctgttttattcctaattaatatatgtgcataaataaatatttttttaaattgaatcaattggttgtcttttgagttttttatataaaaaaagacagccatttttaaataataaaacaacaaatatattcaacaaccaagtgtcaattcgggaaaatataaatgaatggccattaatgactagggagcttggatttgtattttttaaacacttacatatttcgactaaaaatcaaataaatagtatttttagcttggtttgcttcttctaagatccatttttattccctattttccatatttcacgtttttttttaatttttccatattttggcattttcataagaaaaaatcaaaaaacaaccctataaacatcagatattttcaaaactaccctcccaaagaccgaaaaaattcgaaaattgtaaaaaatattcaaattcttattttaaaaaattttatttgaagattactttttttgagagaaaaaaattttcttaaaaataatttgatatatcaaatatagaatatatatacatatatattaaattctgtttttcgtgatttaaattggttttttttt

SEQ ID NO: 44030 - DNA, 1454 bp, Heterodera glycines
atttgggcacggccgatgcacggacgaaggcggcatttgaaggggaaaatatggacaaatgaattgttggataaacaattttgaaatccagaaaaattaattatttgaattttaaattatttttaataacttttgaagatttaaatatcgaacgatacaaataaaattaaatttgtttgatttgatttggtttcaattaatttatttgttggattaaattatcaaaatcaaatcacaaaatagagcaattccaaccaactgcaaattgacaagcaaaaatatccaaaatataaagaaaatcaaatctcggcatgaatttcattaattaattaaatattaattaattaagtatttttcagttcataaatttttgtacaaataaaatgtaataattttacatgtcaattcattacattcacttttgagaaaatataaccaaatggttgtcctttcactaattggccaattacctaacttaattaattaattagtgttaattaccaatttcgccccattttcacttccattgactctgcgcaacgcccaaaaaaaaagaaaaaaaaagaaaacatttgcccgtcggcggagtttcgtcgcccattttctccgttttcatttacgcccattcggcccgtctctccgtttttctgttttcactttttttgctgcgcattttacaatttttgagttccaccgctgcgccctttcccaacccaaaaaatgaaaatgaaaatgcaattaattaatttaaatttttattttctttttttaaattttcttttttcgcccatttgtttgcccctccggcgaatttccaacggccgaatgttttttttgtgtcaccgccgcgtaacggcccaattttggggcgccgaatcgttccactcccgcaacaaaatgacgacaaccaaaacgacgacgacaacgatgacatgaagacgcaaaagatgacattgccccgggcgatgggccccgggggaagaagcgtatttaagcggagagaagtgggggaagggcatcagttgcagttcaaccaacagcagcagaagcaaaagtgaggcaatagttattcaaaacaatttaaaatatatttaaaataattaaattattcaaattaaattaaaatccaatttcaatttaatttaattttcaattttagatggctgactttgacaaacacgctgcccagcgcgaggcggagtctctccgcactttggccttcttcggcgtgtgcctgtccaccgtggccacggttatcgctgtgctttccgtgccgttcgcctaccagcacttccagcagatcggcgccctaatgcatgaacgaagtggacttctgcaaaatgcgctccggcaacatgtggcgcgaggtaaagccgaaaaggcggaaggcatgagccgagaattgtcacaagatttaacaaattttcaggtcacccgtacacaggactactcca

SEQ ID NO: 44031 - DNA, 1697 bp, Heterodera glycines
tacctacattattctatcgactagaggctgttcacccttgagacctgctgcggatatcggtacgatcaggcaggagattcaaatagcttccctcgcattttcaagggccgtgtggagcgcacgagacaccacaggaaccgcggtgctttacgggcgcaacatccctatctcaggctgagccacttccaggcacgcacaccctaaaccagaaaagagaactctggctcggactccacacgacgtctgcgagttcatttgcgttaccgcgcaaaacagctcttgcgaaccgtcatttccctagcctggcgtgggaatgttaacccacttccctttcggcaaccggatggaccaactgcgcaagcacagaaaagtcgtcatccgtagtgtgttacggcgttagccggtgccttaggatcggctgacccacattcaactgctgttcacgtggaacccttctccacttcagtcttcaaggatctcacttgaatatttgctactaccaccaagatctgcactggtggaagctccggccgggcccacgcccaaagccttcaacgcaaccactacgaccctcctacacgtcatggccagactacgcgacaagcacgtgtacaagccaatgacggtggagtataggtggcccgctccagcgccatccattttcagggctagttgattcggcaggtgagttgttacacactccttagcggattccgacttccatggccaccgtcctgctgtctatatcaaccaacaccttttatggggtctaatgagcgggcactttggcaccttaactccacgtttggttcatcccacatcgccagttctgcttaccaaaaatggcccacttggagctcaacattcaacgcctgggttcagagtcaagcaaccctggcttcatacccatttagagtttgagaataggttaaggacatttcgtccccaagtcctctaatcattcgctttaccgagtataactgcttaacgagctccagctatcctgggggaaacttcggagggaaccagctactagatggttcgattagtctttcgcccctatacccaagtcagacgatcgatttgcacgtcagaatcgcttcggacttccaccagagtttcctctggcttcatcctgctcaggaatagttcaccatctttcgggtctcagcgcatacgctctgtctccgccccatcgcatgcgatcgagacgggactatgttgcgccccaacaccgcagtgccagggatcacacatcagctccgtaagaagccttcactttcattgcgcctttgggttttgaacacccaatgacttgcgcatacgctaaactccttggtccgtgtttcaagacgggtcgaacagatgaccggcttttacaccgagaacgcacaactgagagcccgagctggaccgaactggttgctggtacgtgtcgcacgcgaccgccaccgacccccagctcgagtcaacacggacccgaaaccattgcacaattcacccagagtaaacagcactcccccgatccgggtaccagaccccgaaaggctggcctcaagaccgagctcacgcagctactccgagcatctcagcgcactccgcctgcaaatgccccattcgccactgaacagaaggacagcaaaccccagtctggaggctagcaggccaacgtacagcaacaaacggggaatgcagac

SEQ ID NO: 44032 - DNA, 1052 bp, Heterodera glycines
  unsure (1)..(1052): unsure at all n locations
tcaaacaaacacaaanaatgtgctcattattttattaattattttatataataaaagatgggttataaataaggaagggatgcgagacaaatttcccattatctctccctttcctttcttttactctcttttcttttccattgcaatttactctcttttttcccactccctccttctcccacacacacgcacgcgtccaacaagactgctgctgcacagcagcacgcgtctgttcactgtatgcccctctcacccgccgctgcccgcgtagacagacaatcagacagtgcactattttcccacctttccctcgctctacttttttcaaattcatttttaacgcaaaaattaaacaaaacgctacacaaattcaaacactggacacacacaacagacactcaactttattatataggataacattatattgataatgtcatattctttttgattttttatttattaaaataattgatatttttgggttttttctgaattatgttgaaacagaattcataattatttacaatctatatttctgtttttaattgtttatttttattttaaattgaaattatttagattctctttattttttaaatttaattttcaatttatttacattttatcggtgtaagcaatgaaagagattaaaaaacaacaactctgcgtaattgactggtaaaaaataaacttaattgttttaaattttgtttcaataaataaattttatacatttctttatattcaatcagcttttcctttagatagcattaggaatagtcaatatgatctcaaaataattttaaattttttatcaaattttttactcttttttttaatattgacgcatttatttagatttcaatattttttaattgatatattatatttatcaatttgactttagaatgtttttttatttcatctgatttcatcagatttcgcttcctttttaattattctgtaattagagtatttttttttgcatcgaaatccatttatatttgaagagttacagaattcctatgttttattatctttgtaattta

SEQ ID NO: 44033 - DNA, 1473 bp, Heterodera glycines
  unsure (1)..(1473): unsure at all n locations
gtaatgtctctaaatnttcttcaaatnttgttaaatatcatgtaaaatcttcaaaaaatggctaatgtggtattaaaaatcattttagaagaaaaaaacatgataaagcaaaaatttactcattttttgcgaaaaaccaacccaaaaagcgaaattttgctttttttgcttatttttgacataaattaaccatttttgagaaaatttatttattcaatatttttcgtgaaaattttgctaaaaaattatttttttggaaaattttccggtttttgaggtcaaaaaggccaatttgtctgttggggggccgttctattagaggttttttggaaaaatgcccaaatatgcacataaaatatgcacgaaatgccaaaatatgcacaaatatgcaaaacatgcatatggaaagtcatcctagaagcttcaaaacacgctaaaaacatgtttttcgtgcgtttcaggcctcccacagtccaggaaaaaaatatgcatgtgcatataattggactccctaatgattagctataatttcgacaaaccattcgtttcacattttcaaataagctcaaaattcatcaaatcctaagaattaaagccgaaaaaacagatacaaaagtcagtgcatgcgaacctcccatttttattaaaaaaaatttacattttgaaaagctgtgcaaacgcatttcagatcgttttcggagtctcaatgaatcatgaatatgatatgataacaacccatttcaataatcttggactagattctgaacttaataactaactattaatgattactttatatatttagaccataaacctgattttttaaaaattcaaattctcgactttaagccaaatcggaccagggttttcagaattgaccgtaatggatgtcacattattgatcagtgactcagaaaactcataaatatgttttcacggcctattgtgactcagaaattttacaaaaaatggtgctacaaactgaaatgtttaaacttataaataaggctaattatgtttctaatgaaaattggaaaattacttaatgattggaatgaatggaagcggccccattaacgaaacgccactgatcgccatcagtgagcccatcaaagtgatcaatttggatgagtgcttcacttgcttttcgatcataaggccccaaattggggcactgagcaaataactgaagctcattatcgtcgacataatgccaataagcagtgccgatgggctcaactaaaaatttatttgttttaattctatatttattggattttattgaaacttttttccattattgatttatacgtggaaacattccatttttatatgattttttanatttnnttcaattaaattctgctttttactcccctacgattcaaatgagtgggtaatgatgcttggtaaatgangtggtatgccccgcagcacattanaatgagcatcatccatgttttgctgactcgt

SEQ ID NO: 44034 - DNA, 883 bp, Heterodera glycines
gactcccggataatgtaaattaaaagtgaagcaaatcccaaaacatgcaactggaatatgccaaccattagatgtttacattttccggtagttttgttgccaaaaataaaataaaaaatagttttagaatttggaagaatttacgagaaaaataacggaatttgtaatgatttatgatgtgaaaataaatttgcacgacagggataacattgttaaattacaatcgttaatccataatcagtttcaagcagaacgttttcatggatggattaattttgcctggagaaaatcgggttattacggggacgagcctctgccaaatttttgccatcccgttaaatactgctttgaagtgccaaaaaatgtgtcagaaattaaattgtgaatgttttattttattacggtgtgcttattgtgaattatatttatgctttaaccatttttttaatgattaccatttgtgtgaaaatgaataaaattgaatgaaaaaggaggaataaaaatttttgacccgatggaattgatttcaatggccattaatttgcataaaatcaaaaataaaacggggaaaataaattaacatatgagggattcgaaccagcgagcgcaaaaagggaaggcaggagcacaacctccgcaccaccgaataacacaaaacagtgcaaatatttatttaatttattgcgataaaaaaagtttggcacgtcataactcggcactcagactcatttcgcagaaaataaaaacacttttcttaagaacccatgggtgctctatccacccaccaaatttcatttggaaatcccacggacacctggggaccttcctttgtcagtcgaattccgtcaaaccaaatactcaacatcggtactagttcagtttg

SEQ ID NO: 44035 - DNA, 1134 bp, Heterodera glycines
  unsure (1)..(1134): unsure at all n locations
ttttcgcgtggccattttcgcgtggttgcatataaaaganaattcataactcacattatattttaccaaaatttgtttcactcttttttctagcgagtttttattttataatttaatgagtagggatggtaattatatgcacataaaatcgcaaaatatgcgcataaaatatgcaccaaaaattgcaaaatatgcacataaaaattgaaaaatatgcacataaatttttccaattgagggtgtaatttctcaaaatttcttcaaatttgttaaacataaagtaaaatcttcaaaaatggctaaatgtggtattaaaaatcattttaggagaaaaaaacacgatacagcttagaatttactcattttagcgaaaaatcaacctgaaaagcaaaattttgcttatttttgacataatttattaatttttaagaaaatttaaatttattcaatattctcgagaaattttggcgaaaaaatgattttttgaaaaatttttcgggttttgggctcaaaaaggctaatttagctgctgggggccgttctaatagaggttttttttgaaaaatgccaaaatatggacataaaatatgcacgaaatgccaaaatatgcacaaatatgcaaatatgcacataaatcgcgaaatatgcacaaatatgcaaaatatgcatatggaaatacgtcctagaagcttcaaaccaagctaaaaacatgtttttcgtgcgtttcatgcctcccacagtctaggaaaaaaatatgcatgtgcatataattaccaaccctattaatgagtttataaactaaattaaagctatttaaattatataatatggaccagcagcaaaaaattaaaacaaaacgaaacaaagttagttagaacatgacggcgcactctataacgacatcaataacattcacctcccccaaaatgatcacaattatgccaatgccaatgtgaatcccgaaaacattatcaattttctcactggtgtttcctgaaactatgaaatgcgaccttagtttgttctgaaatttgttattttttttataaaattttaattattttttccgtttgacgcacatccgccaaactgacaaattattgtagaagatattagccgcaagaaataaaaaaa

SEQ ID NO: 44036 - DNA, 953 bp, Heterodera glycines
cgacttcccttcccccccccacccgctcaaaaaaaaactttcatgggaagttttggtgaccaaaaaaagacgggggttcacttttgtcacttttgttggggcagccaacaaaagtttgacgaagaacaaattacgatcaaagaaacgaaattattatgcggaattaatgaaagaaaagaatgaatgaatgataaggagaaaatggaaggaattgcggaaaatttgcaaattcatttttttgtgtgtacgtttcaaaattctttgttaccaaatgttgcgagattaattcttgtaaattcgtataattatggttcgattggttagaaaaagtgtaagaaatagcgaaacgaacggagagaaactgtcaaactacatttaattgacaatttaaaagaaagcatcgaatgaatattaaattaatgattatgcaattcgtagaaattttcaagtgaggcaaatggacgagagaaatttgcctaaagaaattaatatgctccttccagcagaagcgcagcatcattagcaaccaatttgttatgtgttcaatcctccaatggataaggagaaattttcttcacttagaattttaaagacttaaaatttgccaaaaaaccgcaaaatatttttgaaaccctttttaaaaagataaaaacaaagtaaataattttattaatattttcaattaaaaaagtaattaaatttaaaattaaaaataattttttcttggaaaaatcccgctatttccggtccggtcaaaaattatagtattcccagtcctgtttccggctattctgatcacggtcaacccagggccaggtttttcccaagaatcccagtcatgagatattcaagaaaaaactaatacggaaaagcgagcaattggccaattaattagtaaaacataaaatgaaaacccttttatttattgtgatcagattcgggatcatgttgca

SEQ ID NO: 44037 - DNA, 1074 bp, Heterodera glycines
atacacatacaaatgctctcgagcatgatagggagggcggtgcgcatagccctttatttttgagggaatttttaatttatactcttcccagaaaaatggctatctcttttttgagaaatttatacctcacaaaagcgctgcagtatgagacggagggctgtgcacaatcgccattttatttcacagaggatttttatatttagaggttatcccagaaaaatggctatctctttttttgataaattttatacacatacaaatgctctcgagcatgatagggagggcggtgcgcaatagaccttttatttttgagggaatttttaaatttatactctatcccagaaaaatgtctatctctttttttgagaaattttatacctcacaaaagcgcttgcgtttgagacggagggctgtgcacaatcgccattttatttcacagaggatttttatatttagaggttatcccagaaaaatggctatctctttttttgataaattttatacacatacaaatgctctcgagcatgatagggagggcggtgcgcaatagaccttttatttttgagggaatttttaaatttatactctatcccagaaaaatggctatctctttttttgataaattttatacacatacaaatgctctcgagcatgatagggagggcggtgcgcaatagaccttttatttttgagggaatttttaaatttatactctatcccagaaaaatgtctatctctttttttgagaaattttatacctcacaaaagcgcttgcgtatgagacggagggctgtgcacaatcgccattttatttcacagaggatttttatatttagaggttatcccagaaaaatggctatctctttttttgataaattttatacacatacaaatgctctcgagcatgatagggagggcggtgcgcaatagaccttttatttttgagggaatttttaaatttatactctatcccagaaaaatggctatctctttttttgataaattttatacctcacaaaagcgcttgcgtatgagacggagggctgtgcacaatcgccattttatttcacagag

SEQ ID NO: 44038 - DNA, 1388 bp, Heterodera glycines
ctacgtgcgccaaaaatgatcaaaaaaaaaaagcgatcaaactttcgaaagaccgataaaaatgacccagtttttaaaaattcataaaaaattttgaaaaaaggctacaaccatatacttcctttactaatggtcagcaaacgaattctctatcaagatatcatcataaaacaaattgaaataactgcataaaaacatgctagggggagtaggactttaaataaaaaatcaaaaaaattcatcatcgtgtctagcgaatccaaacccccgacgaatacttctagctttgatgccgactttttagcaccatccaagacaagtgggacgttcttcaacatgtggtacggcattgttgtcgtggtaaggtgtgccgtaacaaaacatacaatgatgaagcccaacatttaaaatgggatcccacacataaataaaccccgcacggcgggaatcgagaatttgactcgagattgggtctaaaacaagggatttataacgtacctaatagtggttctgaaaccaaaaattctcttaaccacgactctcgagcatcgcttattcgtaggccgtcggtctctatggcgtttttagccttttgctctatgacacccgcagtttttcaccgcactaatttcagggaaacagtcattggaaaacggggaaggtacggcgcgacggtgctgcgacaagcgccgcccaaaattcttttttgcaaatttattagttaacgaaccgccagtataaaattttttacctaactttttaaggagggactggtgctattttgttccgccacccctttttgcacataatatgtacacatgcttttgatcggacaaaacaaaaaaagttccgctgatatttctgcctaatttttgaatacacaaacagaacgacctgttgctcatcaccagcaccgtctgcaaggtgtccatccaattccgtgactttgactcgtcggcactgttcacactcaccggtgtactgctcggtctcggcgtgttcctggtgttctttggcctactccgctacttcactttcttctcccagtacaatgtctgttctattatttccataatttgctaattacaacgtgattaccccaactctcaatggacttcttatttcaaggtcatcattctgacattgcgcaaatcgtttccatccattttgcgcttcttggttggcgcggtcattctctactgtggatttctgttgtgagttgtactattgaacatactgtaatttgaccatttgtctttttcagtaccggatgggtaatcattggtccctacagcttgaaggtgctgtcttctactttaattttcttttgagaatttgtataaaaaactaaaaattaagtttcaagaaagtcatatagtcaggcggat

SEQ ID NO: 44039 - DNA, 1701 bp, Heterodera glycines
  unsure (1)..(1701): unsure at all n locations
ggcattctgttattttcaaaaaaaaaccgtcgggcaccagacgcattttcgacgggttacaacattatgtgttggcaaatgtttgtttgccttttctccttcctgcccatttttgaaggtttttttgtgttactcaaattgctaaattggcactctcaccgaaaatggaggatgagaaaatttccaaaaaaaattctcctgggtcttcttctcctccaacagttttggcctctgccctggtggtggtggcctgctggcagccttgcaagacgaccgatcaaatttcaagatggcgagaacaggaggccaaaattttaaatattcactttttttttgactgggccacaggagagaattaggaaaaacgaaaggtggcgagcgaaaataaaaaaaagggaaacaaaaataaataaataaaaataaaaatttaaacggagtatgagtgaattaaaaaatttgtaatcaaaataaaaataccctattgaaaaaatcacttggttacaaaatttatatggcaaagattcggtaactcgagcaaaattctacggtattttacatataaatcctgccaaataccattcaccctagggcttggatttttaggtgcgaaaaaccccaatttagaggcctaaatagaggcgaaaaaaccacctaatagtggcgaaaatggtaaaatattggcgaaaattttaaaaaaatttgtgctttttttcaatgaaaataaattaagaccagtgtaaataacttattcaacaattttaattacaaaaaattaaatttcatttttttgaataaaaagcaaaaaaaaatttgcttaatgaaagttcgatttttcagcttatttttcatttgaagtctatattcaaagaggaaaaagtttttcaatttttttttgtccaaaatctttaaaaaattatttctattttttgcaatttttgaaaaattttcaagaagtcggtccttnatggtgcattttttaattgcatttttggtaagaaattttttaaaaatgccgaaatagtggtaaaaataagggcgatatgccaaaaatgccaaaataggtaccccctattttaggggcgacaattcaaaaatagggattcctagggacgtatagaggagccttaaaacgaagaattttcgcgctaaaaaggttttttttcgtgcttttctcattgaatttaagccgcagaaaaaataaatactaaaaaactaagaatccgggcactaattttaagtaaatattcctggctttattctagtttacgcgtccaatatcaatgagcatcctcagtttctttggccctaacttttttttccctgggtcagtgccaacattcatggcatcaaatgaaagccctaagtctaccgaatttttatttaactaaattatggacaaaaggtaaaagacaaaaaattatcttgaataaaaaaattatcttgaatatactcttaaattaaattccaggttttctcattgaaatttttacgaagcaagaaaaaaattgatggcctaagaaactgagggtagtcactgacttggacgcacgcttaaataaagaatagagcaaacattcttaaaatttgtggcctaagaaactgaggatagtgtcactgacttggacgcttaaataaagaatatttttttacgtaattgaaagtttttctgagtataaaaaaagatttttaattaattttttg

SEQ ID NO: 44040 - DNA, 908 bp, Heterodera glycines
cggcagaaatttttgttattctgattaagagaacgaagatcagacaaatttatacttggggaactttttcattaaaaaaataataataaaaattgaggagaccaaaggaatttttgatttagcggcgatggaaaatgatgatgagatcgaagtaaatgctgatgagagatgaccaaacaagcagccccctcccttcatcaacagcagaagaaatgagtcacccaaatggaaaagccaaaagtgactgagagataaggaaaagtggacggcacagagacgactagagccatttgggaacaaaatagtgatggtggtacaaagaatgaataagcaagtgaaacataaggcgagaggagggaagagggggcatcgtaagtcgagtaatggacaacagaaggggggcaataggggacaatcaaacggcgtggcgccagaaggcacatgccgggaaagcgcggaattcgccgtgggctagaaggagagagggaaaacattaatatgctgacagaaaaaatcaagtaaaataggggaagcacaaacaagttagaaaatcaaaggcttttaaatgggcagctattgccgtgaagcgtttgaataaaaatgagaaatattaccattcgagagttttcaatattctttcaaataaacgaatgaaatatttaaaacagatgaatttgaggcataaaatacaaataaaaaaagggacggaggaagaggcaaatgacacagaattaattggttttgcgtcgtcgtcgattgatggccctttctctctctctctcttctctctttctctctctctctcttctctctcttctctctctctctctcttctctctcttctctctctctctctcttctctctttctctctctctctctcttctctctttctctctctctctctct

SEQ ID NO: 44041 - DNA, 168 bp, Heterodera glycines
ccactctctctcgccgcttccttctgatctgtttgctttgtttatgtccgatcagctgatcattcgtcctttggccaacgactgctcatttggcggtgattgagcaacaaaataaaactgccgaattttatgattaggaaaagcggaaaagcatatgggtaaacggag

SEQ ID NO: 44042 - DNA, 1299 bp, Heterodera glycines
caattcaggataaagaacactaaaattcagatgtagacctcaaaattcagattattgcaaaacaaggggtcagcagccaattttccaattttgcgaaggggtctccggccatgtaaattaatgtaaatcaatgacctttttttgctttcaacaccgctttttacgcggcacgttttttccaagacttttgggggacaaggagggccggcggtgccgataggcgccgccgggaaaaattttgtaatttttaatgcgatttgttaacagaatttgtaaaaaaaatgaccaattgattaagttttgggtttttaggatgcttaacatgaaagaaaaaagttggaatattttttaaaattaaaattttaattaaaataatggtaaagaaaatgtgaggaatattctatccaagtggggaattgaacccaggcgaaaaattatgaaaggtagaaagtttaaccactacaccacatgtgcatgtgtgtaatcccatgactaaatgaaataaaatttaattttttctcaaaaatttctccttcttcaccaatttcctactcttttctcgaccagacccccattcttaccagtgcaaatttttaccggcggtaccggtactagacaaaccggtaacggtaatttcatttttgaaaaaaccggtaccggtaccggtaccgctcaaccctagaaaatatttatatttaaacaataatttgaaaaattatttttgctcatcatattttcattaaatttttgctatttttggcttcctatttataatctcatatcagcagattttggaagtattatctcttctaataaatccttcgatgtgatatttcaaataaaactttgttttataaattataattcacccggcaaatcctcgggcaaatcgaagtcggccaattcgcccaactccgccggttcgtaagcaaaagggtcgtcctcgccaagtgcaaatgacaaaggctcctgaccaatcgttggaggagggcacagatcgatcaacgaatcggagaaagtgatttgagtcgatttggtgggcttcgcctttgccgctttgtccgtttggtgaacggacaaaagacgagccaaaatctgatcagaattcgcttccgaatcgccattgtctgacgatggactcagcttttccaatgtttccactgaattgtttaaacaatttcatcccttccccgtcctttttcgattttctcaccgtccaaaatcactttttcctttcgctgcttttccttcacaaaaagttgtgccaaaaaatccttgcgtcgaacattggcttcattc

SEQ ID NO: 44043 - DNA, 674 bp, Heterodera glycines
ataattagggctaatatttatagttgctaaaaattgccaaaataattagtttttaatttctaaaaaaaccccaaaatagttgctaaaaatgggtaaatagttgctaaaaagttccgaatttaggggtgtaaaatcgcaaattttcttcaaaaagcaaaaattttttgccaaatcattaagaatataaacaattttcaaaatcaaaaattctcgtcaagaaataaaaaataaattttggaggtgaatttttgagaaatttttcatttatcagatcatttttgaaaattttcgggtcgattcttaggggtgtaggtttatatatatttgatcacttttacagtaatatttaattaattctttgttatcaattttttcaataaatattttgactgaatgcaagtttaataacacgttttattcgcatccaaatctctttaatatcgtttttaaatttttgaataattagtagggttgtaaattatatgcttttgcatattttttctgcgcatatgctatgaagaaaggggctcaaaaatggcatttctgcattaaaattttttgctttggtgaaggtttttagtgcatacaaaagcatattttgggggtttttgagaataagtgcatattcatttttgcatttttagagcatattttggtcattttttggaaatttt

SEQ ID NO: 44044 - DNA, 951 bp, Heterodera glycines
tggaatatttacgtgtcaaagggtgtgcattaagcgactcgctgtgcttgcccactgcatttcaaatagctggtaatttttatttctccggcctaatccagaaaaaatcactatctctttttttggaatattttacgtgtcaaagggtgtgcatataagcgactcgctgtgcttgcccactgcatttcaaatagctggtaatttttatttctccggcctaatccagaaaaaatcactatctctttttttggaatattttacgtgtcaaagggtgtgcatttaagcgactcgctgtgcttgcccactgcatttcaaatagctggtaatttttatttctccggcctaatccagaaaaaatcactatctctttttttggaatattttacgtgtcaaagggtgtgcatttaagcgactcgctgtgcttgcccactgcatttcaaatagctggtaatttttatttctccggcctaatccagaaaaaatcactatctctttttttggaatattttacgtgtcaaagggtgtgcatttaagcgactcgctgtgcttgcccactgcatttcaaatagctggtaatttttatttctccggcccaatccagaaaaaatcactatctctttttttggaatattttacgtgtcaaagggtgtgcatttaagcgactcgctgtgcttgcccactgcatttcaaatagctggtaatttttatttctccggcctaatccagaaaaaatcactatctctttttttggaatattttacgtgtcaaagggtgtgcatttaagcgactcgctgtgcttgcccactgcatttcaaatagctggtaatttttatttctccggcctaatccagaaaaaatcactatctctttttttggaatattttacgtgtcaaagggtgtgcatttaagcgactcgctgtgcttgcccactgcatttcaaatagctggtaa

SEQ ID NO: 44045 - DNA, 453 bp, Heterodera glycines
acaatggaatgccgctttgacccgagtgggggtgagctttgccgttgttgttgctgcagttgtgcgcccattgagctggtcgatttctcagaaacgacactcgcgcgcggcccgccaactttggcaccgccggtggcgccacccgtcgaagtgccagccgttgccgacgccgcggcggtgcccgctgcgccgtccattatccgctcctcctccaacagctgccgctcgcgggtctgttcttgggacatgcgattgcacaggtcgaacgcttggccaattgtgcgcactacagcgatggcctgatcctaatcagtgcaaaaatgatcaaaaaacggagtggaagagcagagggagagaaaaagagagaaagagagagagagaaagagagagagagaaagagacagagagagagagagaaagagggagagaaagagaaagacagaaagagagaga

SEQ ID NO: 44046 - DNA, 1138 bp, Heterodera glycines
  unsure (1)..(1138): unsure at all n locations
atcaacgggactcaatccaccatcatttcaatcactgggactcaatccaccaacatttcaatcaacgggactcaaccctccagcatttaaatcactgggactcaatccaccagcatttcaatcactgggactcaacccaccagcatttaaatcactgggactcaatccaccagcatttcaatcaccgggactcaacccaccaacatttcaatcaccgggactcaattcttcagcatttcaatcactgggactcaacccaccaacatttcaatcactgggactcaatccaccaacattccaatcaacgggactcaaccctccaggatttcaatcactgggactcaatccttctgcatttcaatcactgtgactcaacccaccaacatttcaatcactgggactcaatccaccaacattccaatcaacgggactcaatccaccaacattccaatcaacgggactcaaccctccaacatttcaatcactgggactcaacccaccaacattccaatcaacgggactcaatccaccagcatttaaatcactgggactcaacccaccaacattccaatcgacgggactcaaccctcctgcatttaaatcactgggactcaacccaccagcatttaaatcactgggactcaacccaccaacatttaaatcaccgggactcaattcaccagcatttcaaacaccgggactcaattcacctgcatttcaatcactgggactcaacccaccaacatttcaatcgccgggactcaattcttctgcatttcaatcactgggactcaattcttctgcatttcaatcactgggactcaacccaccaacatttcaatcgccgggactcaattcttctgcatttcaatcactgggactcaattcttctgcatttcaatcactgtgactcaacccaccagcatttcaatcgccgggactcaacccaccaacatttcaatcgccgggactcaattcttctgcatttcaatcactgggactcaatccaccacattcaagtcactgngactcaattctcccgaattcaaatcactggactcaatctcatcaatccttcagcaacacaattaaccnggactcagttctccgacattttcatcaccggaactcaacctca

SEQ ID NO: 44047 - DNA, 1011 bp, Heterodera glycines
agctgctgctttgtctgctccgcaatgttcgtctgctttacattttaaattatctaagtcatgccattgttgcgtgttcacctcatcaaatgcttccattggctgcacttcttgaggctgcgacattttgccgttctgttggcccacccggcactgctcgagtcgcagctgtgcatgccgttcggatgcgaagtgaatgttagccaagcattggatgcgcgtcaccgccttttgctgcgggttggccgcgctttgttcggccaattggagaccggaggcaatttgggcgttgtagatgaagctgtactcagtgtccttctgctggaacggctccagcagcccggcggcgcttttgtcgcccgactttgggccaaaccgtgccgtgccaatgttggcattcgttgacgaccgaaagccgtcaaaactcatccagttggaatggcgtattccgccggtgcaaacgctgaggaatttgctgataacagtcaaatgaacaaaaaagggctggccaaaatgacaggcgattgaccccaaattgacagcagttgttccttctgctgctgctttgactgactgattgtttgacggttttttaatttcctcccctccccctccggcgccattctgccgtcaacagcagctgaacgtgttcaactcgtccctccgcctctcccgtcgaagtgcccctcggctgtccccggcgcttcgattggtgtgcaacaacgtgggttaatatttcttcatcagcactagagaccggacaacttgaggagatcccgaccgattcccgatcaatcccgaacattttggaaaaacaatcgaggcggatcccgaggtcgggatcccgatcctgtccggtctatagtcagcactaattaagtgtcattaggagtgattaattgatcactactgctgatcagccgtgatcaccaccaccacccattgcttttcctgctcgcccttttagcactttggtcagaatgccaatctttctcggttcgctggtgatcg

SEQ ID NO: 44048 - DNA, 941 bp, Heterodera glycines
tacctcatctgtgcacatgattggcacagatgggcacgggcatttgtttgcctttatttgctaacaataataaatggagatgggccttatcatttaatccagagcagcagtttaactgctgttattaatcgcattgggtggccccagtgaatttttttttttgttttgcagagaaccaaaataaaatggccaaagttgtaaataaacaaaaattaaaccccaggcaaaagaattggaaagtcggcaacttcaaacaaaaacccggcacggcatggacccacaaaaggtgacaaaaaagccgatggtctccatataaaatgctcccttttgaggatgaccgcaattattccgttcggcaacatcaaaaaaaaaaaaaaaattcggcacggcatggaccctcaaaagatggcaaaatgccgaggctttccccaggtaaaatgtccccctatgaggaatgaccacaattatgccgtttatttaaaattgagaatttgaaatccgcaactgtcctatcagagattttgttggtgatatgaaatagataataataatgactccgcttcacttcagtctctcataaaaatgatgtgcgatttgtgtacatttattctccccttatcttttcttaggcggcgatttttgttattttccaatttgcctcattcattgatcaaaatcaaacattgccttcattacattaattattactaattacctatgtccatatttggtcatttaataaattgtaaaatgaaaatttttttttgaaaaatattaatattatttaaggttttcccgagttaaaaaaacatttttaaacttacaatttttgccctaataaaaaactaataatgtcttcagttcattcagtaagtttaaaaagaaaattttctcatttttttctcgacaatttatgtgataaataaagaaaaaaatatgcg

SEQ ID NO: 44049 - DNA, 993 bp, Heterodera glycines
agtgtccgtttgggggtactcaaacaattctgtgggagcaaaaatccaaagcagaattaaagtacaggctatagggaagctattcccgaaggattcggcctccccataaatctgggcgcatcggttcggggggactgccccgaaaacaaaaaaatcgattttttcaagtgtccgtttggggtactcaaacaattatggggagcaaaaatccaacgcagaattaaagtacaggctatagggaagctattcccgaaggattcggtctccccataaatctgggcgcatcggttcggggggactgccccgaaaacaaaaaaatcgattttttcaagtgtccgtttggggtactcaaacaattatggggagcaaaaatccaaagcagaattaaagtacaggctatagggaagctattcccgaaggattcggcctccccataaatctgggcgcatcggttcggggggactgccccgaaaacaaaaaaatcgattttttcaagtgtccgtttggggtactcaaacaattatggggagcaaaaatccaacgcagaattaaagtacaggctatagggaagctattcccgaaggattcggtctccccataaatctgggcgcatcggttcggggggactgccccgaaaacaaaaaaatcgattttttcaagtgtccgtttggggtactcaaacaattatggggagcaaaaatccaacgcagaattaaagtacaggctatagggaagctatttccgaaggattcggtctccccataaatctgggcgcatcgcttcggggggacggcccgagaagccaaaaaaaaaaaaaattattttgaaaaaaaattattataaggaaatgactagttactatttgaataggttatttcgcgtccgttcaatgtccctgcaaaggttggtgtgcgtgcttctgatcagtttctgaaaaaaaagtaaagcctaaactttttggcctgtttaaaaaggattaaaaatttttaaaaa

SEQ ID NO: 44050 - DNA, 1066 bp, Heterodera glycines
  unsure (1)..(1066): unsure at all n locations
ttagcgctcataatgggatgtataaaggcgatgtagaaaggnaatggaagcgctaaatttgttgagnaagctttttgagcgtaattacgatttttacttacaccattttttgctaggcttagatcacatgcgattttcggcactctgataattttagcgctcataatgggatgtataaaggcgattgtagaaggaattggaagcgctaaaattgtttgagaagctttttgagcgtaattgcgatttttacttagaccatttttttctaggcttagatcacatgcgattttcggcactctgataattttagcgttcataatgggatgtataaaggcgattgtagaaggaattggaagcgctaaaattggttgagaagctttttgagcgtaattacgatttttacttacaccatttttttctaggcgtagatcacacgcgattttcggcactctgataattttagcgctcataatgggatgtataaaggcgattgtagaaggaattggatgcgctaaaattgtttgagaagctttttgagcgtaattacgatttttacttacaccatttttttctaggcgtagatcacatgcgattttcggcactctgataattttagcgctcataatgggatgtataaaggcgattgtagaaggaattggaaacgctaaaattgtttgagaagctttttgagcgtaattacgatttttacttacaccattttttgctaggcgtagatcacacgcgattttcggcactctgataattttagcgttcataatgggatgtataaaggcgattgtagaaggaattggaagcgctaaaattgtttgaggagctttttgagcgtaattacgatttttacttacaccattttttgctaggcttagatcacatgcgattttcggcactctaataattttagcgctcataatgggatgtataaaggcgattgtagaaggaattggaagcgctaaaattgtttgagaagctttttgagcgtaattacgatttttacttagaccatttttttctaggcttagatcacatgcgattttcngcactctga

SEQ ID NO: 44051 - DNA, 844 bp, Heterodera glycines
tgttggccacgtgccaaaatttaacgccgttctcttcgccccaaccgaacactttcactgaatgtgcgacgttttttctcaatgtgctattcgcagagtgctaaaatagtgacaaaaaaatattgtttttttatgagttttttgggccaaatttctaaatttaaaaaaaagtttaaagagaaaattgtttaaattttaatgaaattgtgaaaattaatcaaatatatttggtcttaaaatagagacactccatttttgggagtttgatcatttccgagaaccattcgcgctaaagtagagccatcctataactattttctattgtcttataagtgatcccattgtcttgaaatttcaaaaaattatttaaattttaagaaaatatgtcagaaaaacgtccctaaaaacgttcaaattggtagattttactaacgagccggcacaggattaacccacctcgtatatttcgttgtttttacagcaacttccgtacccagtgtacatgatgtgagatgcgtggattggtccatttttcataatctcgcgcatcatttccttttctctgttgaaagccattaattgtgtgagtccggtgattactggcatcctagtagcctcttaaagtgatgaaaaaaaattgattgaaaaacagcagaaatccgatgaaaatcccggctcaagaaagtacggttaccccaataccgcagcgggatccgcaaattttttttgttgtgacaccccgaactttcttaaccctcagagcccttcgaaaaatcttggtcaacccatcaccccctttttatgcattccgccagcccctaaaaatttcttttccaaattaggc

SEQ ID NO: 44052 - DNA, 883 bp, Heterodera glycines
ggaatttttttagcgagaatataccaatgaattttgaaaaaaatgttttctgaaacgaatgttttaatctttttttaacataatgactgaaattaaatttttctcacaaagcagtgttggattaattctccccgatataatcaagttttttggttatttagcaaaaatgtcaaatatctgggaatattttacactatccgaaagagtagctttttgtaaggaaaatggttgctcatacaaaaaggatcacccttattaaaaaaaaatcggaatcgcaattaatcggattttgggccataatcgtaatcggttttaaaaccgtatcggatttttggccataatcggaatcggcgatttaatcggaatcggattttgtctggctcggcacatccctgctaccaatccttttcaaattttgcaaatcgatagagaaaaaaattctacatagtttaatactgattttattagtaattatgctaacaataaaaaagttatggagtgattaaaatttttgcatttcttttcctctcgtgttagcgtactattttcacatctctaacacacaaaaaacatcaaattcgtaaatgctaacaattttggttataaggataaaaaatcactttggacatttagaatcaatagagaaattaatagttttagcatttttgctgaaaacagcagtcaatgagctgagttataaggtgataaaaatttgaaactctcgtaacttttttctgagatgacaaattacttagcatttgcttagaaaaaaattctccttttcaaaatctttttttagataccaaatttgttcagtttagtttggaatgaagcgagttataacagatcaaaataaaaaatacaaaaaagcattttccagtgt

SEQ ID NO: 44053 - DNA, 1309 bp, Heterodera glycines
ataaatttctagaaatgacctaaaatggtctacaaaaaagccaatatgaaaattgtaaatatgactccagaacctatcattttttgattttacatatttaataatgttctcctaaatttacaggttatttttctgcagcatttttttctcatattaccaagttccataatcttatagggagttcatgtaagggccaatataaacattgaaaggcctttttgtgacgaacaaagccaatgaaaccgagccaatgattagctatgaagaattatttctaacccgataattggtgtggtggggactaagcagatcctgaagaaactccaccaatgaaaacaacgaaactaagctgaccttttcgtggaatcagacgtaaaaggaactataaatctctagaaatgacctaaaatggtctacaaaaaagccaatatgaaaattgtaaatatgtcttcaaaacctatcattttttgattttacatatttaataatgttctcctagattttcaggttatttttctgcagcattttttctcatattaccaagttccataatcttatagggagttcatgtaagggccaatataaacattgaaaggcctttttgtgacgaacaaagccaatgaaaccgagccaatgattagctatgaagaattatttctaacccgataattggtgtggtggggactgagcagatcctgaagaaactccaccaatgaaaacaacgaaatgaagctgaccttttcgtggaatcagacgtaaaaggaactataaatctctagaaatgacctaaaatggtctacaaaaaagccaatatgaaaattgtaaatatgtcttcagaacctatcattttttgattttacatatttaataatgttctcctaaattttcaggttatttttctgcagcattttttctcatattaccaaagttccataatcttatagggagttcatgtaagggccaatataaacattgaaaggcctttttgtgacaaacaaagccaatgaaaccgagccaatgattagctatgaagaattatttctaacccgataattggtgtggtggggactgagcagatcctgaagaaactccaccaatgaagacaacgaaactaagctgaccttttcgtggaatcagacgtaaaaggaactataaatctctagaaatgacctaaaatggtctacaaaaaagccaatatgaaaattgtaaatatgacttcagaacctatcattttttgattttacatatttaataatgttctcctaaattttcaagttatttttctgcagcatttttttctcatattacc

SEQ ID NO: 44054 - DNA, 924 bp, Heterodera glycines
cgactcgatgagcacaaagaatttgccttgtcttcaaatggcgttttcaatttccatggctatcagagtctttttactctccaacatcgcgtaattcattctacagccattgttcttcgagactttgtaatttcagttcgattttattgtcgacggcgtcacttacaaaagtgtcgaccagttctaccaaatgaacaaagtcaaggatttgactgggatcgaatcggccaaattcacggacggatcgacgcggaattacagcgcattggccaaggaattgttgcgacaagcaaacgtgataatttaaatgctcaaaatatataaaataaacaattgttaaggtcaaacggcaggaaattgacaaatggcgcaccgggaggggcgttgaggtcattcaggtgactgacattgggcaaaaatggcaaattgcccattttgtgtcgttttccttttcagaaggctcttctcgagaaggtccgccagtgctacgacttgcgcaattcgatcaccagcacagcggacaaactgattgtgcacagttacaacggcgacgactttttcggggcgggcgttccggcgaaatatgtgaacgattggtgcggggggatggagcagaacaaagtctcgctgaaggtggacttatgctgatttgcagtattttatataattattttgatagtacccaatggaatttcccctcactgcggacaatgtgaaatatgtgccgctaattgcgaaggtgagaaagactttcgaacattttcattggttggggctatgctatccttttatttgtttacagggaaggaatgttctcggcgccatttacatgattctgcgtgataaggtcccttcccaatatttgcaattagggtaatagtaaagctggtgccccccttttttgaaaattatttgtttcaaaag

SEQ ID NO: 44055 - DNA, 1018 bp, Heterodera glycines
gtccgattcgttggctgtcatcgcagccaatttggactgcatcccctacttcaaaaacaagacaaccatcggtcagtttttttgtttcacattttcctaacttattgcgctattttttttactatacatctttttaatgctagcaattttttgttttaaaacccgtttttttgtatagaataatttgtcccacccaccccctaatttttttaaattgaaaattgataattttaaagaattatttccattgaaattttaagaataataaaaaataataaaattttggatttgtcttactttttactaggaaaaatgcctctaacaataagtatgaaaaaattagaaaactaaagaatttttatttttttaaaaattctttggcacataatgcatccttttccatcgtcattaactgtgttcaattttcaacaaatctattttttatttttattttttgcaaatttgaatttttttttaaatgcaatttttggcctttttcaggctatgcccgttcaatgccaactgcatgtgcggtggaccgtgttgccaaggcacggggccgtcagtgttatgaggttgggtttaaaaaaaaattgtttttctccatttgcgagagaattcactcaattaccgtaaactgagtcaatttttgattattttttaggtgccaaccgggtggaaatactttggcaatttgatggacgccggcaaattgtcattgtgcggtgaagagtcattcggcaccgggtcggatcacattcggttcgattttcccctctttttgggcttaaaaaatttttttaacaaattattctatgaatttttcttaaaaaaccgtggggtaggggagaaacgacttgctccgtaaatttcgtcctagtaaaatcagtgttcacaacttctaacatttaattaatatttttttttacatagtgaaaaggacggtctctgggcactgttggcatggctccaaattttggcacacaaaaatggcacacaatcagtggaacaactggtc

SEQ ID NO: 44056 - DNA, 493 bp, Heterodera glycines
  unsure (1)..(493): unsure at all n locations
aaagtcgaaccaaaagtgaattgctttcaaaaggagtcgaattatccctaattgctttccattgacattgccgcaccgacatctcatttcgcaccagaaaagtacgacaaaatggttttttttaaatatttattattggtgttctctatgaaaaatcatatatctttttatttacatatataattgttttgaataattatatttatttaattggatcacagattcaaatttttttttttttattataccaatgtcaaatttattatcattttaaatatctatttgatttttatttggataggtaaaattatttattttttatataaattttgtttatattttacaactaaatttttaattcttaatatctttctatagccctaagagttctctattagcctataaaatttcaaaaactcgtcaagtttaaacaaanngtatggccaaagtacacnatgaaaccggctttttcatttttggnccatactttttt

SEQ ID NO: 44057 - DNA, 644 bp, Heterodera glycines
aatgacggctggcagcaagaagaaaatgaaaatgtgatgggaggaggcagagaaaggtgggggaaggggaggggcgggggcagggcactctcgggggaataatccatccaatggacgacgggcgagcgggggcgggtgcgttaattgggacgactgacggcggcgggcggagaaatatgagtgggatacggtaatgtgcaggaggaacttcgacgacgtgaactgctgctactgggaaagatgcgcataggaagaagggatgggagaaggaggatgagattgacgaaagctcatccatccctccccgaatctgtggggtgccggagagatccctacggaatccccccggggcgtgccgtgtgccgtactccgccctccccccgtccctttcggcttatttctcatttcgtttttggcaccctttcacccgtccattctcgtccatctgttcctccattttccaggatcggtatgccgacaaattggttggatttgtttgggatgaattgtcgcccgccgaggacaacgacggattatgcgtcgggacttacaccgctccgtttggacgagggtcggtcggatcgtcgttttgtcctccaatttggggctgtctctccctctctctctctgctcttttcgtcctt

SEQ ID NO: 44058 - DNA, 1016 bp, Heterodera glycines
  unsure (1)..(1016): unsure at all n locations
agggctagtgatttcggcaggtgagttgttacacactccttagcggattccgacttccatgggcaccgtcctgctgtctatatcaaccaacacctnnntatggggtctaatgagcgggaactttggcaccttaactccacgtttggttcatcccacatcgccagttctgcttaccaaaaatggcccacttggagctcaaacattcaacgcctgggttcagagtcaagcaaccctgggcttcataccccatttagagtttgagaataggttaaggacatttcgtccccaagtcctctaatcattcgctttaccgagtataactgcttaacgagctccagctatcctgggggaaacttcggaggggaaccagctactagatggttcgattagtctttcgcccctatacccaagtcagacgatcgatttgcacgtcagaatcgcttcggacttccaccagagtttcctctggcttcatcctgctcaggaatagttcaccatctttcgggtctcagcgcatacgctctgtctccgccccatcgcatgcgatcgagacgggactatgttgcgccccaacaccgcagtgccagggatcacacatcagctccgtaagaagccttcactttcattgcgcctttgggttttgaacacccaatgacttgcgcatacgctaaactccttggtccgtgtttcaagacgggtcgaacagatgaccggcttttacaccgagaacgtacaactgagagcccgagctggaccgaactggttgctggtacgtgtcgcacgcgaccgccaccgacccccagctcgagtcaacacggacccgaaaccattgcacaattcacccagagtaaacagcactcccccgatccgggtaccagaccccgaaaggctggcctcaagaccgagctcacgcagctactccgagcatctcagcgcactccgcctgcaaatgccccattcgccactgaacagaaggacagcaaaccccagtctggaggctagcagcccaacgtaca

SEQ ID NO: 44059 - DNA, 940 bp, Heterodera glycines
ctcctccgtcattggcttgtacacgtgcttctcgcgtagtctggccatgacgtgtaggagggtcgtggtgttgcgtggaaggctttgggcgtgggctcggccggagcttccaccagtgcagatcttggtggtagtagcaaatattcaagtgagatccttgaagactgaagtggagaagggttccacgtgaacagcagttgaatgtgggtcagccgatcctaaggcaccggctaacgccgtaacacactacggatgacgacttttctgtgcttgcgcagttggtccatccggttgccgaaagggaagtgggttaacattcccacgccaggctagggaaatgacggttcgcaagagctgttttgcgcggtaacgcaaatgaactcgcagacgtcgtgtggagtccgagccagagttctcttttctggtttagggtgtgcgtgcctggaagtggctcagcctgagatagggatgttgcgcccgtaaagcaccgcggttcctgtggtgtctcgtgcgctccacacggcccttgaaaatgcgagggaagctatttgaatctcctgcctgatcgtaccgatatccgcagcaggtctccaaggtgaacagcctctagtcgatagaataatgtaggtaagggaagtcggcaaattagattcgtaacttcgggaaaagaattggctctaaaggtcgggtcagccgggctgttgcgtgaaacaggcggcttttgcccgtggctgcgtgctgttctttcggggatggtgcgtggactagtggtgagagctgcttgtggagcgcttcagctgcgtgtatgctcgtcagggtatgcacttcggttggcgctgaacgaccagtttagaactggcacgaactcggggaatccgactgtctaattaaaacagaggagacggatggtccttgtggacgttgaccgtgtctgatttct

SEQ ID NO: 44060 - DNA, 1078 bp, Heterodera glycines
ttttctttccccgcagctaaggcaatgggttgagctgtcgtcggatgagcaggtgccgccctcactgttgttgttgacccgtgccatgtacttccctgaggacgtggacttcactgctcgcattcgttccattgttcgcacgctgcccaaggaaattggtgacttcaaagcgatcactctcaaagagttggagggcggctctgacccgcaggtaaaaaacaaaacaaaaaaaaacatatcatataacataaacccaaaaattggccccaagtgacgagagatccgtagactgttttttttttttttttgctttttacccctcaaaattttttctaatataaattttctaaattagaggctctatgggtggaaataccttacatttttgcagattttaatatggctaatttgtgcatttttgggtcacattttaaataatgtttaaacataaaaaaagcgccgaaaacccatcaataccacgaaacaggcaaaacacagccgccgaaacacagccgagacataacacagccgggaataaatttaaaaaaaaaattttaaacaaatttttcaagaatttttcagcgattttttttgaaaattcttagtaaattttgaaaaaatcgcctgaaatttaaaaaaaaaatttttttcttatagaattttcaaagaaaaacttttctaagattttttttcttgaaaaatttctgtttgaaaattttttaaaaaatttattttcgatcttaaaattttgaaaatcctcatttcagccataaaaaatcctcatttggcatgaaaaatcctcatttttaaaacctcataaaattgctaacaaaatcagttaactgtcgtatttttcgtttgaaaccatcacggcgcctatcagcgccgccggaccccaataattcctagtttttcttaaaaaattagcccaaaataacaaaattggtaatttttggtaaaaatctataaactaatcttatttaaaaaccctcaaaaaaaaaattttaaaaaaaatcaatttaaatttctttttaaaaaaattggacaaatctctcttaattttttttgtttttttaaa

SEQ ID NO: 44061 - DNA, 1048 bp, Heterodera glycines
aaaatagttcttgacaaaaaatggctatctctgaaagtcactattaaatccctaccgggaattggacaccaacttttgtcttctgttgtagcgctgaataaagctataatagtgtgtttgaaaacgcacgaaaaatagttcttgacaaaaaatggctatctctgaaagtcactattaaatccctaccgggaattggacaccaacttttgtcttctgttgtagcggtgaataaagcactaatagtgtgtttgaaaacgcacgaaaaatagttattgacaaaaaatggctatctctgaaagtcactattaaatccctaccgggaattggacacaacttttgtcttctgttgtagcggtgaataaagcactaatagtgtgtttgaaaacgcacgaaaaatagttattgacaaaaaatggctatctctgaaagtcactattaaatccctaccgggaattggacaccaacttttgtcttctgttgtagcgctgaataaaacactaatagtgtgtttgaaaacgcacgaaaaatagttcttgacaaaaaatggctatctctgaaagtcactattaaatccctaccgggaattggacaccaacttttgtcttctattgtagcggtgaataaagcactaatagtgtgtttgaaaacgcacgaaaaatagttattgacaaaaaatggctatctctgaaagtcactattaaatccctaccgggaattggacaccaacttttgtcttctgttgtagcgctgaataaagcactaatagtgtgtttgaaaacgcacgaaaaatagttattgactaaaaatggctatctctgaaagtcactattaaatccctaccgggaattggacaccaacttttgtcttctattgtagcggtgaataaagcactaatagtgtgtttgaaaacgcacgaaaaatagttattgacaaaaaatggctatctctgaaagtcactattaaatccctaccggggattggacaccacttttgtcttctgttgtagcgctgaataagcactaatagtgtggtttgaaacgcacgaaaa

SEQ ID NO: 44062 - DNA, 1025 bp, Heterodera glycines
  unsure (1)..(1025): unsure at all n locations
aaacaaaaaaaatcggattttttcaagtgtccgttttggggtactcaaacanttatggggagcaaaaatccaacgcagaattaaagtacaggctatagggaagctattncggaaggattcggtctcnccataaatctgggcgcatcggattcggggggactgccccgaaaacaaaaaaaatcgattttttcaagtgtccatttggggtactcaaacatttatggggagcaaaaatccaacgcagaattaaagtacaggctatagggaagctactccggaaggattcggtctccccataaatctgggcgcatcggctcggggggactgccccgaaaacaaaaaaatcgattttttcaagtgtccgtttggggtactcaaacaattatggggagcaaaaatccaacgcagaattaaagtacaggctatagggaagctattcccgaaggattcggtctccccataaatctgggcgcatcggttcgggggactgccccgaaaacaaaaaaatcgattttttcaagtgtccgtttggggtactcaaacaattatggggagcaaaaatccaacgcagaattaaagtacaggctatagggaagctattcccgaaggattcggtctccccataaatctgggcgcatcggttcggggggactgccccgaaaacaaaaataaatcgattttttcaagtgtccgtttggggtactcaaacaattatggggagcaaaaatccaacgcagaattaaagtacaggctatagtgaagctattccggaaggattcggtctccccataaatctgggcgcatcggttcagggggactgccccgaaaacccaaaaaaaaattttttggataaaaattatttaaatgaactgactagataatatttaaaataggttatttctcttcctttcagtatccctgcaaagtttggtgcgcttctgatcagtttctgaaaaaaaagttaagcctaaactttttggcctatggaaaaaggaattaaaaatttttaaaaattttattcatct

SEQ ID NO: 44063 - DNA, 1105 bp, Heterodera glycines
cgccattatttggccaattccatcactcattctgctgttgctgctggccttctccaatgggtgaacaacagcctaggaccaactttgccgattggcttctcaaatggacccatcgcgtgccgcactttgacttccgcttcaaccgcttgcgccaggaaacgccgttcgacgtggacccgaacggagaatatgcgcaagtccgatcaaatttccgatttttgatcattgaactagggagttttgatggaaattttggtttccccatctgatggctaatgacgaggagttattaataattacataattgccattcccaactagggtaattagtaattaattaacctctacgatggcttaattttttttaaggcttacaataaaaaatttttcaaaatttaaaagaaactaatgacatttttttgtcaaaaagcccattttggcaaaagtcattcaaccgccactttttatacctcatccaactttgaaaatgaatgaatcccttttgacaccaactaaagtcgtccgcgtccccgtggggcaaaagcggctttttctttttactgtttccgccctcgaagcgggccgccgcccgctttcccagcaattaatcttgccgacggcgccaacgtggcggcggtggatttttggatataacctcgaccctgggggaggggatgtgaaaccgtttgactttggctttgacttccagctgagggagggcaaatggggggccattagccaatccccccaaatagcaaatagttatatacacaattcacatctgtgttgggttggcgttgtgctgttgttgtgtttttggtcgttagtcgccagcagcaatttaaaaatgtcgcccgtcccccgtgcccccaggggctaacataaataaattattgtcacatttttggagacactttttttggggggaaatgggaggcaaaataatgtgtacaatgaaaaattggagggagagaacgacaatgaaaacttagaagaaaatgaagaaaattaaatggaaaaatggatgggaaactatttggctttttaaattaaattcaaaaatggatgatgttaattaatttttaatttaaatttttcaattttt

SEQ ID NO: 44064 - DNA, 881 bp, Heterodera glycines
aaaatggtaaaatcatagtttcaaaattaaataaataaggaaatggttttataaaaaaatataattaaaaattgaatgtgttaataattttttaaaaattataaaataaattccttcttttatttaaaaataaataagaaattaattttatattaaaacatttatttataaaaaaaatttaattcaaataaaaaaatgtaatttattattaataaaataaaaaatattttaaatgaataaaacaatgaaaacacgaaaaaaatggtagttattaatcaaaaacaacgttggaaattattaattgaatattcatttaatttaaaattaaattaatttttttacaaattcaaaaaataaataatgaaattctttaattaaaaaaataaataaatttaaataatttataaaaaatatttggaattaataaaacatgtaaaagtaatcaaaaaatgcacagaaaaataatgtacaccgatcggattcgaacttcccccccccaaaaaatgatgcctcagaatccccaatcacacagggattctgagggcttaacgatgtcaaaagtaaaatctgatcacgtattcgtgatcagcggcccaaataacccctaatgacatgtttttggatgattttgggtgaaaaaatttttccactcaaaaatactggtcacccacccccctttggtcccgaatccaaaaatcagttttatttttataataattcttaaaaaagtgataaaaatatgaattaaaatttatttaatagagcaaaaaattgcggatttttgtagtattttacttttccctaatgacttttcagaaccgaggtataaatttttttctgaaaaatcgaaaatttgcagaaattctggaaaaacttttttt

SEQ ID NO: 44065 - DNA, 1357 bp, Heterodera glycines
agacggagggctgtgcacaatcgccattttatttcacataggatttttatatttagaggttatcccagaaaaatggctatctctttttttgataaattttatacacatacaaatgctctcgagcatgatagggagggcggtgcgcaatagaccttttatttttgagggaatttttaaatttatactctatcccagaaaaatggctatctctttttttgataaattttatacacatacaaatgctctcgagcatgagacggagggctgtgcacaatcgccattttatttcacagaggatttttatatttagaggttatcccagaaaaatggctatctctttttttgagaaattttatacacatacaaatgctctcgagcatgatagggagggcggtgcgcaatagaccttttatttttgagggaatttttaaatttatactctatcccagaaaaatggctatctctttttttgataaattttatacacatacaaatgctctcgagcatgatagggagagcggtgcgcaatcgaccttttatttttgagggaatttttaaatttatactctatcccaaaaaaatggctatctctttttttgagaaattttatacacatacaaatgctctcgagcatgatagggagggcggtgcgcaatagaccttttatttttgagagaatttttaaatttatactctatcccagaaaaatggctatctctttttttgataaattttatacacatacaaatgctctcgagcatgatagggagagcggtgcgcaatcgaccttttatttttgagggaatttttaaatttatactctatcccagaaaaatggctatctctttttttgagaaattttatacctcacaaaagcgcttgagtatgagagggagggctgtgcacatccgacattttatttcacagaggatttttataattagaggttatcccccccccccccccgcccttcagagcacgacaaatatttcaacaaaaatttttaaaaattgactagagcaatcgaacgctaacggacgacctaatggaaaaaaatccccgaaggagagaatttaattaaatccattccttcgggggaccgtgccgggtgccgcggggtaagcagtgctggttcgtttcatcacggcaccgaaccttttggctagtcagcaatcgttgcttaacttgccagatcggacgggtgcgcatgattccactgttccaagcaccccaccaaaagcaaaacgatataaccaaaatataaggaaaaatttttttaaaaattttttctccatcttcctttttgatactaaagcatcagagtgctaaaattaagttgtaaataaaatttggtgcg

SEQ ID NO: 44066 - DNA, 1447 bp, Heterodera glycines
aaaattgaccatcattgctttggtaattaattaaattacctcccctttttcctctcccctcccatttcccccctttttccatccaaccgatttttgttttatcatttgtccaatctctcctccccttcccctcgccctcttatcgtcgtcctccaatcggacaaccggtggccaatgaaagaatgatcagaatatgaaaagagaagagaatagtccaattctgttgttctcagcagatcattcattcatttacagcacatcctttgggtggtacaaagtcaaattaacaaataaaagtgataatctcctttttttttcttatcttttgcccatttgtcccgtcccattttttgtccgccctttttgccatttgtccgtcccttttgtccgtccctattccccctctccttgtggcccctttttggcacttttttcaacttatcatttccctttttgcactttcagctttttcattcgttttgctaatgggtcctgctgctttgctgcttctcctcccctccctccttctgctttttctgctcatccgtgctcttcttgagcttatccccgtctcgcggttggataagcgttctgtgctaatcaccggctgcgattcgggctttggcttcgacttggcactgcgatgtttgggtgccgggatgcgcgtttttgccggctgtttgactcagacagtgcgccaattttgcataaaattttaaaaaaattatttcaaatgaatttttggcaacaattttcagggaattcagtctctaaagaaaagtgcccaagaaaagggaattgccgtggaacttttggaaccaattgaattggacgtcacaagtgacgaatctgtggcaaaggcattggaattcgtggaacgaaaattaggaccgggaaaaggtaaccaaaaatggagaaaagcatttgaatgtttcgaaagggcttcacgctttggtcaacaacgcgggaatcagtggcaacgaggcaaatgccgaagtcggaagtgaattttgcataatttgttcaatttcagagttgggacgattggctgattccaaaggactacgaagatgttttccagggtatggtcagacaaaacccagtgaatgaaatctctgcttttaccaaatgccatttcagtgaacactctcggcacaattcgcgtcactcacgcattcaaacgactcgtaaaggtcaattcgaataattatggctaattaggggaccattacgactctcgaaaaaaattaagctctttggttaagaaatccctccctatctgattaaagagatttctaatcaaattcttttggtttggttgaagcgcgagagggagtcccgaattgtgattatggccagctcctgcggccgcgtggcactgccaacgctcggcccttacagtgtgagtgaaaaccaatgcttccgactgttgacctccccccccttg

SEQ ID NO: 44067 - DNA, 1113 bp, Heterodera glycines
  unsure (1)..(1113): unsure at all n locations
aaagcatttaacgtatttaacgaccgacactgttgagcccttcaatactactgtatttgatactgtatttcgcgaactccgaatctgtgtcttgaccgtaatttgaatttcctttaaagttccactggcatttcactaattggccaacagccgtccggtccgagttacgcaaccagcgaaagttcgtcgtcctcttcggcgtcgtctattgatgaaagcggtgaagagccaccaaaaaagcgaccaaaaagcgacaaaaaacaaaaaaccattgcgactgacgcagctgatgatgaaaaagcgcttccatcaaaaacagaaagtaatttctgctttcacaattgctgaaggaatttactaagaaattagcaaatgaaaatattttatttttattttttcgtattgatgaacagtgccaaaatcttatacggaaatggaaatttgcgcgaaaaattatagtgactccaatcccgcggcatttgcaaatggtcatgagagatcccgccattggatctcgatgaaaaattgcaaaaaaataaaaataaaatttccccgaaatttgacggccggaaattttgcctctgaccttttctctgtcatatatttttctcatttcaaattttttttaaataagcccaacttttaaggctcaagttttgatggtggcaccagtggcagtgaagctggcggcggcactttacaaagtcatgcggcggcaaccgccacaaaattatcgccaccgccgtcgccacgcgacagcggcggcggcagcggcggcgacagtgggacgacgactacgacagtcgacgggggcggcggcggcggtctgtggcgaccctttcatgcctgctaatgaaggtcgtccgtcggtcgccaacaaattagtgtctgtcgtcgtcgccggcggccggtcgcgcccctgggggcacaaacagcagcaacaacaaacaaacagttgccgccgcccgtcgtcggtgcgcttgtcgtcatccaatcgccggcggcgataaatcagcgcaaccgacgaaaagagacgacggacaagcaaagcgatttgacaaatggtngtgatatgtgtacaataggggagatgacatttgatcatgtgacagc

SEQ ID NO: 44068 - DNA, 1173 bp, Heterodera glycines
  unsure (1)..(1173): unsure at all n locations
agtcaaatattcgaagtaggcatttaatcgaacggcttagagttaaaacccaatcatttatatcgcattgattttatcatcagattctaaaataaattggtgacgcgtcgtggtagtcggttattacggcaacaaaattttaaaatcgaattagtacgaaaaggagaaaattaatttgtaaatattgcaataaaattatcaatcaaatggcaaaagggagtcggttttgaattctttgctaatgaatatttttataaaaagatatttttaggatgtttggacattgaagcgactcagtaattttctgaggattttccgtcataaatacatgctctttgggaaccttacaatattcttttcttagaaatcctttgcctataacagtcaaatattcgaagtaggcatttaatcgaacggcttagagttaaaacccaatcatttatatcgcattgattttatcatcagattctaaaataaattggtgacgcgtcgtggtagtcggttattacggcaacaaaattttaaaattcgaattagtacgaaaaggagaaaattaatttgtaaatattgcaataaaattatcaatcaaatggcaaaaggaagtcggttttgaattctttgctaatgaatatttttatgaaaagatatttttaggatgtttggacattgaagcgactcagtaattttctgaggattttccgtcataaatacatgctctttgggaaccgtacaatattcttttcttagaaatcctttgcctataacagtcaaatattcgaagtaggcatttaatccaacggcttagagttaaaacccaatcatttatatcgcattgattttatcatcagattctaaaataaattggtgacgcgtcgtggtagtcggttattacggcaacaaaattttaaaattcgaattagtacgaaaaggagaaaattaatttgtaaatattgcaataaaattatcaatcaaatggcaaaagggagtcggttttgaattctttgctaatgaatatttttataaaaagatatttttaggatgtttggacattgaagcgactcagtaattttctgaggattttcgtcataatacatgctctttgngaacctacaatattctttcttagaaaatctttgncctatacagtcaaatattcgaagtaggcatttaatc

SEQ ID NO: 44069 - DNA, 1606 bp, Heterodera glycines
ctgtcgagtttttgtttttcaacttcgagcttttccccattttatctctcccccactccgttcagctgaccaccctttcctattcggtcacaaacagtgccaaaagagtgtttgtcattgccttttcgctgctcactctgcgcaacccggtgactcccctcaacgtttgcggaatgtttttctccgtcttcggcgtcttctgctacaacagagtgggcgaaaaaaacaacattttttcggggggatttttctttcaataaaaatctgacccatccgttcgggataactctggaatttggacgaacaaatagccgaaaataatttaaataaccgatgggagggctaccacatacagaaagccaagcctttttggcactcacaaataaataaattttggcctggttttatttcaaaaaggccaatattccttcgacgatccgtggccattcattttattcagatgaaaatgaagggcaaattcgacaactcccgccgtttcccaacacccccgcccaattctgaggacaaacagcaaaagccctttctgcgccacgacgcctcgccgaccatcgaccaacaatttcatacttcgaacagtgaagtgcgacttttactggcaaatgagtaaaacggagtagaactgctctttaatcagaatgttcacttaccttattattggttctatttttcttcgcattttatgtctaaatctttcaatgattatatagtattttcttatactcatttttgtgcgtgtgatacattcctaaatttctgtgatacaaaatctcttgttgcagcctttaatatttaacgattttctctgattgccaaaaagcccttaaacaaaattgtaacgtttaatttattcgtatttattttaataatataaaataaacatatggggtggatatctctgatacactcacatcttggaatggaatttaatatatggaaaagatggaaagaaatgatcggtttgcataagtgaaattcgagataaaatggggaagcaattctttaagtattctaatcggaaatagtaattgggcaccagcagataaagtatgaggagacaaatgatttctgggacaatatcgctgcaaaaaaataattatttaaaatagtttcaaaggcactttttgtctgggcacaacagaaatgagtaaatagaggcaaattttgtaggattttgatgtagaataaacaaattcctcacaaaatcatgcccttttcggttttgtgcatataccacaaatttaaaaaaatgtcaataaagggcggcctgaaggcatttagtgcatgccactactttaaggcataagtgcattaatccgaagcaaaatttcttcaaaaggtccacattgcgtcttttacattgaatcggcttaagcgcgtcctttgctgacatttttgaaaattgtggagtatgcacaaaccgttaagtacccatcaatgaaagtgccggctgctgtcccatctgctgccgtagtgttgtggtttttgacccgtgcaattagaaggcttcacgtccgtctcggccgagtgggcccatcctccactgaattggcccttcgtcgccgcgagcggttgctggtaataacaa

SEQ ID NO: 44070 - DNA, 1022 bp, Heterodera glycines
  unsure (1)..(1022): unsure at all n locations
tttctgctcaacagtatagggaattccanccgcattctcagaatactacgccgatactcattgttctggaatttgtttctcggcgcgttgtttgggaaaaatttggaaaattggctatctctttttctgctcaacagtaataggaattccaaccgcattctcagaataattacgccgatactaattgttctggaatttgtttctcggcgcgtttgtttgggaaaaatttggaaaattggctatctctttttctgctcaacagtaataggaattccaaccgcattctcagaataattacgccgatactaattgttctggaatttgtttctcggcgcgtttgtttgggaaaaatttggaaaattggctatctctttttctgctcaacagtaataggaattccaaccgcattctcagaataattacgccgatactaattgttctggaatttgcttctcggcgcgtttgtttgggaaaaatttggaaaattggctatctctttttctgctcaacagtaataggaattccaaccgcattctcagaataattacgccgatactaattgttctggaatttgtttctcggcgcgtttgtttgggaaaaatttggaaaattggctatctctttttctgctcaacagtaataggaattccaaccgcattctcagaataattacgccgatactaattgttctggaatttgtttctcggcgcgtttgtttgggaaaaatttggaaaattggctatctctttttctgctcaacagtaatagggattacaaccgcattctcagaataattacgccgatactaattgttctggaatttgtttctcggcgcgtttgtttgggaaaaatttggaaaattggctatctctttttctgctcaacagtaataggaattacaaccgcattctcagaataattacgccgatactaattgttctggaatttgtttctcggcgcgtttgtttgggaaaaatttggaaaatgggctatctctttttctgctcaacagtaataggaat

SEQ ID NO: 44071 - DNA, 875 bp, Heterodera glycines
ctatgccagagaaatggttatctctcttttgcgagagattttgtaccatacaaatgttctcagcatgggcagaggggcgcggagagcaatggccattctattctacagggaatttttaaatttattctctatgccagaaaaatggttatctcttttttgcgagaaattttgtaccatacaaatgttcccagcatgggcagaggggcgcgagagcaatggccattctattctacagggaatttttaaatttattctctatgccagaaaaatggttatctcttttttgcgagaaattttgtaccatacaaatgttcccagcatgggcagaggggcgcggagagcaatggccattctattctacagggaatttttaaatttattctctatgccagaaaaatggttatctcttttttgcgagaaattttgtaccatacaaatgttcccagcatgggcagaggggcgcggagagcaatggccattctattctacagggaatttttaaatttattctctatgccagaaaaatggttatctcttttttgcgagaaattttgtaccatacaaatgttcccagcatgggcagaggggcgcagagcaatggccattctattctacagggaatttttaaatttattctctatgccagaaaaatggttatctcttttttgcgagaaattttgtaccatacaaatgttcccagcatgggcagaggggcgcggagagcaatggccattctattctacagggaatttttaaatttattctctatgccagaaaaatggttatctcttttttgcgagaaattttgtaccatacaaatgttcccagcatgggcagaggggcgcagagcaatggccattctattctacagggaa

SEQ ID NO: 44072 - DNA, 159 bp, Heterodera glycines
ccaatggggggtggattatcagtagaattatgaccaattggggtggatgatcagtataattataaccaatgggggtggatgatcagtagaattatggccaattggggtggatgatcagtagaattatggccaatgggggtggatgatcagtagaattat

SEQ ID NO: 44073 - DNA, 861 bp, Heterodera glycines
ttgagtcccagtgattgaatgctggagggttgagtcccagtgattgaaatgctggagagttgagtcccgttgattggaatgttggtgggttgagtcccagtgattgaatgctggagagttgagtcccgttgattggaatgttggtgggttgagtcccagtgattgaatgctggagagttgactcccagtgattgaatgctggagagttgagtcccagtgattgaatgctggagggttgagtcccgttgattggaatgttggtgggttgagtcccagtgattgaatgctggagagttgagtcccgttgattggaatgttggtgggttgagtcccagtgattgaatgctggagagttgagtcccagtgattgaaatgctggagagttgagtcccagtgattgaaatgttggtgggttgagtcccgttgattggaatgttggtgggttgagtcccagtgattgaatgctggagagttgagtcccagtgattggaatgttggagagttgagtcccagtgattgaatgctggagagttgagtcccgttgattggaatgttggtgggttgagtcccagtgattgaatgctggagagttgagtcccagtgattgaatgctggagagttgagtcccagtgattgaatgctggagagttgagtcccgttgattggaatgctggtgggttgagtcccagtgattgaatgctggagagttgagtcccagtgattgaatgctggagagttgagtcccagtgattgaaatgctggagagttgagtcccgttgattggaatgttggtgggttgagtccctttgattggaatgttggtgggttgagtccccagtgattgaaatgctggagagttga

SEQ ID NO: 44074 - DNA, 975 bp, Heterodera glycines
  unsure (1)..(975): unsure at all n locations
ttttcgataaatctagaattttgtaatatttactgctagaaccaaaattgctgccaaatcccatcgaatccctgtcttttttctcccaaaacagctcgtttcgaaatctaccggcttttggttgttagggcagcactgaaactgaaagttgtcagtacagcacgcactggttgagacaaatccttgtttggacacgcatgcgtactcttcgcagctctcacaaactcgccggatttcttctttgtcgttgcacttcgttttgtccgtgatttgttttggtgccatctttaggaaattgtcacttttcagagagagacgtgagggagaggaaagtcaatcccaccctcagcgattaaattttaaaaatatttgcggaaaattggccaagattataattagggcaaatatttttaagttttagcctatttctttcctgagctccggcttaaaacgcacgtaaaacaattttttgaggggagaattgaaggtacttttcgatttattagagcctatttctaggtttttatttttggagcctaaaagcctaaaaaattttgaaataaaatctatatttgcgtttttccctaaattattaacaaaaaatgcaatcaaaacgaaaaatacaccccaaagaaatgaaaaattactcaaaaatttcttttcaaattttatttatttatagacaggaattttaaatttaaaaaattatttatctcaatattaattttgtttaattttgttactttttaaaatatatttgccattttacaccccataatatatttaagaatttttagtgcctattttggcagtttttagagcctaaaaatatttcccctattcataatcgaggatgtctttgaaactccgatttcttcagttacttattanaagcttatggccactattattttttaagatattttcatttttaataattaatgccgaatattttactgtcgtttgaaaggggct

SEQ ID NO: 44075 - DNA, 1376 bp, Heterodera glycines
  unsure (1)..(1376): unsure at all n locations
ggctccaattatttttattttctactaccacttttcgtagtggatcaatttatagatcagggaatttcactgcatgaatgcaaaagtatttattnntattaaaatntgctgcttattttccgtaagaaactttttgggaggaatttcacaaccttgccataggaaaaactcatatctgtctcgtataaaacataactcgaacagtaggtatatttgttgtgcaattttatagtccagccttcgttcgctagggatctcaccgcggtgtattttaggttgtctttgatgtatcaaaatttctctcggccgtgttgttgactgaaaaataaaacgaacttaaattattgcaatattgtttatacgaagtcttttgatattattctgacgacttccatgataataaatacttatacaaagtttatctttttatatatttcctcatcccaaacatggatggaaaataggcaataaatcgacaaatatttaaaagttttgccatgctatttaactttcgggactcaatttatgacgaaaatatgggctccaattattttttattttctactaacacttttctagtggatcaatttatagattcaggaaattcattgcatgaattgaaaagtatttatttttattaaaatttgctgcttattttccgtaagaaagtttttgggaggaatttcacaaccttgccataggaaaaactcatatctgactcgtataaaacataactcgaacagtaggtatatttgttgtgcaattttatagtccagccatcgctagggctctcaccgcggtgtattttaggtgtgtctttgatgtatcaaaatttctctcggccgtgttgttgactgaaaaataaaacgaacttaaattattgcaatattgtttatacgaagtcttttgatattcttctgacgacttccatgataataaatacttatacaaagtttatctttttatatatttccgcatcccaaacatggatggaaaataggcaataaatcgacaaatattttcaagttttgccattctatttatctttcgggactcaatttatgacgaaaatatgggctccaattattttttattttctactaacacttttctagtggatcaatttatatattcaggaaattcattgcatgaattgaaaagtatttatttttattaaaatttgctgcttattttccgtaagaaagtttttgggaggaatttcacaaccttgccataggaaaaactcatatctgactcgtataaaacataactcgaacagtaggtaatatttgttgtgcaattttatagtcccagcatcgctaggcttctcaccgcggtgaanttttagggtgtgtctttgatgtatcaaaatttct

SEQ ID NO: 44076 - DNA, 1193 bp, Heterodera glycines
atgcatttaatcagtcaattactgtcttaattggtaacattcttattgtctaaaaagaggtaaatattttcaaaaacctataaaaaagtgattctaattagcctgcaaaacgttcatttttaaattgaattgattaaacttaaaaataatttcatgaataactaaaggtcaatttaaaatgcagttattttttaattaattttattttttattttaattacccgatcattaggctctaagcattggaaatgtggcattgtgcggcacaagtcaatcactgacacaatttcaaacaacaacaaattatatttgccactaaagttgccatgcttggcaacatgcatataaatttgatgaggagaaggatgcggaccgacagctttctgctgatggaatatcataaattgattttaaaaaaatttgtttaatttgtaaatctattaaatatataattagattttttgccacttttaaaaaaatttgacaaattttttcgtttttataattttaaacaaaaatatcaaactgtttgcatttaaatgaacatataaataatatgccggaaaaaattaatgtttcgactaaaaacgcaattaagagtatttatcattagcaattacgcataattttcaaaaatttctccgacaaccaaaatcaaattgataattttttcaaaatttaatcaaattcatcaaaaaatcagacatttttgtataaatctgttagtagatccagactaaatttacaaagttttcgaaaataagaatttttgagccaaaaaaaaactgaaaaaatatgtatgtggaaaaatataatataaagggtggaattttgtaatatatatgaatacgccctcggctaatcgtatctataacggcgtgattttatataatttaattgtaccgtatatttatccggattggctacaatactctccgcattcttcaaaaagtcatttaatgttgaaaattgttcaaaaaatccgtcataaaattcacgccgaatgctaatgaatgcgcgaatttgttgctcaaccgaatgcattgaacgaattgattgacgaatcgccaaacttttgtcatataattttgaagcaattactattggtggccaagcaaatggttggtgctcttaaaaaatgcattattatttcaatattttttgaaaattaattatttattttttaaattaaa

SEQ ID NO: 44077 - DNA, 876 bp, Heterodera glycines
  unsure (1)..(876): unsure at all n locations
aaaaaatgccaacgcttgttgttttttaaaatttttcgaaattctgaacttttcannttaattatttaattattttgcaaaatttaattcataaatatttttttagaacgtgctctgaaacgcccaaatgttaattaaaagttaaataaggctcttgatgcttttttatcaaaagggagagaataaattttaaaaatttttaattccttttaacaggccaaaaagtttaggcttatattttaaaaagtttcatcgacctagcgcactaaaatcgatataatctctccaaattttgcaggccttctccattgtaaaggactaacttacctgaaaaaatgccaacgcttgttgtttttaaaatttttcgaaattctgactttttcattaattatttattattttgcaaaattaattcataaatattttttcagaacgtgctctgaaacgcacaaaactgttatttaaaagttaaataaggctctctgatgctttcactatcaaaaagggagatgaataaatattttaaaaatttataattcctttttaaacaggccaaaaagtttaggcttatattttaaaaagtttcatcgaacctagcgcactaaaatcgataaaatctctccaaatgttgcaggccttctccattgtaaaggactaacttaacttgaaaaaatgccaacgcttgttgcttttaaaatttttcgaaattctgactttttcattaattatttattttttgcaaaattaattcataagtattttttcagaaagtgctctgaaacacacaaaactttatttacaggttaattaaggctctctgatgctttttctatcaaaagggagatgaataaatattttaaaaatttttaattcctt

SEQ ID NO: 44078 - DNA, 1177 bp, Heterodera glycines
cagaaccctttctgaaaaaatatttatgaattaattttgcaaaaaataaataaaaacgaaagactcagattttcgaaaattttttttgagccagctagctcggcgctcatttcagtgtaagttagtcctttaccggggagtatccctgcatagtttggtacgcttctgctcaattagcaaaaaatatgagtgatcgaattttcactaaaaaagttaagcctacattttttggcatatttaaaaagcaattaaaaaattttaaaatttaataattttcctgcaccgaaggtactcactcggcctcttcgcggcctcgtggtgggccttcgcccccccccctcccacgcccttcagagcacgacaaatatttcaacaaaaattttgaaatcatgtttcccactcccttctcccaggggtattattttgtaaagtctttttttccccaataaacttgtcaaaccccatttttcgcaccgtgaatgttatttttattgaattctgaaccgttttgagtagattagactataaaaaattgaaaattttgaaatcatgtttcccactcccttctcccaggggtattattttgtaaagtctttttttcaaaataaacttttcaaaccccttttttcgcaccgtgaatgttatttttattgaattctgaaccggtttgagtagattagactagaaaaaattgaaaattttgaaatcatgtttcccactcccttctcccaggggtattattttgtaaagtctttttttccccaataaacttgtcaaaccccatttttcgcaccgtgaatgttatttttattgaattctgaaccgttttgagtagattagactagaaaaaattgaaaattttgaaatcatgtttcccactcccttctcccaggggtattattttgtaaagtctttttttccccaataaacttttcaaaccccatttttcgcaccgtgaatgttatttttattgaattctgaaccgttttgagtagattagactagaaaaaattgaaaattttgaaatcatgtttcccactcccttctcccaggggtattattttgtaaagtctttttttccccaataaacttttcaaaccccatttttcgcaccgtgaatgttatttttatcgaattcagagccgttttgagtagattagactagaaaaaatgaaaa

SEQ ID NO: 44079 - DNA, 901 bp, Heterodera glycines
aagataaggggaattgagataagagagtggattagagcacggcacggattgatggggttcaagtcccaccgcgggttgatcttttactcttccgcacaaagaacaggacggacaaaaattaatttttttaggattttttgcattttttcgtgcttttttgacatatttttttgactttttattcaactttttggaaatttttcgtgacttaaattcccagcccagtcataagagactgattgaaatattatttcgattttttacaatgtcataaactgactgagatgaaaacacttaccagctaggaatacttcccaggtggttccaaacaatggtatccccccaggcgtttttggtgtttttgctttattcggatattgttgttgcagccattctttgttgcacgaaaacacgcaatttgactgtgaaggcattttatacggtttgcagcccgtgttcatcgtatggttggttccggatactgtcagattacggtaatatttccacgcataaaaaggatttcctccaccgcaccttaaagtgaaagaaatacggtggactatttctaaaaaggccactaggcaacgagagatttaaaatggtggaaaaacaattttaaaaatgatccttacgctttctcagcttttttgaaagttttcagtcaaacgaaagtgttgttttaataaaggaggcggttctaatagagttttttaatgccaaaatatgaaataccagtgttgccagatgtgctgatttatcagcatttacctacttttaaaagtgtcaaagctgattttctttgtaaagttttctttcatgaaaataattattttagtggaaaaattgttaaaaccgaaaaaaatttcaaaaacttctcccggcgccgtctcactgtaaattc

SEQ ID NO: 44080 - DNA, 774 bp, Heterodera glycines
  unsure (1)..(774): unsure at all n locations
ggtccaaaataccaacaaaaaagtgaacgaaaaagacagtgattaaaggtcgtggagctcaaccattttccaaagttcaacaaaattcctttttacctgcagccgcactgttctttcattccaaagttccccgttaaaaagtccgtttatttcgtttccatcttttttggcgttaacataacatgacaattccacgtttccacagagaccgactgagtgccaccgaaatgttgcagttgcgaaaagtgatggagcacgtgtgggagaaaatcctttacccggcggagacggcgaccgacgactgcggtggaggcgcaagcgcagcgcattcgctggcaacgcaattaccggaaaacattgaagaacgtattgagttgttctgcaacgaacaggtggacttcccatgtacaaattgatgtgattgtaaatgctttcgtcgcttttcagaagttggactcggatatggaccttaggacggtcaaacatttgatttggaagcagggcggcgatttgcttattttttaccgtcccgttaaatgatttatttctattgtaaattgtccataaaattgttattttcaatacataataagtaaagatgaaaatttacatggcgcataaaattgcttatggtcgaacagatctgaaactattttctatttttaatccatcagcacgctttaacatccccttttatagatttaacacaaaatacaaactgngcaaaaaattcattccctttgctgggagggtaacaaaattatggaaatcact

SEQ ID NO: 44081 - DNA, 706 bp, Heterodera glycines
atcccccactttgtcatcggcaggcgatttgctttcgttcggcgttttttgagcggaagggggcgttttgaattcgattcgaccatgctcaagcactttgaccgtcgaggtggaatagagtggagaaataaaagcagcaggtgaagaagcaccggaagaagataatacggcgtaattattggattaacggggaaaaatcagcccaaaattcctttatcccccggcactttttagcggggttcgaacaccgccggcgccgctttgttgggtcggctgttgcggagttagcatccaattcggctcctcctcctcttcacctccttcgttatatgccgtcgatgttccctctgtttcgcatcttttgagcattttccagcgaaagtgaggcgaaacgctcctgacaaatgagtggtgatggatggcattgtaaatttatgccaaaaatgaattaactcacggtgaaacgatagatgatgcagcggaggagcatgctgccgactgtgaagtgggcctcgtccgttttcgtccgattgcgtcaattacggtagcatttggtggagttacggtagtcagcgactgtactgctccctcttctccgtcgtttcgtgttggcaattgtatggcattgtgctcatcgtctggatcaccaattacagtaaaactgttcgtgtcaaaacaatcagcaacaatagaacattcgttgtcc

SEQ ID NO: 44082 - DNA, 1027 bp, Heterodera glycines
ttatcccataatcctccccccccccctctcccgcttcccttcaagaaattttactccctagcccacccccctcccccttcccttcccccaactctggtgcactccctatgatgagctccggaaagccagtcacacaaattcccttcccgtcatctctctcccatattggaatttcataagtccagtccagaccggactccgcaaatccggaccatgactcacacacacacacaaatcagagaaagtgtaagggctcagctgacaaagcccgaaaaatgtcagtcggtccgcccgtctctccaattttcccggccaaaattattttcccattcccccccccactcaccccttttacttcctcccactcctcctcccacaactcgtcccccaatcacaaaatttggtgtgttgggtggcgggggtggggctgggcgtgttgccgccgctgccgccgccgccgccgccgatgtataaatacgtgggcggaggcacggaaaagggatgaacactgactgagtcagtcattcattcagtcgtaattgggcggtaacggcgatgacagaaaagagccgtaggcctagctagagctccccccttttttcacgattttttaaaatttcatttttctgcaatttcttggctgactttttttgtttaaatttggatttctgaatttttaatgaatcggctgtcggaattaatgggaattcaagaatttcgggaataggcgctcaaaccctcccctcccccccccctaggcaggcattcggaattccgaggggcttcaaaaatttcgagaaaacggagtttgtatccatgtcctgtccctgacctacaacacgatgaaaacaatgtttttccgttaattagggggcctgtcctagaaaatataattttaatttttcaccggcattttgtttttgtctcttttttttgtttacagcaaaatttttctttctttctttttttctcatttgttttgattttgtgtaaactaacaaatgctgatgatatgtataaatgttgt

SEQ ID NO: 44083 - DNA, 1042 bp, Heterodera glycines
  unsure (1)..(1042): unsure at all n locations
gtatctgtataaantttgctcaagtaaattgtaaatcgcatattattagcgtttatcaactccatacttccgcaacacttatatagtttatttttagggggtaatgagctgaaattgtaagaattatacaagctggccaaaccaaaataataaatggaaaattattggcgtttatcgactcgatccttctgcgacgcctatacaatttatatttccatgataatgagctgaaattttgagaatttcaaagtgataatgaaatataaatagagaatctcacaatttcagctacttaatctctaaataaatactgcagcaatattgtagaaggatcgggttaataatattctctgatttattattttcacgaccatccttgtgaaattctcaaaatttcagctaattatcttctaaatataaactctaacagcgttgcggaaatattgagttgatagcgccaataatctccgacttattattttcacgaccatctttgtgaaattttcacattttcagctcattttcctccaaatgtatctgtataaatttgcttaagtaaattgtaaatcggagattattagcgtttatcaactccatacttccgcaacacttatacagtttattttgagggggtaatgagctgaaattgtaagaattatacaagctggccaaaccaaaataataaatggaaaattattggcgcttatcgactcgatccttctgcgacgcctatgcaatttatatttctagtatatggagctgaaattttgagaatttcaaagtgataatgaaatgtaaataaagaatctcacaatttcagctacttaatctctanataaatactgcagcaatattgtagaaggatcgggttaatgatattctctgatttattattttcacgaccatccttgtgaattctcaaaatttcagctaattatcatcaaatataaactctaacagcgttgcggaaatatttgagtgatagctccaataatctccgacttattattttcacgaccatctttgtgaaattttcacattt

SEQ ID NO: 44084 - DNA, 766 bp, Heterodera glycines
tcgccactgaacagaaggacagcgaaccccagcctggaggttagcaggccaacgtacagcaacaagcggcgggaatgcagaccagatacaccagttctgtccgtttccacctcatcgaatttcacgtcctctttaactctctctgcagagtgctttgcaactttccctcacggtacttgttcgctatcggactcgtggccgtatttagtcttagatgaagtttaccacctgatttgggctgcgatcccaaacaacccgactccaagacacgtaaagatggataggcaccgccagttggacaggtcttgcaccttctctggagccccggtcaagggaaacttgaacaagcgggccaacccaagctcacggtctatacgctacacctcgcaacccagaggagctgcgattcagcgctggactcttcccagttcactcgccgttactacgggaatcctcgttagtttcttttcctccgcttactgatatgcttaagttcagcgggtgttcacgtctgagttcaggtcgaaaaatcaaagcaggaatgccagtaatccaggcactccgccacagcatgcaaagcattggtgcgcccgagttacggtccgtaaaacgcgaattagaaccacaagttcgcgccagcacaccaaaaccccacagccgagctaagcaagtaacgtaagaacacgtacaagtacatgatcccacgaagcaacgcacaagcagtgcattttatggtaacgaccctgaaccaggcgtgccaatggat

SEQ ID NO: 44085 - DNA, 755 bp, Heterodera glycines
cgctacctaggctgtaaagcgattcaaattgattgaactggttggagattttttttgaatttttaaaaaattattataggtttttagtcaacatcgaggctcaagacgggcgcttcgcgcccgtttttaaatttgttggccttggacgggcgcatttttgaagccgataaacagaaacaatgccttgaggagaaaacaatattcaatcatttcactccataactttgagagttcgccacggatcgagacccgaataagaccattggaaagaacagctcgagatctaccagaagtcatggaaagaaaaaatagatatttctgggacttcttcacaaatcataattaactctccaatgtgttccagatttgaggcccccagccacaggccctcgcttctcccacgactaagtctagaatttgtcaaataaattcaagacttcaaaataataatccaacattctcttaaaacttttttgaacccaattcgaaaaaggaaaaaaattagcaccaaaaaaagtattcaaatttctccaattttgtgcccataaattccgacaagcattccggaacatagtgccaaaagaaaactaaatcgttttactctattcctttctggacttgacatgggtaccttgacatcgaagctgttgcctacgctatttctaaaacgtttataccaaaccccagatttttgaatacggctttcagaaacactgccttgtgcagaaaacaatatttcacatctcactccataa

SEQ ID NO: 44086 - DNA, 948 bp, Heterodera glycines
agaagaggtacataaatctagaaataagcatattgcagcgattgggaagaaagatttaagtgattaaatactgaatttttggggccatcaactcctttgtttttgccagagtttgtgtgccacaaataaaaaatgcgggaatagaggaagaagaaccaaacaaagatgaacgatgaaaaacactttcaggaggcgcttggtggttattggagcccagaaaaattgtagattcagaattttaatggtaataatagaagaggcacacaaatttagaaataagcatattgcagtgattgggaagaaagatttaagtgattaaatactgaatttttggggccatcaactcctttgtttttgccagagtttgtgtgccacaaataaaaaatgcgggaatagaggaagaagaaccaaacaaagatgaacgatgaaaaacactttcaggaggcgcttggtggttattggagcccagaaaaattgtagattcagaattttaatggtaataatagaagaggcacataaatctagaaataagcatattgcagtgattgggaagaaagatttaagtgattaattactgaatttttggggccatcaactcctttgtttttgccagagtttgtgtgccacaaataaaaaatgcgggaatagaggaagaagaaccaaacaaagatgaacgatgaaaaacagtttcaggaggcgcccggtggttggttattggagcccagaaaaattgtagattcagaattttaatggtaataatagaagaggtacataaatttagaaataagcatattgcagtgattgggaagacagatttaagtgattacatactgaatttttgcagccatcaactcctttgtttttgccagagtttgtgtgccacaaataaaaaatgcgggaatagaggaagacgaaacccaacaagatgaacgatgaaaaacactttca

SEQ ID NO: 44087 - DNA, 1506 bp, Heterodera glycines
ctccgcctgcaaatgccccattcgccactgaacagaaggacagcaaaccccagtctggaggctagcaggccaacgtacagcaacaaacgggtgaatgcagaccagatacgccagctctgtccgtttccacctcatcggtttcacgtcctctttaactctctcttcaaagtgctttgcaactttccctcacggtacttgttcgctatcggactcgtggccgtatttagtcttagatgaagtttaccacctgatttgggctgcgatcccaaacaacccgactccaagacacgtaaagatgggtaggcaccgccagttggacaggtcttgcaccttctctggagccccggtcaagggaaacttgaacaagcgggccaacccaagctcacggtctatacgctacacctcgcaaccccagaggagctgcgattcagcgctggactcttcccagttcactcgccgttactacgggaatcctcgttagtttcttttcctccgcttactgatatgcttaagttcagcgggtgttcacgtctgagttcaggtcgaaaaatcaaagcaggaatgccagtaatccaggcactccgccacagcatgcaaagcattggtgcgcttgagttacggtccgtaaaacgcgaattagaaccacaagttcgcgccagcacaccaaaaccccacagccgagctgagcaagtaacgtaagaacacgtacaagtacatgatcccacgaagcaacgcacaagcagtgcattttatggtaacgaccctgaaccaggcgtgccaatggatgtaactccaatggcgcaatgtgcattcgaatgttttgtgttcaaggtttctgcagggtcgccataattatcgcacatgtgtgtgtttttcagcggtactcgagaggagggagtgcccggatgagggtagaattcattgttcgacggaggtgtgaataataatcatgaaaatcaaagatatagctggcggttcccgatctgacactcattgagtggaaatccacgtgctagaccaagcacggtcagtatcctcgtcatctcatcacgccctcggacgtagcagcaagctcaaacacaccgctagttacggcacgtaagaccgggaacgaaaccaccatccccagtcagtgtgttatgtgcctgccacaacaaccgctcaacgacgcacagacgccagcacagccgttaggtcgccccacgagcgtgcatcccacattggcgcagcgaaccagccaagcgaggcggcccgccaccgacacattgccacgcagcagccatacacaggctttcacacgtgcagcactgagcggtataccacagctccaacgtatggaagcaccccaaaagcatggctcgtgaggcagctgccccgtaatgttgggcagcgtccacaagtcatctcgaacgacctgtgcccatcagcggacgggggcatttggtggtgccaacgctagcccatcaagggagcaggtaggtggtgaataggaatcacttgggtaat

SEQ ID NO: 44088 - DNA, 1790 bp, Heterodera glycines
  unsure (1)..(1790): unsure at all n locations
aaaaaatacataaaaaaagtaaattcaaaaaaaaaacncaaatcgatcggtttacgcnttgctctgngcacattcaattgaatctaatttatcataaatttcttcaaattgtgccaaactgtcagctccatacaatgcaacagcttcaggaatacgatcaacgcatttttcatttgcatgaagctaaagaacaattttaccatgaaatacctaaaacaaattggaaaatttatttttattttttagttatccgatttttagctatgaaattttgggaaaaaatgccaaaatatattccttaaaatttaagaagcagctaaaaacatattctttcgtatttttagacctcaaaagctcggaaagaagaggaaatcgcgcttaaaaatctattttttgttaataatataattatatttttttaccgcatttcccacacgaaaatgtgcgcccgcgtcaaacagtgtgacattggccaatttggccaaaatgcccgtgaaaacaatgtcgtccatgttgaagccgttcacctcatggacatgacgcataacagctgaaattgcttgtgccgacgccaaatatgtggcaccttgcatataagccggataccactcgtacggataggcactctttggcacgaacctaaattattttttttttacatttttatttattttttattataaaaaaaataatttaaaaaaacataagtataacttctatactttaatcttattttataatctcaagatcctcagtttcattatacaaaaaattattcgtttatttatttattttattttttttgttatttccgatatattaaatataattatttttataccgaaaatagctcaaaaccaaaataaaaaaatataaataataaaagagttaatattttttttttataatccatggtcatttctggtttattatttagaataattcttttaataaaaattttattagtaattttattaatggaattcaaacttttacaaaaattggaataaatttataaattttatttgtttatttttatccattttataaattaccatcggtgccctttgtctcggattggctttacgccggaaatgatccatccaaaatatgtggccacattttgttttaatgctggccgaaatttgtgctcaatccaacggtccaaccgtggcaaatgcacaattgtgtcatcatccgttttcatcaaaaattcggcatttttgcaaaaattttgttgccattccaaggcggcatgccactgaaacatgaacaaaataaattaattaatttaaaaataatcaattattaaaaaagtgattttttctatttattatttttaatttgtttataaatttagttttttcaataattttgcattatttattttttattttattaataaaatataaatattattgtgctttcattcatatcaaatttaaaaatcttattctaaaaataatttatttattacttttaaatgcaaattttgatagttgtcggtgatgccattcaaaaaaatcaaatcgccaaatttcttaaattcaagctccaatttaatttgttcatctcgggctttttgatttcttgcatcactttttggtgcatcaccaattaaaaaacgaatcaccgtgtcgtttaactaaaagttatataaataaatttaaatatttttttttataaaaattaataaatatatcttacggcatcgctggcccatgttttacgtatcgaattacgctgaaagaatgcatttcgcctggtcatcaccanaaatgagcaatttt

SEQ ID NO: 44089 - DNA, 1060 bp, Heterodera glycines
ccccgaaaacaaaaaatcgatttttttcaagtgtccgtttggggtactcaaacaattatggggagcaaaaatccaacgcagaattaaagtacaggctatagggaagctattcccgaaggattcggtctccccataaatctgggcgcatcggttcggggggactgccccgaaaacaaaaaaatcgattttttcaagtgtccgtttggggtactcaaacaattatggggagcaaaaatccaaagcagaattaaagtacaggctatagggaagctattcccgaaggattcggcctccccataaatctgggcgcatcggttcggggggactgccccgaaaacaaaaaaatcgattttttcaagtgtccgtttggggtactcaaacaattatggggagcaaaaatccaacgcagaattaaagtacaggctatagggaagctattcccgaaggattcggtctccccataaatctgggcgcatcggttcggggggactgccccgaaaacaaaaaaatcgattttttcaagtgtccgtttggggtactcaaacaattatggggagcaaaaatccaaagcagaattaaagtacaggctatagggaagctattcccgaaggattcggcctccccataaatctgggcgcatcggttcggggggactgccccgaaaacaaaaaaatcgattttttcaagtgtccgtttggggtactcaaacaattatggggagcaaaaatccaacgcaaaattaaagtacaggctatagggaagctattcccgaaggattcggtctccccataaatctgggcgcatcggttcggggggaatgccccgaaaacaaaaaatcgattttttcaagtgtccgtttggggtactcaaacaattatgaaaaatttttagatttttattcaagtacagttttgatagggaagcatctgagtgcctaaaataacttgtaaataaaatttggtgcgtttcagacgcagtttatgaaaaaatatttatgaattaattttgctaaaaaaataaaaaagagaagctttaaaaattaataaaaaattttaaattc

SEQ ID NO: 44090 - DNA, 198 bp, Heterodera glycines
tttatcgttatattataccagtgataaaacagtaaataatttaataaagacctaaatcagtaaaatgaacacaaaatacaacttattataaattaataatttttttataaagcgatcaatcaaataaaaatattttattgaaatatattccataataagataataaaagatattttctagatcattgagataaaccca

SEQ ID NO: 44091 - DNA, 966 bp, Heterodera glycines
  unsure (1)..(966): unsure at all n locations
ttattataattatttgaataattatttgttggttaaaatactttatttttaatttttaacnaaggttatttatatntgattcaaccattttttatttattttcaggattgtgctttccgnccacaaaatggtatattttttaaatttattcctttcaattaatatttttagcttcttttatattaatatttttaaatatgtgctttttatttaattttaagcgttcgaagaagtattgtattaatgttgcattaattattggaatgatttgttacataagaattattctattatagaaagtttaagtttaattattcgaaggttaatttatataataaataaacaagctttaaatatctcagaacttcaaaccgaattcctgcatttgttttgaattggtggcttttttggggttatacattttccttaaaattccaatcattttttaatgtaatttagattatcaattcttttttttgaacaatgggattattttcattaaatggcaaagtctcgcctgaactgcctaatttttgtccttttgtatgtgtttttttaatcattgtcttaatttgttcgtctttatattttagggttgtacgagaatcatttttattacataattttaactagaataactttttttgttttaaataatttgaataaaagttttcaatattgtttccgtatttttagtagtatttcataaaatgaatgttaaattttaatttatttaatattgaatgattcttttataccgagataagttttctgtttttctttgcacattggctctaaatgaatgccttaattgtcgaagattaatttttattaagttttgttaaaatttattgtaagagcggaaaaataatttgcttcttcttataaagatatgattgangtctttattcgtttagagttttgatccatttataaattnatataatctacaggtatattttatta

SEQ ID NO: 44092 - DNA, 1725 bp, Heterodera glycines
acgatggacggtgggtggtggaaaaatcgaaaatgatttattgatcggagaaagttgggattgtgaggggggcacaggggagggaggggacatgggaaggagacagggggtactgacctgactgactgactctctcattcactcactctcttcggtcggtggaggaggtttattggtcggtcggtcggtggtcggcggaaagaagaaaaatggaaagggggggggggggagaaatgaaagagaagtgtacataatgagagaagaaagcagcagcaagcatagccatagccaattgagaaaagtgaatgtgggagggaatgagtgaaaattgaggggagaaatgggaggaggcgaaaaatggtagaaaaacatttttttggagggggtcgatggacagaaagaaaaacagccacagaagagcagcaaagaggagggtgcgctttgctgctgatgatggttgggtggtggtgaagaattgaatcccccaaaaaaacatagggggggggggggggagaacgggtgggctgggaaaatggaatggagatggcttcttcgcccttttaacccttccttctctcgaacatattttcccgcgcttattcttatgtgcgtaagcaaaaaaaaaaaattcatggtgtttttccgtttttgtcaagtcttggacgatgtcgatgggcttttggtgctttgcacaaacaacaaacaaaaaaatgggagaaatttcatttttgtgagactttttttgaatttttttctcttttggcattttgtaattttgaattttttaggtctctttggcattgtgtgggcacgtgaatgtcaagaagtcttttaaagtgcaaaaagcatcaaaatatgccaaatttgattgagaaaagaagggtatcgccgtgccatggatctttctaagagatggcacacggcacaagcaaagaaaagtggttgaaaattgtgcaaagcattaaaaacagtcggatttttttaaatcggcgacaaaacgaaaaattccaacaaattttatggggagaaaaataaaatgaacaatacataattgtgctgttgtaacacatcataacagtcgcaatttaacagaaattcttgttcttcatcaaaacaacttgagtagccaaaaaaaacgaatggatgacgacgacacaacgaccgacggacgacactctctcatttgtgtggaacggggacgacgccgtgagggaaagaaagtgtagggggaggggacaaatgggagaggaaagagagagagggggggagagatagatagagagagagagaagagaaaagagagagagggggagagagatagagagtgagagaagagaaaagagagagtgagcgaggggggagagagagaaaaacacagtgagaaatgagggtggagagagagaagggggtggagcggacagtgggaaggagagagagatagaaaagagccagggagaggggggcgggggtttgctttgaactagctccaaaaaatctcataaaaaaaaaatattttctatgaatgatttcttaggtccacattcctttattcgtggatcgccctaattctatatattttgacataattcgcacagattttgactaaaaaatacccaaagttagggatctggggtaatttttaagaaaaaattcgttttttctttgagggggggcggcggcgttccgataggggtgaattctaaacttatttctaactagatactc

SEQ ID NO: 44093 - DNA, 1665 bp, Heterodera glycines
  unsure (1)..(1665): unsure at all n locations
aatccgctgggcgtcgatgcncnaaatgtggtcacggtcaaagatgtcatgcaccaccgtttgtctaaagcaaattgttcatcatatcggcatgtcaccgcccgtcgattgaccttcgacagcaccactccgtttggggtttgacggaagcattgtctcgaagacaatttgcaaaatccgaaatgattcaacgaaaagcaaaattaaccaaaaaggaattagtggacggagccaccggaatgcaaaaggcgcccgtcttcccactgcccgtctccgccgccttaaatacaccgattcaatcaaaacaaaaaagaaagaaacggacagacggaccatgcaaacgtcgccacccccgagaatggcggggatcgcttcggattgaatgtcagtaggcaagctgaaagctatgaaaattaagtcggaaaaagggagagacggacgtccattccaaatcattgagtgccgttgccaattcgggcaaaacgcccaactcatcaaaggcagtcatcacaagcacacactgcgacgcaactcaaacaaaatacctaaaacattttatataaagcatcgaaatttccaagcactgattaggttataaaatagtaagtggtggggaccgaaatttacgaggtcctccagccatgtaaataatcttttttgcttttcaattaattttttctagaaagttagttaatctctttattagttagtaaaataaggcatgtgaaaaaattaaaaaaatattctatttgtatttgagctctttctattgcatttttctctctccgcttccttcatcccaaattgtgttgcaatccttcgtcgatgttcacgtacaccgatttcacttgtgaatattcgtgtaaacattcaacacagttttcgcgtccgtgaccagaatttttgaagccgccgaatgggatgtgcaccttaaacgaccatcttacaacaaaacagtaaacccaatcgttcgcaaataattattcaaaattgttacctcagcatcattgtaagtgttgacaaaaacagtgccaactttcaattgagcagcaacgcgatgggctcgtgctaaattccttaaaaaattggaattaaaatgcaataaaaccaaaatttaaattttcattacttgtaaataaatatttttacttttattttttgttagcaaaagcttattcgtcgttttgcggtaaggcccaattaaactaaaagtaaaccaaagatttttttagtgatttgaccaacaagagaataaatcggataatattttaaaaaataagtggtaattaggacatcagggtgacgatttttaatttatgcctaaggaagggtacaatgaaaacattttaaataattatgcatctccaatccaaacaaaatctacataacttactattcataatagctaaaaatcaaacgatgtcctttaattgtttacgacctaatctcatcaatatttattattanacccctctcacgtggtgcataatcccgacgccaatccaaattgtgtggcatttgcacgtgcaatcgcttctttgtcagtnttgaaacgcaaaatcaacatcacagccccgaatatntcttctttcacaatttccatctcatcgtccaaatcggtgagcacagcgggctcgaaatagaaagcttttttcacgccggatg

SEQ ID NO: 44094 - DNA, 1339 bp, Heterodera glycines
ctcgattttgttgtcgctgttgttatacactaatattactgtattattattattattgcttcaaaaagataaattgatatggcgtaaccaagctaaaataagcacattactaagcaaccaagtcaaaaataccaaaaaaagaaataacataatttgaacaattttcaggattaaaatgaatttttcgaaattttggtttgaattcgggtttggggttcgaaatatttttaattttgaaaacaaaaaaattatggggcttaaaaaaatttaataaacgcctaaagttgattggtttttgaataggtaaattaaatttttcgaaaatgaaaattcaaaataatgtaaaataacagggtgccaaattcatctaatagagccccggggggctctaatggattgggatgttttgtttttcaatcaccagcgaaggggggggggctttattgaagaggaggcttctaatggagggggactacaataggggaaaaactgtatgtaggcttgtttttcaagaaaattaatcatcgaactcccgcattttaaataacacacagaaattgccgaaaatgcctatgccacaccaaagacccaccccataataaagtcaatacgatgaaacacacaaacattccactaactaactaatgatcaaaaatcattgttttttcacaacagagtatcaaattgcaaaataatttttttttttggccttgacactgttaatgttctataaactctgacttcattttgtacaattttccctaaaaatttggcgcccccggcgggctgcaagccttaaacttcgaatttagcataaagcaaagggctatttgggctcttatgcagttttcccacaattcattaaatcagacataaaatatgaattttgaaggaaagattcggctgtgaggttctaaataagtcaaagatggatgccgaattcatgatcactgatcagcgacccttaaaaacccattgatcattactgatcagcggcccttaaaaacccataaactcatatatttattttttaaatttgaaatgaaaaaaaaaattagtggtaaaggttgaattgcacaatatcccggcatttgatttcatatcaaaaccacaaaatgggagatcgattattatcccaaaaaaaattgcaaaggcaccacagtgaatggggaaagaacaaaggggggggggggtgaaaattggaacacgaagcgagcgaagcgggaacggaaataatatagtaaagcaatagcaattcataaaaagaataacaatgggaacgaaaaacacttttcgcaaggcatttgtcggcggcgcaaaatgaaatgaaaaaggggaa

SEQ ID NO: 44095 - DNA, 1148 bp, Heterodera glycines
  unsure (1)..(1148): unsure at all n locations
ttttgggttaaaaaacgnctttacaaanaaaagcgattctttcgattggaaacggagaaaaaagaaaatatcgaaagatttattggcacgggttaaatcactttccngtatgacatatcacaagaggaagtgacttaaaagaaaatgatggattgttttgctaattcactcattaagcgattcattcccttctccgtttgtttggcccttgggctaaaaatgcttttcgttgtgccaacccatgagaatatttactgacgagagtgagtcttctcacaacgagtcttatgttgtgtttgtgtgcaaacattttcaaattggcaaaggcaaatgatgcattggttttttttatcatttgccaccaattcctttaaaattccatccgttttatgaatttaatattgcccccccccccctcccccctaatcggatgattgaattttgggagtgttatggaaggataaacgccattcacccttctcaaagtcaacaactgctgatgtccgcatggaaatttatggggaaaaactcccgccggggaatgaatgactgatttgtgcattttattggcggcaaatcattcaaacgaacgaatgaatgggcaaagtgggccaatggtcgtcgggaaggttttattaacaaaacacgggaaaagcgaggagtcgagagaggatctttgaacaaaatgataataatctgattaaagggggatggatgggggcagcgataagccaattcaatcatattttcgagaatttgtttctacaaacaccgaaaatcaacaaaaaaaactataaaacccccaaaaaatcatttgagaaatccgagaaatgggattcaagtccaacagctgtaaagagaagctaagaacttcattcatgcgcccattcatttgcttggcatttcgccattgcacttgtggattatgcattaattggcttcatttcacacgaatcattcactgcccccattcacagaaatgccatttcgtggggagtgaaaatgccaatgagaaaagaaaaaatattctttaaaacttttaatttataacgtattttctgcccgttttgacattggcattcggacagaacacagagaattctgttcttcttccttccttctctgctgctgatgtgctgttggccgag

SEQ ID NO: 44096 - DNA, 987 bp, Heterodera glycines
  unsure (1)..(987): unsure at all n locations
aattaaaataanttttttcttaaacaatcgatacaacttttaaagaggaaacaaaatataaatcaaatcttaaatatatataaatttaaaaaacattctttatatatttaatataaaaggatttcacatcatccctgaaaaataaataaatttgtaattatttaaatatggaacaaattaaacatgatgtcaaatgtcaaaaaaattttaattttaaattaatttaaaaaataataaatgtaataatttaattagccattaaaattcaaaaatcaagggttatttgtattaattaaaacagtaaaatattaatagagttaaattaattaaaaaaagagaattaaaagtaaagtattactaaaactgtcgatgatgaacaaaaaaagtaaagagtctatttgacatgataaaaaaaactaaaatatgaactttaaaactattaattcaagaaagacacgaattaaaatgaaattaaataaatagattttgacaaaacaattgcaagagttagaaaaagtgaaattatatacttataatatttgaaaaaatgaaaaatatttaaaaaacgctttaattatttaaaatctaaacaaataaattgaaaccattgtaaataatatcatttttttatttattaaactaaaaacaaaaactaaacattaaaaatattatgaacatgattatgaaaatgttggaatatttgaccttttgtttgtgattttaaattattgttggcattatgttctcatttttgcatttttatttttcttctcattacttaattaattatatgttcggttctctttttctctccgattctaaaatatttgttcttcatctccttcgacgcttttattcgaattgtgtaatttaatttgtttggaattgatattataaagagttttccaaattcccgctccaaaagctaaaggttccggtcccaattaaaagccccaattcttcgaccaaatccgatcatttccaaca

SEQ ID NO: 44097 - DNA, 1029 bp, Heterodera glycines
aatctatgcagtataatatgatttaaacatttatttaaatgtaaaaatgatctatgaaatataaataaaagcggatcattttaagccaatgttctcttttttatggcggcaacagctgcaaaaacataatttgaaaaagtgtgtaaacaagccacagagaagctgaagcgcaagcagaccgatcgcaacggggacgaaaaagccgaggatgagccaactcttggaaaattacattaaaaaaatttaattattttgtgcttatccgttatatttttaataaaaaatgaatatatttgttttttattaatttttcttttttcgaattagcgaaatttttttggtaaaaatttgtattttggttattgatagggtagttaaaacaattgagatatttaaaatcattggggccagaaaagggtaatggaaaataatgcctcagaattttatttgaaaaaaatatttcactgacgcaaagcgatttttaaattgacatttaataaacctaacaaaaaataattttgttaattatttttcatatgcaacaaacaaattcaaaacattgactaataaaaaatataaatttcggtttttaaaaatttttcatttaaatcaaattcattttaaccttgggttgaagttgtaagcagcaaatgttcccgtatcgtccacaacagctgtaataccaatattggtttgaagctggacagacttggccagcacggacagttccgttgtgcttctcacccagcagttcatcaagtggaaagcacatgtccacaccttctgtaaaatatttttgtaacttagtccgttgttaatgaattttctttaatgagattttttagtaatttcaaagtctttttaaattggttttagaccattgagcatgagtccttaaatatatttgtattttttaccgtttattaatttaattttgaattattaaaacaaagtccgacctcaaaatttgaaaattctactataatttgagtatgagggttttagtcaaaaatccagaaaattctcatt

SEQ ID NO: 44098 - DNA, 987 bp, Heterodera glycines
taaaacagaggagacggatggtccttgtggacgttgaccgtgtctgatttctgcccagtgctctgaatgttaagccaaggaaacttgattaagcgcgggtaaacggcgggagtaactatgactctcttaaggtagccaaatgcctcgtcggctaactaccgacgcgcacgaatggatcaacgagattcccactgtccctatctactatctagcgaaaccacagccaagggaacgggcttggcaaatttagcggggaaagaagaccctgttgagcttgactctagtctgactttgtgaagaatcatgagaggtgtagcataagtgggagccgcaaggcgccagtgaaataccactactttcatcgattccttacttaatcggtaaaacgggagtgcgcccgaaagggtgtccattttggtgttaagtcgggccacccggtggcccggcgacccgcgccgatgacagtgtcaggcggggagtttgactggggcggtacatctgtcaaagcgtaacgcaggtgtcctaaggcgagctcagagaggacggaaacctctcgtagagcaaaaaggcaaatgcttacttgatcctgattttcagtacgaatacggaccgcgaaagcgtggcttatcgatccttttgaatgtgtaaagtttccagcaagaggtgtcagaaaagttaccacagggataactggcttgtggcggccaagcgtccatagcgacgtcgctttttgatccttcgatgtcggctcttcctatcattgcgaagcagaattcgccaagcgttggattgttcacccaccaatagggaacgtgagctgggtttagaccgtcgtgagacaggttagttttaccctactaaagacctgttgctatgatagtaatcctgcttagtacgagaggaaccgcaggttcagacatttggttcatgtgcttggtcgatagaccaatggtgcgaagctaccatctgagggattatgactgaacg

SEQ ID NO: 44099 - DNA, 1649 bp, Heterodera glycines
aggaagaggtggtggtcgtggagcattgccaccaatggctgaagcctggaatgggggaaatgacaatttgggtggaggaagaggtggtggtcgtggagcattgccaccaatggctgaagcctggaatgtgggaaatgacaatttgggtggagggagaggtggtcgtggtcgtggagcactgccaccgatggactccgggaccgattttggtaaatatttccataacttcacataataaacctattatttatttatcgtgcgattatgttttattaggtccagacaacagtggtgtgggtgcacgcggcggtcgtggtcgtggagcaccaccgctggtggacttaggactcgatttcggtcagccacataacttatcaaatcaccgtacaaatcacggtttatcaggtcccgaaaccaatggtgtgagtgcacgcggcggtcgtggtcgtggagcactgatgccaatggatgatgctttcaatgtgagaaatgacaattttggtggagcagaaggtcatggagcacagccaccgatggattccggatgcaacttaggttgtatttctcaatcttaaaagtaaaactgaaagattctaggaggagaaggatttgttccgacaaagcgttcaattgctgaacttttcgaggaggatgcccgcgtaaaggacaaatatattacaattcgcgatgaagacgaaaacgtgataatcgctggtccgcacgcagacgaatataaggccattgagtacaaatccagttttgaaacatgttaatttttgttttttatgcgttggtccgagttcgaatttgagccagctttgctgacaaatattcagaaggcgaactacacagtgccacgcaagattcagtcgcttacctttccgttgatcaaagctggtaggtcataacattattcgacggatgcgaattgaaacaaatttaggacacgacttgaaggggcatgcagagacggggagtggcaaaagtgcagccttcctgcttccgatcatcgatgccgtcatgaaacttaaaaaaggtggccattacaaatcgcggcgctgctgtccgtttgcccttatcgtggaaccaactcgtgagctgaccgttcaggtgtacgaccaggcgaggaaattggcagaaggttagtgctcatttcatgaattaaaccaggcaggctttactgttttctttgaagagtgtgatgtgtctgtgtctcgcgcctacggaatgtttctgcgtcatgttaaccttcgtcaaatttctacggatggttgtgatattttggttggcactccgggacgtctttgtgactttttccaatcaaaaaatgtaaaaaaaaactatattattgtctatctcataattttagcttttgtgcgaccaaatcaaagttcttgtctttgacgaggctgaccaattgctggaggacggttttcaggctgttctgcgtcagcttaacaacgttaacaattggccccaggttttgtgtattttatttcttaaaaaatctattttttgttttttatttagcctgaaaatcgacagactctgttgttcagtgccacttttccgttagttgtccaaaactgggcagatgagtggatgcgtaaagactcgatgatggtgtccaacaaacggctggttgcggc

SEQ ID NO: 44100 - DNA, 1710 bp, Heterodera glycines
  unsure (1)..(1710): unsure at all n locations
tttccctttcagtatccctgcaaagttttggggcgcttctgataagtttctgaaaaaaaagataagcctaaactttttggcctgtttaaaaagggaataaaaatttttaaaaatttattcatctccctttttgatagaaaaagcatcagagtgcctaaactagcatgtaaataaaatttggtgcgtctcagagcattttctgaaaaaaatatttatgaattaattatgcaaaaataaataaaaatttctaaaaatttgatcgtccataaataatttgtaattgatcaggggctcaccaaattatgcaggaatacgtatcggaacactacaaatgcttactaattttcctagattttttaaacccggtgaaaattttttgcagacaccaccacttttgcacttaaaaaaatttcaaaaaactttaaaaattcatagaaaatttaaattcataggtactactgctaaatcaacgcagagacgcctttccttgacctttttaggcccctgcaaaatctggtgcgcttctgatcactactcgaaaaatgagtgattgaattttcactaaaaagttaagcctaaactttttggcctgtttaaaaaggaattaaaaattttaaaaattttattcatctccctttttgatagaaaaagcatcagagtgcctaaactaacatgtaaataaaatttggtgcgtttcagaaccctttctgaaaaaaatatttatgaaacaaaaaaatcgattttttcaagtgtccatttggggtactcgaacatttatggggagcaaaaatccaacgcagaattaaagtacaggctatagggaagctactcccgaaggattcggtctccccataaatctgggcgcatcggttcggggggactgccccgaaaacaaaaaaatcgattttttcaagtgtccgtttggggtactcaaacaattatggggagcaaaaatccaacgcagaattaaagtacaggctatagggaagctactcccgaaggattcggtctccccataaatctgggcgcatcggttcggggggactgccccgaaaacaaaaaaatctattttttcaagtgtccgtttggggtactcaaacatttatggggagcaaaaatccaacgcagaattaaagtacagactatagggaagctattcccgaaggattcggtctccccataaatctgggcgcatcggttcggggggactgccccgaaaacaaaaataaatcgattttttcaagtgtccgtttggggtactcaaacaattatggggagcaaaaatccaacgcagaattaaagtacaggctatagggaagctactcccgaaggattcggtctccccataaatctgggcgcatcggttcggggggactgccccgaaaacaaaaataaatcgattttttcaagtgtccgtttggggtactcaaacaattatggggagcaaaaatccaacgcagaattaaagtacaggctatagggaagctattccggaaggattcggtctccccattaatctgggcgcatcggttcggggggactgccccgaaaacaaaaaaatcgattttttcaagtgtccgtttggggtactcaaacaattatggggagcaaaaatccaacgcagaattaaagtacaggctatagggaagctattccngaaagattcggtctccccataaatctgngcgcatcggttcggggggactgccc

SEQ ID NO: 44101 - DNA, 1113 bp, Heterodera glycines
  unsure (1)..(1113): unsure at all n locations
attctctcattttgacacttacatttgaaccctaaaactctttcaaaagcccgctgtaaaattgtgcatttttaaaggagatgaatcgacattggcaatgcagacccccacttttctagaattaaaaatacatcccatttctgtcctattgtttgcccaatttatacttgataaggcgataaaaaggttgtgaacaactttttacaaagcctgtatatttgtaaattcgagaatggaaattatagaaaacactacgaaggatgagactagatgagaaatattgcaaattgagaataatctatttgcaattaaatgcggctgaaaggcttgagactaggcagataaattgatgtaaaatgaaagagcggagaagtcaatgcgatatgacatcctgagaatggttgcggcgaattgtttgccttcttcttctattctcgcctttttgctgacaatttattgacaagaagacagtagcggtgaaatggacctccgattttattcaattcgctgacattcactccccaaagttcgactggcggttgcaacattcgaaatttctgtaatattacgatgaatcagtcacaaagttacctattacgtaaatggacacgggaaattttcatttttcagctgtataaaaaaacagttttttactcacgggctcattaaggtcgagccgaaagatgaggtggttgttgacattgaggcaggggacagcctcctcagaatcgacggtcagcacgttgtagcggaacgtggcatccctttcaatgcactgagaaaacgacaaatatatgaggaaaatcagtgccaatgttgaaaaaccttcaatatgctttgcgaatctttatcttttccaaccgaaagaatttcatttgttgccacggaaatatgcgcctttaacggcaaagtgccagcgattgaaattggaattacggaataatcggcgaacgttttcgcgacaatctgaagagaatatttgtaagttcgtcgctatatgtaattcttctccgtgaattanagaaaacataaaattggatttattctttgtgtttgttagctcaccaatgccccttctgtatttgttccgtttttgcgaattccacaaaaatt

SEQ ID NO: 44102 - DNA, 1088 bp, Heterodera glycines
tgtgcgcaataaccgttattctaaatcgatatttctttgtttcaccaaaaaactttgcttctctcacactaagcttgagttaagaattaaaatttactcaaaatgaaagggaagcatttaaaaaaccaagtcgcagaaaatgttacacctattaaaaaaacatcataccattttcatttttggtacccgaaacttttattttacttgttaagtatagaagggaaattatttctatactaattgttttattcatgcatcacaaatcttttatatagtgtccatcacagttactaacaactcaaaaagcgctttagggctcccagtcatgtggtgttggggagattatttactgtggttattcagatggcaattttgtttttatagttgccaaaggactgtctaagacgcatacaaaaagcattattaattttgttttttccatgttctttgtcctttttcatgcctctgattcagccctttttgcaggtatttatcccttttatacaatttttttttcgaaattcattacagaaaaaaagaaaaaataacgaaaaacaaaaaatatatagccttgaaaggaagacctttttaaatttatctcctgtgaattctttggttatcaaccgtcgagcttgtgctaatacacataagagcactttaaaaaatggaaaattccaggcaagccttgcctaactccgtagtggaccgaattctatccaaaattgtgttgcatggaagggtgaaaattatgcaaataaaatttaaaaatacaacgccgcttgcggttaacggtcgagggtttgtcaccgtaaaagattaatgataataagaaaggcgagagttagactcctacgaaacgattttatgatttcttaggcttcttattcgattggtgaggaagataccgacccctctctaaacgacgattaaatgattgaatgcgataaattttctggaagaggattaaaccgaactttagattcgattggtgaggcattcttccactggacgaaccgcccgtgattttttctagagagaaaattttacgaataatagaatatacgtactgcgattttttatgttggaaa

SEQ ID NO: 44103 - DNA, 1609 bp, Heterodera glycines
aaaatcctcaaaaaattgatgtccgaagcaataagtcaataagccgagccaggatggaaaaacattgggatggtttaaaatctgttactcaatttttcgcagtcaaaaatttttgtgtaagctgtgaggtgacattcgatcgacccgaccgtcaccgaatggaatgtagggagcgctgcaaaaagtgttgccggatggggttcgggttcccctgtttggatgtttgtgaggcgatacactgtggagaatgcaatcggaatttctacaacaatgattgtttcgagtctcacaaaaagacagcttgtagggagtacaagaaatgcgaaaagtgtggagagacacacaacacaaggaacaaacacacgtgtggggagaaattctgtagaatttgcaaagtctatcatccgggtcggcaatgtttcattaaaaaaatcaaactccgacagcagaaagcataccgaattgtggcttatgacctcgagacgacggttgaagggggcgaacacaaaccaaatcttgttagtgccgcgcatacttgtagtgtttgtatgggagaagagagggaatgcgaaatttgtaacagtccgcggatgatcacctggtctgtagcagatgggtttgaaccgatgagcgaatttgttgattggattttgggatttaaacgatttgaaacggttgcttttgcccattatgctggaaggttcgactcgcattttgtgttaaaagagctgactgaaagaggggtcgaaaccgagttgatgatggcagacctgaagatttatcaaatgaaagcgcgtggtgtgtattttcgggatttctggctgctcagccaaaacaagttggcagatcttccaaagactttgggtttgaaaaccttagcaaagttgtacttccctcataagtacaacaaaaatgtgaactttggaaaaaaattgacacacctaccaccccttgaagattattgtccggacaatatgaaggaggaggaatatgctaaattggtaaaatggcacaatgaaaattatagaattgaatttgagctaggttagagaaaatctgttttccttttaaaattgaatttaggagagcagctcaaggtttattgcgaaaatgacgtcgaaattttgatggaggcaattttgaagtttcgtcatatgtttttggagattactgatgggatggatgtgttgaaggacagtgtaacaattgcgggggttgtgatgagaatttttcgaacaaaatttttgtgagaaaatcatctcccaattattccggaaggcggttatgagagagctgagaatcagagtaaaattgctgtgaaattttttgaatggtgggctcaaagcaaaagagtgagacttagacacgcatgcaatgggggtgaagtggaaatcgggggattaaaagtggattgtatcatcggagctgagaaaaaaatcattgaatttcaggtaggcagaatttccttccctattttattttttgctaaagggatgtgcgtttcatggatgtccaaaatgttttttgccctggaccataggacccaatgggcgtgtatggaagtaaatttccgacgaactgagacacgaatggttttgagggaaaaatg

SEQ ID NO: 44104 - DNA, 1615 bp, Heterodera glycines
ttcctaaaaacattctaaatcagtgtaattgatgtacttttctaatggaaatcaatgaataactttttcaagcaataaacgaaaatttttatatttcgcatttagttttgacattagtcatatgaataggtttcgtgatcaacaacccttaatgacaatcgctagtttagattattaagggtataattataacaaaaatttattttttaatgattacacaagaggatgatgatcaatatttgatatttatttaaagtttttcagttatttaaagcattttatatgattaattgtttttaaatttcaatatttattgcagttttaatttaataaatagtttataagaatatcgtatccccatctcttattgtactcaatgtcaagaatagttttattaattgataaatgtttcaataaacataaatcaataaaaatatattcagttattattgaaaattttgtatgagacaagaatttcagttttctgtaaaaaaataaattcaatatattttattcgaaattttattttatgaatgcattttatttttaagattcgcatcattttcttaaaatttataaatagtttatattttttttaatcgtatgaattatgtattattcatttgtttttggtcttaataataaggcaaatgaaatactattatgctttacacacggcatcaagctgaacaaataatatctctcattattggatcttaaacgaacaaataaaattcgtagtacgcgaatgtcgatgaaattatattatttccatgagtattttctatttctgtctattctctgaattttatttttttttaagaattttcacaccttaatcaaatgtaaataataaaattaataaatccaaggtaagaatttttttatctctagttcttttggttttcactcttgattttcttccataatttttaagtttcttcatgaatgctgtgacattttggtaaaacataggaatattggtatttgattcgctcattagtaaaaaaaagcaaagtaaccggacttccatcaatttaattaaaactattcaactatatgaatgtttttgtatttataatttaaaaataaccgccattaattgtcttacctcttcacgtgtgttttaaggaatttaatttcaagttccaattagaatgaattttttcattactttaatattacttttcttttcagaaataggtattcgcttattttttaatattaagttaatttttaaatcaattaataattttaaatcgttgatgtatgactattttgttattcattctgcagaagatgcgcgcgcctctttctttagcaaatcagcccatggacggtaaaaaagaaaaaaaagcggcaataaatcttttttatggataattatgggaaaaaattggcgttctgtcacatttactttttatctttatttctctcacttttacgtactatctcttcattcttaataatgtaaagaacaacatttacttcgctctatagaacttttttttcgccttacagaatttcttcatattttgcatatcgatagagaaaaaaattctgaatcgattaataaggaaatttaatacaaaaataaggccaactttagagttat

SEQ ID NO: 44105 - DNA, 1201 bp, Heterodera glycines
ttagatcaaaactgaatgttattgcctgtttgtaggtgacagaacgccgaaaaaaggcattacaacttctgcatgagattgcgccataatgaagacctttaatttggtgacattatgccaaatcaattaacgcggctcaaaatatggtatgtcaatattaatcaacaactacggtatgttactcatcaaatatatacagtatgcccttgagttaacgatgccaaatgaatgccaaatttaaatattccgccaaccatctgctggcgcgttgcaaatggcacacagactgttggagtagtcaagccgtgacttttttgagcgcctcgaaggcggcggttgtgccatgttggtggcgacaacattggcacaattgctgccagccggctcaaatgccattggtgtttgtggcgaaccgaacggcgtcatcatcatcaccgttgttgcaagcattcgatggttggaaatggcggatggtgaaagcatttggtagttatgtgcagctagatgtctgactgctgatcagttaacagagtgatcggagctatgtttttatgtcgtttgatacacctttaaggataatctcatttttgggtcatttgatcctaatcaaattttatcactggtcacaatgatccgtttggataagaaaatggtgtcagaatcagtgttttagaaaagagctgatcattttggcaatcacagtaataatcacagatatatgaataaagtttcgatcaccagtcggtcagagaactcgattttaaacgattcgatcaatgatcaattttttcttttaaaatatttcagtgatccatctattatcattaattttcgtttagtgatcacatccaaacagtgatcattaggtttaatagtgcttacttctctcccttacgccttccacaggcgaaatgatccgatcacacacaaattttgctgatcacttttaaatttatttttgcgtgatctggcactgagattatgttgatcaataaaaaatacagatcaatttcttgggacacacaagttgtcaatgttttttcctgttattttggaaaaattttaaaattaaaataaatttgtaaaaaactataaaatgattttaaaacaattaaaatatagaaaaattcaaattttattagtaaaaattttgtgtgagtaaaaaattgaagaaatttctcattaacaaatactttgagga

SEQ ID NO: 44106 - DNA, 1172 bp, Heterodera glycines
cgccgattaaaagatcgatcaaatgtttatgggagccggaatacaaaacatttggccgacggcaaagtgcgatgatcgatgaagcgacgacaaagaagaagactttaattttgcataaggtgtttttgtatgtataggctaatgggtaccatatcagacagacagacaaaccccccggggggagtcttttttattttatcctcctcaaagggagagggggtcaaattatgggcgtacaaaattcaattaattaatataccaattttattgtttaaattaatcaggaaatttctttagttcaaaaaagaaccgctaataagccaatcatctgttttaagtttaaataaatggctttttgtttaatttattggcattgtaaatttcttttttttttttaattttgataatctgttccaaaatggccgtttttgttaaagaccaaaattttgtgccggaaaaacgagtcgacgaagctgggcatattttaaatgatccgaggttatcttcctattttacttatcgcattttttccatgtttattttcttcagtaaaagtttggccgatcgtttccgtgcgcttttccttctcagaagcgtaaaaagcgacagggctgtccattggatttgcaaatgcttctccgacccatcggctcttcttaagcacgaacttgcgtattgtcttggtcagatgcaaaaccccgcggcgattcaaaaattaatcttcgttttgcaagacactgaacaaggcgagtaaatttctttttgtttaacattttcctttgtctttatttatatttttgtatatagaaattcaacttatgtaataatacatttgcttttttcattaattccacttaattcagaaccaatggtccgtcatgaagcggccgaagcgctcggagccatcggcgacccgtcgaatgagcacggactcagcaaactgttcgagcagtacagcggtgacgcagtccgagaagtggcggagacatgccttttggcactgcgacggacgcaatgggttaaagagaagggaaaggacgacacggaaagtcggagcatttacgattccattggcaaggaaatttgtggaaaatttggttttttaattgtgccacattaagcgtttgtcagaccacgagccagcagcggacggagggaaaggagcagccgaa

SEQ ID NO: 44107 - DNA, 995 bp, Heterodera glycines
tccaatcgcctttatacatcgcattatgagcggtaaaattagcagagtgcgaaaaatcgcatggatttaagcctagaaaaaatggtctaagtaaaaatcgtaaatacgctcaaaaagcttctcaaacaattttagcgcttccaattccttctacaatcgcctttatacatcccattatgaacgctaaaattatcagagtgccgaaaatcacatgtgatttaatcctagaaaaaaatggtctaagtaaaaatcgtaagtacgctcaaaaagcttctcaaacaattttagcgcttccaattccttctacaatcgcctttatacatcccattatgagcgctaaaattatcagagtgccgaaaatcgcatgtgatctaagcctagcaaaaaatggtgtaagtaaaaatcgtaattacgctcaaaaagcttctcaaacaattttagcgcttccaattccttctacaatcgcctttatacatcccattatgagcgctaaaattatcagagtgccgaaaatcgcatgtgatctaagcctagcaaaaaatggtgtaagtaaaaatcgtaattacgctcaaaaagcttctcaaacaatttttttagcgcttccaattccttctacaatcgcctttgtacatcccattatgagcgctaaaattatcagagtgccgaaaatcgcatgtgatctaagcctagcaaaaaatggtgtaagtaaaaatcgtaattacgctcaaaaagcttctcaaacaattttagcgcttccaattccttctacaatcgcctttatacatcccattatgagcgctaaaattatcagagtgccgaaaatcgcatgtgatctaagcctagaaaaaatggtctaagtaaaaatcgtaattacgctcaaaaagcttctcaaacaaatttagcgcttccaattccttctacaatcgcctttatacatcccattatgaacgctaaaattatcagaaaggcgaaaatcacatgtgatctaagcctag

SEQ ID NO: 44108 - DNA, 844 bp, Heterodera glycines
ccagcatattttttggaaaactctaatgcttctctctagaatttgggtactatcattctcattaagaattataactgtttaaaatgaaatactttttgatactattcatttaacagattcaaaactgtaaaagagcgatttttttgaatcaaactgaagtaatttctgaaaatctaaattatagtcattccttccaacaaaacagaacaaacagtttaataaaggttattatacaacaatttattttatcaagaaaattttaatacagctacttttttattatttgacgaatgatattacaaaacattcaatattcctaattttatgccaattactcatgggaaaaaagaaatgccgtcgtaaaaatatgcctatagtgcctgtggttgggtaccagcatattttttggaaaactctaatgcttctctctagaatttgggtactatcattctcattaagaattataactgtttaaaatgaaatactttttgatactattcatttaacagattcaaaactgtgtaagagtgatttttttgaatcaaactaaagtaatttctgaaaatctaaattaaagtcattccttccaacaaaacagaacaaacagtttaataaaggttattatacaacaatttattttatcaagaaaattttaatacagctacttttttattatttgacgaatgatattacaaaacattcaatattcctaattttatgccaattactcatgggaaaaaagaaatgccgtcgtaaaaatatgcctatagtgcctgtggttgggtaccagcatattttttggaaaactctaatacttctctctagaatttgggtactatcattc

SEQ ID NO: 44109 - DNA, 766 bp, Heterodera glycines
  unsure (1)..(766): unsure at all n locations
attctttgttttaaagtgtatggggtggaaaccaaacgtttcagctgaactcgacgatggtcccttttttggaccccgaaacaccaaaatggagttggcattccaattaaaaattatatattgaaatttaaattgtttttttcagtttgtcttagcaacaattacaccgactttttgtacacctatgcgccgagtccgtcgtgtaaaagtgccgggggatgcgaatcggagtatttgccaataaatttggcaaattatttgggtgtggcttttccttattcattttccattcaaagctttctgttctgcgacaccaccaatcagagttacccatttggtccgacttgttgctcaaaaattaagccggggggcgactgtctcaaattcatcggaaacagtaacaatttaaataattagtagtttggataaacaaatttttggatttaaatgagctttattcagttgggtaaataattgtcatcagtgggacggggatttgggggggnggggggattaacagccggtaatcccaaatgaatacaaataaacacaaaggtgatcagccctgcttcaactcctcctgtgactcaaacagcggcacatgcgtccaacaacagccaatggcattgcagcaagtaaaaccattattggacgagtagggatgggcccaatcggggattaagaccagttttatggcgtcatgctctggaatatatttcagtttcgtattcgtattgatggaaatagcaatgggaagggaaatggc

SEQ ID NO: 44110 - DNA, 635 bp, Heterodera glycines
tgatcaagacaaaaaattagcctagaaaaagagatcggagaggacccggtttttactggattcgaaaaccggtcctacgatttttggtaaaattctgttttgagaggccgggtcggaaaccggttgcttttgaaaatatcagtccggtccggtcctgacatttttgaaaaatccgattttaacaaatttcgaaacccgttcccaagtttgaaaaagtcgaaaattcaaaattttcaagattctcttttatgctcgtatctgtatagaatgattattttttgatgttgcactggttcgtggttaaatacagtttgttttaatcaattttggaataaaagtgcgaattttgaaaattttggattttaaactgttcgagttcgggaccgggattcgaaattgtcaaacgaaagttagattcgtgatcagagaccctcaaaacctactaaaacattttttcacgaccttatagaagaaaaaaaaaattttacaaaaaaggatcgaccatcggcagtattaacaaaaatctcaataaaaacttgtgtttaatttcatggattttttctcttttccccctaagcccccccccccccctgttacgccgcacttggccctatttatggtttaaatatattttt

SEQ ID NO: 44111 - DNA, 1417 bp, Heterodera glycines
ttttcttgattttttagattataatattatcattttctctatttttaactttatataattactatgtaaagcttatgattataattaggttttccaatcaatacaaaccatagttttttcaattcggattttatttttaaattttccagaacttaatatttcattagtaatatttttatgggaatatttctattaaaatcttatcttttctcattttttttacatatgccacctaatgctttatactacctttttcaagttgttcattttataaagggcaattaatcttcttttcaaattatattacttgcaaatttttaattttaatatttctaataattattcaaattgctgttaaatgttggtttctatttcttttttgggttaattaattagttctttgagatagaattaatttcctatatttaggctagaattatttcgttaatttgaataaaagaatcatgcaaattaatggaataaaattttataaaatataagttcagatgaattttcaaatttgaagcgtaattttaattgccaatttttctctaaatcaatgtttaaagtatgtgaatttacgtttttactttattatataataaaattttttagaacataataataattaagtaaattttaattcatgtcatacattcatgaattataagtgaacagatttgtatgtttaaattttactgatataaattaaggtatttgtaggctgcgaacataattttaataatttctaacattaatttttaatcaatttttaataatgaattttaaattattattttagatttttcgtgaccacattttggattactgcactatcttttatgaatatattgctttctgaacttagtttcttttttttaaaaggatattaaatataaattatattaatttgttattttaatgtattaactgcttattttaacttatttagttatcattatctcacgtcttaggaaaatattctatatgtgccataagctggttttaataatatgtatgtgcaaagaatctattaagatttataccttattatgaaattccaacaataatatttttaaagatatcattaattctgaatcaaaatatacaatattatctgaatttaagttcattagcatttcttttgatttttgcaatgaaatcctttattatcaaaaatataggaaagcataattaacttttttgccggtgtattttgcattatgtgtctgaatttatagtgaaagatacattaattaatcattaagagcataatataacataaacattataacaaatgtgattaaaataataaccaaaatcttttttattctcttcatatttttaattcgattatctaaatttaaaaaataaatatctttatatttttgattatatttcgtaatttttttttgtt

SEQ ID NO: 44112 - DNA, 1042 bp, Heterodera glycines
agagatatgatgaaattctattattaaagtaaaatgaatttaaaactttatcaaatcaaattaaaaatagatgatacactcattctgggaaataaacaagatattcaataaaaaagtacaaaatgatgaaattataaagtaaaataaattaaaaaaagaatcatagtttcacatacttaaatatataacttaaaattctgaaatacgagaagaatttcaataaaaaaaaattattaatgaaaatttattttgaatattttagccacctaagtgtctaaaaaatgaaatatatgtattatcattttaattcatttattagtaactcacaatagtcttaatgacatagcatttaaaatttaaatttcatggctttatccgtttccggtacttgacacgtcagtaacgagaaagtttaatttaatggaaataaaaaattatatgtttgataatttacatatatcactgttaatttataaattagcaaaaaatttcagtgaggttaaaaagttttgaccaaaatgaaagcatttttaaaattttaagccatgtaaggaatattaaaacaaaatatacgaaatttacaattttctagcatgaatgattatttgaaataaagatatttgaacaaagaaattaattgtttgcaatgtttttacagataattattaaaggggacgggacgaaatctcgccgccgaaatctcgccgccgaaatcgccgccggaatctcgccggccgaaatctcgccgagacaaaatctcgccgccgaaatctcgccggctgaaatctcgccggccgaaatctcgccgcagaaatttcaaaaaaaaaaaaattcaaacttagaaatttttcaaggaaaaaattttagaaaatttttttataagaaaattccaaaaaaaactatttgctaagtttttttgaaaatttttcaaaaaaaacagtaaattttcataaaatttcaaaaaaaaattgctgaaaaatttttcaacaatttttttatttaaattttcttataaaaaaatttttctaagaattttttcctt

SEQ ID NO: 44113 - DNA, 978 bp, Heterodera glycines
  unsure (1)..(978): unsure at all n locations
ggtgtacaaaaggttcaaaatgttcggattccatttttactattgagattgaccaaccagggagggcataacgaaatttttgaaacaaaattttagattttggctgtgtttcttacccattttaagcccgagccattactagagaaattatgagttaagtctattttaagaaaattttggcttttcaaaatcaccttctttcactttgcttgtaacttttatgggtaagtataagtttcttttaggtgaccaccgcaaaaaagacggacgcagccaatgaagacggctctcccgacgagaaatatctaatcgcaacttctgagcagccaatcaccgcctttcatcgtacatttttatccatttattctgctcccctcaactttgccatttgtaaggtgacgaatggcttaacccatcggatttgccaatcaaatatgccggaatgtccacctgttttcggcaggaggtttgtatattctgccaatatttgtttctttaatcccatggcatcgtcaccttttattttcacttttttaaggtcggaagccatgggagagacacccgcgggattttccgtgtgcaccaattcgagaagatggaacaatttgtcatctgttccccatttgacaacgaatcgtggaagcacatggacgaagttagtggacttttgaaaatatagtccattaaatttaattctttttaaaattcagatgattgacaatgctgaagagttttgcaaagtgctcggccttccctaccgaattgtggccattgtttcggccgaactgaacaacgcggcggcaaagaaattggacctcgaggcgtggttcccgggcagcggtgcatttcgggagctggtttcatgctccaactgtacagattaccagtcgagacggttacgaatacggtacggacagacgaagaaaatggacggaaaggtaaaaagtgatttgaaancgaaggatcagccggcaatca

SEQ ID NO: 44114 - DNA, 992 bp, Heterodera glycines
attgcgcaccgccctccctctcacgctcgagcgcttttgtaacgtataaaatttctcaaaataagagatagtcatttttcttggatataagataaatttaaaaattctctgagaaattaaatggcgattgcgcaccgcactccctatcatgctcgagagcatttgtaacgtataaaatttctcaaaataagagatagtcatttttcttggatataagataaatttaaaaattctctgtgaaattaaatggcgattgcgcaccgcactccctatcatgctcgagagcatttgtaacgtataaaatttctcaaaataagagatagtcatttttcttggatataagataaatttaaaaattctctgagaaattaaatggcgattgcgcaccgcactccctatcatgctcaagagcatttgtaacgtataaaatttctcaaaataagagatagtcatttttcttggatataagataaatttaaaaattctctgagaaattaaatggcgattgcgcaccgccctccctctcacgctcgagcgcttttgtaacgtataaaatttctcaaaataagagatagtcatttttcttggatataagataaatttaaaaattctctgagaaattaaatggcgattgcgcaccgccctccctctcacgctcgagcgcttttgtaacgtataaaatttctcaaaataagagatagtcatttttcttggatataagataaatttaaaaattctctgtgaaattaaatggcgattgcgcaccgccctccctctcacgctcgagcgcttttgtaacgtataaaatttctcaaaataagagatagtcatttttcttggatataagataaatttaaaaattctctgagaaattaaatggcgattgcgcaccgccctccctctcacgctcgagcgcttttgtaacgtataaaatttctcaaagaagagatagtcatttttcttggatataagataaatttaaaaattctctg

SEQ ID NO: 44115 - DNA, 1017 bp, Heterodera glycines
cgctaaaattatcagagtgcggaaaatcgcatgtgatctaaccctagcaaaaaaatgtggtaagtaaaaaatcgtaattacgctcaaaaagcttctcaaacaattttagcgcatccaattccttctacaatcgcctttatacatcccattatgaacgctaaaattatcagagtgccgaaaatcgcatgtgatctaagcctagcaaaaaatggtctaagtaaaaatcgtaattacgctcaaaaagcttctcaaacaattttagcgcttccaattccttctacaatcgcctttatacatcccattatgagcgctaaaattatcagagtgccgaaaatcgcatgtgatctaagcctagcaaaaaatggtgtaagtaaaaatcgtaattacgctcaaaaagcttctcaaacaattttagcgcttccaattccttctacaatcgcctttatacatcccattatgaacgctaaaattatcagagtgccgaaaatcgcatgtgatctaagcctagaaaaaaatggtctaagtaaaaatcgtaattacgctcaaaaagcttctcaaacaattttagcgcatccaattccttctacaatcgcctttatacatcccattatgaacgctaaaattatcagagtgccgaaaatcgcatgtgatctaagcctagaaaaaaatggtgtaagtaaaaatcgtaactacgctcaaaaagcttctcaaccaattttagcgcatccaatgccttctacaatcgcctttatacatcccattatgaacgctaaaattatcagagtgccgaaaatcgcatgtgatctaagcctagcaaaaaatggtgtaagtaaaaatcgtaactacgctcaaaaagcttctcaaccaattttagcgcatccaattccttctacaatcgcctttatacatcccattatgagcgctaaaattatcagagtgccgaaaatcgcatgtgatctaagcctagcaaaaaatggtgtaagtaaaaatcgtaattacgctcaaaaagcttctcaa

SEQ ID NO: 44116 - DNA, 1040 bp, Heterodera glycines
  unsure (1)..(1040): unsure at all n locations
gtccgcgttcgagaaagctaaggcaattatgttttcagaacttctgctgacccactacgacccccacactttccgatcgtcgtagcggcagacgcgtcaaaagatggcatcggcgccacaatcagccacatttttccggacaaaaaggaaanagtcatcgagcacgcctcaacagttctgaccaacgcgcagcagaactacagccaaattgagaaagaagctctggcgcttgtgttcgcagtccaaaaattccaccggatgcttttcggacggaaattcacactgctcacggaccacaagccattgctggcctccaagaaaggcatccccatttatgccgccagccgactacaaagatgggccctaatcatggccaattacgattttgaaatacggtacatcaacaccgcatcatttggccaggctgacgttctctcgcgcctcattgccaattatccccgaccagaggaggatattttgatcgccaacatctgcaccaaaactgagtgctacataagcaccattctgcaaaccaaaacggaacaacttccagttacagcaacgagaaaatcggtcatgacccaaacaacccccctttttggtgtgacaaaagtaatggagcaaaatgtttaatcaccaaaaacttagttccaagttggcagaaaaaccagaaataattcatgcgaacataacttttactgctgatgaaaaaagtcttttataccaacttggtcagatcactcctttatggtgatctgaaaagacaaaaatggcttgaaatctggaaaattttcgaaaaaaattcttagggtgttgggaaattttttttgaaaattttggatagggctgccagaaagagcataaaattccctgccggattgccttttggatgatgggtctacgactaatacgcgcatagaaacagatcgtgaaatattggacatctcaaaaatgaccgatttctaccgaatttcaggggaaaatggtagacaatcacatcatttttatggtaatcaatagtgaccccctctcttgctctg

SEQ ID NO: 44117 - DNA, 1563 bp, Heterodera glycines
  unsure (1)..(1563): unsure at all n locations
ttcggtcggtcagcgttcgggcagctgtcacagcncaacaggaaccacagtcgccttgaaattttttgtaaatgaaaaaactttcaagaaatacggnttcttaaaagtttntaggggcgtattttttgaaaattttaggtcaattcttaggagtgtattttccgttttattgcatttttgttaacatattttggcaaaacgtcacaatagttgaaataattcggaacaggacggttcggtgcccgccgtttcggtaccagcctaagttttataatgctgttcgggaccgaaaatttcccacgactcttcgagactcgagagtctcgaacagcactacaaatcatcctccaatccaccttgtgcatatccactttggatgatttcggcacaatctttccatgcttcgcgtgcgtcaaattcagttggaagatcatttttgtcttcctctccatcggctgccttcagctcagatcgcaaatggatgttgttgttctcatttttgtcctcctcaacagtctcatcgacaggagtgccaaaaaaattcaagaaatcctcatctttcatcagtgcaaatctttcaacgacaacggcctgaaaatgagtgtttaatctgaaagtaaaataaattggcaaaacaaattttctttgtgattttaatacttactatgtatacaatacatatttttcaatattaagcttcttttgcgggctttagaccctaaaaattacgggtgcaaaaaaattttcaaattttctggaatttttataaaaaatatttcttcacaaaattaaaaaacggttgaaattttccaatttttctttgtaagctctttttgtttgaaattttattttaaattttcgggggaggggggaagaagctgccccaaatcccggccattatgacgccaaatttcatacccatgatgtgttcatcatatcaacttccttctgtgcggctgttagcctctctgctctgtactccgacttaaaaaaacatgaaaattaatttcgttattttaattttttttaattatttacaaaattatttggaaattcatttggctcctcctcaattttttgttccaagcagtagacagtagtatcagtgctcaacgccaattcgtccgaataggtgactaataggtccagcacagtgccaattgtccagccaaaattgaactgggtaattaaattaacagatattttttcaaaattcaatcagtcgaattaatttggatgaagttgagctaagttatgcatttatatgtataattttttgttttcggacacattggcggatttaagaaacgctacagcacaccctcccttcacatggatattgtctaattacagtagtaattttcactttctccctctcacttggacattgggtaatactgtgctttgtccccccccctttttttcgaaaaattttttatgtttccaaaagtcatgaaaacatgtttcgaagtcgggtctagaattcggaattgtcccaaaagaatgccggattcatgatcagcaactccgaaaaccttgtaaacatgatttcatgacttttgg

SEQ ID NO: 44118 - DNA, 1007 bp, Heterodera glycines
tttgccagcaaaaaatttttgatcagatcaaaggcctgacctgtaggttaggcaacgtaagaatcactttttttggacacttcagtaccaggcgaatagctcgtaagggtttgctcggagcagggggtcgccagcggacttattgtagagctcaatgagctcaatttttccaaatttaaaaatttcaaaaattttcaaaatttttcgagttaggcctaaaattcggtttttcggtttttgaattttatgattttttaacgatttttccagggaaaacgaagaccacttccaaaacatcgttttttgagctctatcgattagtgatgtttttagaaaattttcgattttttccaggaaatagaaaaattttttggcctaagcgggacatttgagtcccgggcccataactcgtcgggggttggttctagccaaaaattgccttagggcaaaattgtagagcttttaaagttctatcgaatggtgtactaaatgttcggaaattttcaaaaattttcgagctaggccccctagaaatttttgaaaattttttttgggttgaaaaggggggtgaaaaatttttttctgtggtattttgagatgctgattacgaatatgacctttgtttttcgtttcataatttttagaattttttaaaaattcgaaatttttttcaatttttttgaccctcgggattttggggtaaattttgaaaattcgtagctcattttgaagtgggacgattttcatgcaattaagctttaaaaatagcaaaaaatcgggagaattttatgaggtttatttgaaatttataccacaaaaacaaaaaaagttattccagaaattctggaaattttcgatttttcagaaaaaaattcagaactcggttctgtaaaggtgtttttgaaatttttatactgaaaaaatccgcgattttttgctctataatttaaattttatttcatgtttttatcacttttttgaaaaaagtataaaaaataaagtgattt

SEQ ID NO: 44119 - DNA, 1275 bp, Heterodera glycines
cgaaataatgccaaaataaatggacgtcctggaaaaaaataattgctgactccctaacgaatacctggattggttttgctcgttataattttttttcaaaaaacgaccatctcttttttcggggtaatacgaaataatgccaaaataaatggacgtccttggaaaaaataattgctgactccctatcgaatacctggattggttttgctcgttataattttttttcaaaaaacgactatctcttatttcggggtaatacgaaataatgccaaaataaatggacgtccttggaaaaaataattgctgactccctaacgaatacctggattggttttgctcgttataattttttttcaaaaaacgactatctcttttttcggagggaaatgcaatttgggaccaaacgatggccaaaagagggagggggggggcaaagggatgcgaattattggcgtttggaaaagtttaattttagaagaaaatcattgaaagaaatggaggcattcgaaagggggaaatattcggcaaaagtaaagtgagacgaacattaacagaagagaaaagagtggccaaaaggaaaaataaaataaaaaacaacgaaagaaaaaagagggaaaacacttttaaacattcatcaaaataaagaagaaaaaaacaaataaagcacgcttcgcgggtcaattatttttcaatggttggcattggcacaaagaaaaaagtacaaaatgcttttacatttattggcataattatatgtgccacctttaagaataatcatttgatcaaattaaataaatatttgtgtaattatttatttaaacacaatttctctattgtccatgcaaattttctcataaacattcagaaaagcgcttttgcattcgtaacgagcacgaagccaatcgtacaaagtggccttaaaattggaaattataatcaaatggagtgaattgaggagctgttacatcgaacatatcccaaaactctgctgctgtttggtgggagtcggcacaaagcatttggaatctgaacagattgatcagtacggtagacatcacgggtcaatgccccctactgaactgatcagatagcgatctgaccaatggctgaccttctatcaagctttgttaatgggactgatcaatgttctccgtccgttgactgtttccattgtctttccccacttacccttgaacttctctgaccattccttccaccgttcgcattctctacaagggggtcctctaaagctctgcatcccattgcattcggaca

SEQ ID NO: 44120 - DNA, 920 bp, Heterodera glycines
gtgtgactcggtgtaaatgtgcgaatgcgcaggtcacgccggattccggatgttcgacgtaaaaggcgaaaatgggcggatgatggctgactgcttcgccgatgaacgtcttctgaaacgtgggaacaaatgttagatttctcaatgagtgacgaggctatcacttaaactggacctggttggttgctgagcccgggaacggtccaccggcggttcggcttgcggacaacggcacgccaggcagggtccaacggcaacggaacacttcgcccaggatcggattgtacggcttcttcgcgtcgtcggttttgcgtgcagggtagaaggagttcaagtagtatttgaggacggcaaggaatctgaaaaaattgttgattcaaaagcgttgttgtcaaccaatcgggaaataaacaccgcttctcagcagtgttctcgtaggcgccggcgatcagttcatcaagctgaaatgaggtaagattgaacttggaaaaatttaaaaaagctgtgttcaccgaagaattcggcttacatttcgaggagagagcgtcgttccgagcacgaaggtgggcagcgccaaattctgcagagtctgaccggtgccgagctgaaaagagaatttctattaaaacaattcatcgaacaacgcgtcgtctacctgggtcactaaatgtctgaacacgccggcctgctcgctgttccagttgtcccgttcgtccgagttgttgtagatgtagtcgtagtcggttccgttggtgtcgtagttgccccaatctggcgcttgcattttgaaatccgctgccgctaaaaattgaaggggaaaggaaatcattagaattgatttgaagactatgaacaaaaacaactaaaaaaaagaagaaaaattttaagaaaagaaattgtggaggtggagaagagatatc

SEQ ID NO: 44121 - DNA, 841 bp, Heterodera glycines
ccaaaaagttttttaaaaaccacgccgcaaaaaaaaacgttttttttttttaaaaaaagtcgtagacttgccaaaaatcgcaaaatttggcagtttttggtgaaaatctgttaacaaattgcactcaaatttccaaaattttccccggcggcgcctatcggcaccgccggacccacccaccccttcccaaaaatttttgaaaaaaccgcgccgcccgcaaaaaaaggaattttggaccgtttcgaaatccctatctccatctttcaagtgaaaattattttttataatttgtcttaattacaaaaatagttccttctttgccttcaaatgccaatgtgactttgcacaccgctgttgacgaataaaatctctatgttttcaaatgactaaaaacaatggcgtataaaaattgatttatttgaaaagcaaaaaaaaagatcagaatagcgaaaaaaaaggcgctgtagaaaaagttggaccgtcgtatgaaaaaacggtcccgagacaccccccccccctgtcccaatcgtccgtcgtacggcccttggtctgagacaccccttgtatatggtatgtatggttaaatttgcacaaaatgtattgacccaacaatttgccattcactacacctacaacaaccaaaacaacaacaattgttaccttcgcttgcaggtacagcgtgccgccctttttccgatcatttgctgtgaacatgtgcccatatttccgctcaatttcctctcggtccagcggtgtttggacattcaaaatttgtgctgcttcctgcaataaatttatgcattcattaaaaaaaataaccacaaaaaatgcaaaaaatggt

SEQ ID NO: 44122 - DNA, 904 bp, Heterodera glycines
taccttattttttttaattttaaactcaaaaaattggcaaaaattatgccttttttgggccaaaggcggctgcataatgctattttttgctctccggcgtcgaccagtttcgaataactttttgtcccgaagagcaaaaaaaacataaacttttcgtctgcccctcccgaaaaatttttttctggttccgggcctggggcgacctctcctacctcgaaaatacacatctcagggttttcatcgactccgatattcccccctttggaaatgcgtttatttaatgcaatttttccgttatccgctgagcaagtacataatagccgtagtaagtggtctgcttcaccgagtacttcatcaatcagggcctgctcgaactgttggtgtgtgactgagcacatttgttatcactgtttaaccctaatcacatcaggcggcatcaatgattaatccacccgattcattactcgcaaatacaaaaaaaaatagatttttccgtgcctgtggtcagttagtgttccctcaatttttccttttgcctctgctcaataatccccccagtccatttttccgttgcctctctctgagaatgcgtcggattaattgggtcaaattcaaattatatgatggctcccctccccacattgtacctttttttgaaaatttatttaaattaaattgtaaaattgattttgtgaaacccgccaacaaattttttacacctactaattggtcatttaattacagagaatcccattttatttcaaaaaaggtgtgaatttcacacctggtcattgacctcttgaccccccctcccccactcacatttcaaaaaaaaaaatcccgacccaacccctcaacacccacggacccctccccaaactacgcaataggtttaggcttaaac

SEQ ID NO: 44123 - DNA, 1034 bp, Heterodera glycines
  unsure (1)..(1034): unsure at all n locations
tcataaatattttttcagaaagggttctgaaacgcacccaattttatttacatgttagtttaggcactctgatgctttttctttcataatggaggtgaataaaattttaattgctttttaactttgggaaaaagtttaggcttaactttttagtgaaagtttgatcactcatatttttttagtctaatctactcaaaccggttcagaattcaataaaaataacattcacggtgcgaaaaatggggtttgacaagtttattggggaaaaaaagactttacaaaataatacccctgggagaagggagtgggaaacatgatttcaaaatttttgttgaaatatttgtcgtgctctgaagggcgtgggaggggggggggcgaaggtccaccacgaggccgcgaagaggccgagtgagtaccttcggtgcaggaaaattattaaattttaaaattttttaattgctttttaaatatgccaaaaaatgtaggcttaacttttttagtgaaaattcgatcactcatattttttgctaattgagcagaattgtaccaaactttgcagatactccccggtaaaggactaacttacactgaaatgagcgccgagctagcttgctcaaaaaaatttttcgaaaatctgagtctttcgtttttatttattttttgcaaaattaattcataaatattttttcagaaagggttctgaaacgcaccaaattttatttacaagttaataagattctctgatgcttttctatcaataagggaggtgaataaaattttaaaaattttttaattgctttttaaatatgccaaaaaatttaggcttaactttttagtgaaaattcgatcactcatattttttgctaattgagcagaattataacaaactttacagggatactccccggtaaaggactaacttacactgaaatgagcgccgagctagcttgctctaaaaaatttttcgaaaatctgagtctttcgtttttatttattttttgcaaanattaattcataaatattttttcagaaag

SEQ ID NO: 44124 - DNA, 1051 bp, Heterodera glycines
aaaacaaaaaaaatgtgatttttttcaaagtgtccggtttgggggtactcaaaacaattatggggagcaaaaatcccaacgcagaattaaagtacaggctatagggaagctattcccgaaggattcggtctccccataaatctgggcgcatcggttcggggggactgccccgaaaacaaaaataaatcgattttttcaagtgtccgtttggggtactcaaacaattatggggagcaaaaatccaacgcagaattaaagtacaggctatagtgaagctattccggaaggattcggcctcttcgcggcctcgtggtgcgcatcggttcagggggactgccccgaaattttgaaaaaaaaattttttggataaaaattatttaaataaactgatgacaagataatatataaaataggttatttctcttcctttcagtatccctgcaaagtttggtgcgcttctgatcagtttctgaaaaaaaagttaagcctaaactttttggcctgtttaaaaaggaattaaaaatttttaaaaattttattcatctccctttttgatagaaaaagcatcagagtgcctaaactaacatgtaaataaaatttggtgcgtttcagaaccctttctgaaaaaatatttaagaattaattttgcaaaaaataaataaaaacgaaagactcagattttcgaaaatttttttgagccagctagctcggcgctcatttcagtgtaagttagtcctttaccggggagtatccctgcaaagtttggtacgcttctgctcaattagcaaaaaatatgagtgatcgaattttcactaaaaaagttaagcctacattttttggcatatttaaaaagcaattaaaaaatttttaaaatttaataattttcctgcaccgaaggtactcactcggcctcttcgcggcctcgtggtgggccttcgcccccccccccccccgcccttcaaaattttgaaaaataaataaaataataggagactcagaattttgaaaattttttataaaaactgatgacaagctaatgtgataaaacagg

SEQ ID NO: 44125 - DNA, 1495 bp, Heterodera glycines
ttgaacggtgatggctgctgctggggtgccacctttgtcgtggcctcagtttctccagcgtttggcagctgtcgaaatgaataaaacatgcagctcgtctgtgtgttaaagaaatttggcgagttaattgacttgtgtaaatgtggcctaaggcacaaatgctgtggggaactcagcactggggatgctgaacctaaagttggtggtggtgttggtatacgagtgagtggcgtattgccatggttgacaagccctatgagttcgtggatcggaactccttgcctggggaccagtgtgcttgcattcgaaaaaacacgaggcataagcgcccgaaggcctttggcctgaggaagtgtcctaaccggaaaatccggagtgctcgtgtgagtgcctgtgcactgccctcggagctgtgtccagcggcgagatggttcttcccaagtccgggaagctcggatgcctggccagcgctgtgtcattaccacttgctcggtcgccttcgccgcccatgcgcacgcttgcgctgaacggagttgtttctgctgaaactatccgtctttacaagacggctgtaatagcggcgcttggcaacgctcgctagcagctatctggttgatcctgcctgaactgatgtgttcatttcaaagattagccatgcatgtgtaagtttaacctgccagacagggaaactgcgtacggctcattacaccagctataatttacttgaccttgacttcttacttggataactgtggtaattctagagctaatacatgcaccaaagctccaatctccccagagcggagcgcatttgttcgccacaaaaccaagcgccctccgggcgtccagtgttgactcagaacaactaagctgatcgcacggtcttgtaccggcgacgtgtctttcaagtgtctgccttatcaactttcgatggtagtgtatctgactaccatggtgatgacgggtaacggaggataagggttcgactccggagaaggggcctgagaaatggccactacgtctaaggatggcagcaggcgcgcaaattacccactctcaacgcgaggaggtagtgacgagaaataacgagaccgatctcttatgaggccggtcatcggaatgggtacaatttaaaccctttaacgagtatctatgagagggcaagtctggtgccagcagccgcggtaattccagctctcaaaatgcatagaattattgctgcggttaaaaagctcgtagttggatctgtgctagccgtccggtgcacactttgtgtgttactggtttggttggcttttctgccggtctctccccggcgttggcctttaccggtcggcgtcggtgggctggcgagtttactttgaacaaatcagagtgcttcaaacaggcgtttcgcttgaatgttcgtgcatggaataatagaagaggatttcggtccgattttattggttttgctgaacgagataatggttaacagagacaaacggggccattc

SEQ ID NO: 44126 - DNA, 912 bp, Heterodera glycines
atttccgcagctcttacggtaatggaaaaaattttgaagaggctctccggaacggattagcatcggggttacgagatagaaaattgtcctaaaaagagatagccatttttctgagaattaattcacaatttccgcagctcttagggtaaggaaaaaattttgaagaggctctccggaacggattagcatcggggttacgagatagaaaattgtcctaaaaagagatagccatttttctgagaattaattcacaatttccgcagctcttagggtaatggaaaaaattttgaagaggctctccggaacggattagcatcggggttacgagatagaaaattgtcctaaaaagagatgccatttttctgagaattaattcacaatttccgcagctcttacggtaatggaaaaaattttgaagaggctctccggaacggattagcatcggggttacgagatagaaaattgtcctaaaaagagatagccatttttctgagaattaattcacaatttccgcagctcttagggtaatggaaaaaattttgaagaggctctccggaacggattagcatcggggttacgagatagaaaattgtcctaaaaagagatagccatttttctgagaattaattcacaatttccgcagctcttacggtaatggaaaaaattttgaagaggctctccggaacggattagcatcggggttacgagatagaaaattgtcctaaaaagagatagccatttttctgagaattaattcacaatttccgcagctcttagggtaaggaaaaaattttgaagaggctctccggaacggattagcatcggggttacgagatagaaaattgtcctaaaaagagatagccatttttctgagaataattcacaatttccgcagctcttagggtaatggaa

SEQ ID NO: 44127 - DNA, 965 bp, Heterodera glycines
ttttttccgtaaccagaaattttgagccaaggcctcaaatcactcaaaatcgctttattgaagatcaaaattcaaacagacaaaatttcacggatagacagcagccaaaaacatacgtgaacagaaaccccaactggaaccaagttggtaaccaaaacccgaaccaaaatttccaaaaccaacaaaatttgccaaccatcgacaaaactcaagattctccgaattcattacaaatccaaaaatattctggtacccgaactgcaaatatgattgtgatcactgaacagcgcgaaaacgaatgcgaagacttagttttgtgcaacaacctttcactaaaagaaattccagattttgagaaatttttcaattccttatccactcacgcatccaaatttccatccgaaaaacctgcagaaccagaaatttccgaatgtcttaaattgacactgaaagtggaagggcaaaacgcaaaaactttgggagactcgggtgccgaaacgaacattgtcaatcccgaatttctttataatttggcaaaaaaaatgaagttggatttgatggattggggatttaacccaaacagtgggtctgcaaaaatgccattcgatgatattacaattattggagtcataaatataccagttgaaactacacattataagacaagtgttccctgcttgatctcgaaggaaagatttaattttgatttggttttgggaacaagcgcattggaatcgctcggtttttacatcgggaattcaatcacaaatgaaattaatcaatttacgtctaaggacccaaacgccgaaccttcccaacagttaaattcagtcaaaatttctgcgtttactgttaaaaccccaaaaactgagtctgccgaaacaaagcataagagtcaagcactccaaacaaatcgtttccaatttcactcaaaaatacccaatcatttaagagatgtgatgaaa

SEQ ID NO: 44128 - DNA, 1190 bp, Heterodera glycines
  unsure (1)..(1190): unsure at all n locations
ttttttatattttctgtttaccaaatccgtatagtcaggcgtttcctaaaaancgacaanggagtagaaaaaaaatgtataataaaaaattaaatagattacgttaaattntaaaaatataatttaatctaattgcttctgaaaaagttattggccttcgtccgattgaataaattggccatttgaacaaacaaaatccgatttcggagttcattttgcacaacagagaatgccttattgtttttgggttgccaatttttgtacatattttggcatttttgaaattttaaatatcaaaaaagcatctttaatttgaaatgatatcaatttcttaaattattgcaaataatcttgaaagttttttctcatctctcctttcgttgtcctctctccttggggtcagggtcgttttcgcgtggccattttcgcgtggttgcatattagataattcatgctctattattttaccaaaaaattgttttgctcttatttttctttcggattttaattattcttttcagtttgaattttttggatcattaaattgttttctgacttatttaggtttataacactgatcctgctttcgaagagcagtctaaaatgatcacctcattggccttcctgcccgtgcatgacccagaaaacattatcaatttcctcgttggtatttcccgaaactatgagatgcgacctttcccgaattttgttcctttttgttaaattaatgaatttttataaactttcatttattttttttccgtttgacacacactcgaacaaactgacaagttgttttcaatcatttaaaatattcactttaatcagtcgatattaattaataaagtctaaaataattataatctgttgcaacaattaatttccttttttattttagagaatattgctaaatagtgaacttatttactactaataactctaataaattaaacacttttttataaaaatgtatcgaaaatatattataacgcgaaaattgacatattgactgtttcaatacagagccataagactagttaaagaaaagttgaaataaaattggtcaataaattagaaacaaaattatttataatattctatgcatcatcaaattttatattttagtctcccattatcaattttaacaattttggggaggaaagtgcaaaattttaaatttcagtaattcg

SEQ ID NO: 44129 - DNA, 63 bp, Heterodera glycines
aattcgttggcccacacaaagtcctgagacctgacggaacagagtttggcactttgacaataa

SEQ ID NO: 44130 - DNA, 1158 bp, Heterodera glycines
gcccgtccaaggccaacaaaaattgaaaaacgggcgcgaagcgcctaacaagctaaaaaacgggcgcgaaacgcccgtatgagttcaacaaatttaaaaaacgggcgcgaagcgcccgtcttgagctcaatgtggactaaaaacctctaataattttttaaaaattcaaaaaatctctccaaccaattcgatcaatttgaatcgcttcacagtctaggtagcgaagctcccaaagcgcgaagcgctttttcccagctaaatagccgacggttcttactatatatgttatattgacaaggagtttcgtttgcaaaaacaaaatctcccggccgaaggccgggagcgccctgaaagtggtggaagggtcttacaactttttgaggagaatccgggaaaactatagaaaaaaatttagcgcggacgactgagtcccagggacggatttctcattttttcgtgcatttgggggcccgtaactttttttctaaaacccaaatcaaaaaatgtctgctgtgagggggctaagttgaagtgttttctaaaaaacaaaaaaaattccaagcctctatctgcaataggaaaggctgtaggttcgtggactttttcagtaccaactttgtccagttcagtcccggttgaataactcattagggtttgatctgggcggggagttaccagcagacttattgtagagttcaatgagctggatttttccagtttttaaaatttcgaaaattttcaaaatttttcgagctaggcctaaaaaacggttttcgggtttttgaattttaggaatttttaacgaattttcccagagaaacggagaccacttccaaaacatagtttttcgagctctatcgactggtatttttttcggaaaaatttcgattttttcccggaaatagaaaaattttttggcctcagcgggacatttgagtcccgggcccataactcgtcaggagttggttttagccaaaaaatgccttagagcaaaattgtagagctttttaagctctatcgaatggtgtgccatatggccggaaattttcaaaatttttcgagctaggccccctagaaattttcggaaattttttttcggacgaaaatgggggtgaaaaatatttttctggggtaaaataaggtgctgagtacgaatat

SEQ ID NO: 44131 - DNA, 831 bp, Heterodera glycines
ctagcaaaggctgcggctgtcatttgcactcgtccttcgtctgacgcataaatcttcaaatcgtgtctgtacgtgctatgcaaccgtaaaaagccaagtccctgcgtgtcctccggtgagtctttgccgtccgtccggcgaatccccgggtaaagtgttcgaaagagacgtcccaacgcttccgcctgtagaatgccggccgttgtaagcttaaaaagttaacaatgcctttgctttgcttttccctgagcacctctccgccccatttgaggatgagaaacaaagtaggcacagaagaagcattttggcattggtcgcttctctctctaccgcgcgcattttgcagcaaggttttgtcggactcaagcacaaacgacgttttgccagccgtgttcgccttttcggcactcgtcttcaaatacttcagctgaactttgcgattgattcccgaaaaatgaccatacctaaaaacaaaacagccatagaattattggttaatgaaaagaaaaacaccaaaatggcacttcaaattgttacaccctggcaatacttctcttaacgagactaaaaacaaaacacagacatcatcaccaccaccactcttttcatttttatgtttttaaatgttagaacttgataagcaaataggtaaacaaattaaatggcaagatgtgaaggaagatatgtttaaaagtgatcacaaaatattcaaaatagaccaatgtaagttaaattacataaaatgtcaacaattcatttgtattatcaaattttttgctgtcgatttttcaccataacaaaggcaaagcacagaaaaagcctttacgatgc

SEQ ID NO: 44132 - DNA, 1169 bp, Heterodera glycines
  unsure (1)..(1169): unsure at all n locations
tcattggctaatagctaataggtatgtccttttgnagtttatgcagaaattttagaaaaatttggttgaaaaataacgctggaatgtttttgcgctgattttgttgtaattgtaacagatttttgagcaaaaaattgcaaaaatcaaggcaacgtacattcatataatgaattgggcgaataaggttttgtgaaaagtgaatgcaaaaacgacgagcaaatgatgaagaaaaggtgaggaatgtgtgtttgggtgttcccaccactcaataggaagaaaatggaaaatgggggagaaatggatggggtgatttttcgccctttcgacgacgtaaaatgcaaagaacgaaagagggaccaacctaaaaaaaaagtttattgttgcctcctttttttgtttaaattaggtaggtaattaacgaatgtttggaacttaaaattttttttctaaattagggactaattaaaattaaataattatttgaatacaaattctatttattattttttgtagagtgccacgggaccgggaatttttgccaaaaccgggaccgggacttgccgggacctgtgaagccgggaccgggacctcgatttttgttcgggaccgggaccgcaagaaaaaccgggaccaaccgggaaattttaaaaattcaaaaaaattttaaaaatttaaaaaaaaattttttaaaaatttcgcaaaaatttacaaaaagttgtaaccagaaaagtctttgggctaacttttgatattaatagcggtgtgaattaatttttttcaaagagtagccagacaggcagacaatacataaaaattgcgaaaagtcgaaaattttaaagtttttcttaataaaatttttctagaccaaaatcttttggctttttgcaaggctaatagagcacgtgaagagctttcgaatgataccaagattgttggatttggatgccaaagaaaaaaagctatcgtggaaaaataaactggcgccgaaacgcgtgggtcccttttgtatggtttttgctatagtagagagggaacgggaattttgggaaaaaccgggaccgggacttgccgggacctgagaagccgtgaccgagaaatccgtctgattgaccgtggagcgagagccgggaccacccgggatgttttataatttcacaaaaatgttaaaa

SEQ ID NO: 44133 - DNA, 1142 bp, Heterodera glycines
gggcaaaacaccaaaataggtgaaaataagtttttaaacttttttttaggttttttaggtgctaaaaataaaaacctagaaaataggtgctaataactcgaaaagtagcttaacaacagccaaaaaaaaacatgtttttcgtgcatttcaggctacggggagctcaggaaaaaataggtaaaaacctaaaaatatcatccctatttataactagggatgtaaattatattgactgaaatatggacataaaatatggactaaaaaagctcaaaaatggccaaatatggactaaaaactgtcaaaatatagttttaaaacctcaaaaattcaaaaaaaaggtttatatatttaatatttgcttaaataaaacttaaaaataagataaagaaccaaaagatggatttaaaactaaaaatgcaaattttgtattgtcgtccgttgtataaaaaaacacctccaagtttgtcaatttcaaaaaaatttctcatttaaaaaaaaaagaaaaattcgcaaaaaaatggtgaaaatatttattaaaattgccaaaatgacgatgaaaacgcaaatttttcgtatttttggggatgcaattttttaaaatttccaaaaagtcgatctttaggggtgtaatgacgacgaaaacgcaaattttttgtattttcgaggatgcaattttttaaaatttccaaaagtcggtgtatttttcgctttttttgcattttcttgtgaaaatgtgccaaaaaagatcgaaatatggactaaaaaggcaaaatggcgaaatatggatttattccccaaaacccccaaaatatggatttatatggactaaaaaacttcaccaaatcaaaaaattttaacgcagaaatgctatttttgagcccctttcttcatagcataagcgcagaaaaacatgttaatccatataatttacaaccctatttatgacaatcccgaaccctaacaaaattcttttttttttttgttcgaacatgggatattgtttgggaattgttaaatgatcagtgaaacccgaaaacaccagaaattgaattaagacaacttttattaattgacctaaataatttttgctaacttggaccaaatttttcgacaaataaaaatgaatagtttaccaatacagg

SEQ ID NO: 44134 - DNA, 1237 bp, Heterodera glycines
  unsure (1)..(1237): unsure at all n locations
cgtacagacgcaacgaagacgaaatcaaacggctaaaggttggttggtggaggcgaaattaatatgaaaatggaaagaatccaaaacgccttgaaaatttgaaaaaattgaccctttttggttttttttgaacaaaccagttaatttttgctatttcgatttgattttatcaaatgaatattctaaaaaattctaaaagggtacaacattcttgggaacttttgatgaaattggtaggtatttttgcatttttaacggatgaaatttcaaaaaatcggttaaaagtcctctcaaatgcatttttctttcattaggaatcgatgggactgtccgacggcgactcggccgaaatggccgtcgacatttttggcactgccgccacggcgaaactttccacggcggtcggcagtctgcccgaacttttggagaagaagcggctgatcgacttgcacacgaacgtggccaccgcactgctggacaacatcaaaacccgaaaattggacgtattatacgaaacggaggagaaacttttgacaggccaaggttcgtgcacttcattccgccaccgtcgttctccccactccccgaaaattaataaaaacaaattagaaattttccaaaaaaaaaatccctaggatttttttcatttttcagaaattccggtcattgaaacgttgcgcgactgtccggacaaagacgacattttgcggctgattttgatcgctttgtgttctcggaatatgccaactgtacattttcacgtttaattaaaatataaaaaaattttgcgcaaaattccccttgtcaggctgaacagcgcgaacttcaggctttcattgacgaacgtgcaattagctcggatgcgctgcattttgtgcggcaactcaggtgtacgaaattgggtgcttttaaatttgggattttgataattcaagccctaatttccccaagatttttcttattttaaaaatattaccgaatttgtcagcattttttttagtcccgaaaaacatgattttcgatagtgttgtacaaataacagtgcatttcttttagggctttttctcatttgggtgccgaggcggaacagcaccaaggggccggcaccaagacggtcagcatgttctccaaactgctcagccactcatcgcgcttcgtcatggagggcgtcnaaaatttggtgcccaaaagcataacttaccactgacgaaggtgcatttattttaattagcttttt

SEQ ID NO: 44135 - DNA, 934 bp, Heterodera glycines
  unsure (1)..(934): unsure at all n locations
ctgaagtgtgctcaaaaagtacacttcagtaccaggcgaataactcgccaggggttgctttgaccgaaaaattgtttctgagcaaaaatgtgtagtatttgaaaggctatcaaaccaagttttaaaatttcgaaaattttcaaaatttttcgagttaggcctaaaaaacggttttcgggtttttgaattttaggattttttaacgatttttcccagagaaacggagaccacttccaaaacatagtttttcgagctctatcgactggtatttttttcggaaaaatttcgattttttcccggaaatagaaaaaatttttggcctgagcgggacatttgagtcccgggcccataactcgtcaggggtcggttttagccaaaaaatgccttagagcaaaattgtagagttgtacctcttctaatcactcttctaatcgctgttgtacctcttctaatcgctgttgtacctcttctaatcactcttctaatcgctgttgtacctcttctaatcgctgttgtacctcttctaatcactgttgtaccacttctaatcactgttgtacctcttctaatcactcttctaatcgctgttgtacctcttctaatcgctgttgtacctcttctaatcgctgttgtacctcttctaatcgctgttgtactcttctaatcactgttgtacctcttctaatcactcttctaatcgctgttgtacctcttctaatcgctgttgtacctcttctaatcactgttgtacctcttctaatcactcttctaatcgctgttgtacctcaaatttaaaaaaacgggcgcgaagcgcccgtatgagttcaacgattttaaaaaaacgggcgcgaagcgcccgtccaaggcnncacaaaattgaaaaaccggggcgaagcgctcgactganngcgtgaaagcgcctaacagctaaaaa

SEQ ID NO: 44136 - DNA, 1747 bp, Heterodera glycines
  unsure (1)..(1747): unsure at all n locations
tttgcccaaataaaaatgaaaaaaatttgtgtttttttttgaatttcgatgaaatcagagagacatttcttcaaaatttcacccctgttagggtcaatgatcaggtcggtgggctctttgagttcgtcatggacaaccacctgcttatgcgttccatccaaccaagctcgcttaaaagccatttgaatatcaatattttttaaatacatttttcatttaaccgaaatgattaaaaaaattttatgatatcaaaaagcttaaagcccaaaatgtgtcggaaacaagaatgaaaaagttttccttttttatattcttttttaacggattgggctaaaattatttaaatttttttttaaatttccattctttgtaaaaaaacaactaaaattttcgcaaaactcacttgaatagcgggcgtttggccttgatcagcccagtaaacgaagcgggctaaatgcaaaaaaaaacaataatcaataattaattaattcacgctaatgatattttaaatcgattaattccgcgcgcgcacttatcggatcaactgcaattgatgtgggcgtttcggtgcgtgtgctgagcaaaatttttctgttttctccattcatttggcacacttcaatgttggagcggtccgagtcggcattgatgaaataaatgttgtctaaagtgtatttgaaataggaataataaatacggtaaaatacaatccaaataaatatggtaaaaataaaaatccatttcccactcatccaaattcgtactgtattgatacagtatgaatcggtcggtgtttgttcaaaaataaagctttaaaatcaatttttactcactgtttatccaatcaatcgcaacgcttttgatgatgtacctaaatatagtggtattaaatttaatgttaaagttctctaaaataatatttattttttatgatattaaaaaaaattttatattttttattcctcaaaaaaattctattatttttgaaaaaattattaaattttttcttaaaaattttctatcaagccataacactaaatagattcaaaaagggattttggggaaataccataaaattttctataaaaataaattttttaaaaacctaaaatttcaactttaataatcaccaatcaattaaataatttactataattaattgattaatttgaaaattaattaaataattagtaaatttctcacccgccataattgttcttcacgatcacttggctctccgaatcgcccaacacaaaacggttgatgcccttgttgatgccggcagcatcgacaaagaaaatcgactttgtctcatggtggaaatcaacgctggtaatcgcggcacccgaaattggctcaaatgcgtccgatttggtgtggctttgatccgtcgggatggatttgacgaaatttttgcccgccaccacgaggaaggaggctgaatacaactgaaaaagcggtaaaaaaaattttggatggattttttattttaaaaatagaaagtttttacataagccaaaaaaaaggtttaaaaatttttgcaataattttgtaaatcatccttcataaaaaatcataattttcgtggatatttaaggattttcttggtttttaaacaagtcccataaatgtttattgtttttcttagacttagtaaaaatggtaattggcaaatcaaaatccgaaaaattgtccggcctttccagatcccattanaatccatgtcacaagccacctgcttttctgc

SEQ ID NO: 44137 - DNA, 926 bp, Heterodera glycines
tgtatttttggcgccctcttccccttcttcatcatcactcccccgcttaacggatacgaaccgaagcacagatttgtccctcaaagttcctcccattcatttttattacttggcccaatcaatcacaaacaaactttcagttaccatttttggccgaatttgttaattgttgtacatatttacataaactttctcccaaagaatatgttctttgtagtgttttgtctttgttttttctgcaattgctattcctctttttttacataaaaccgattaattaattattttgctccgtcagatgaatttcatcgcccttttatcaaaaccctgctttcgctttcatacgtttccttcttgcagtaaaaggtcggtttgcttccgatttgtcctcacatattttattttcaggttctcctacacactttcagtttttcattcattgccaagccgtttttctcgacttcgattgtttaggggcgaatcccataaaaattatgcaactgcagaaaacaaaagaccttcgagacatttaaaagatctcactctgcgagagcttcgcgaaattgcgacccttgcatacccacacagaaaacgcattttaggtatggtaacggaaaagaaagtggagatggggagaggagaccaatgaaacattgagaaataatctcgaatgtttcacccacattttttcatgcatctttgctcttctcactttagcgggcctttgctgtctttgtgtcagttcggtgattttcctctcagtccctcgaattctcggcaaactcatggatgaaatgaacaaagaaaaggaaaagaaatctgactttatttcgaaacttgtccgacttctcaaaggtggatctctccgttttgtgaatctttttcctaattatcctttagaaaatccttttgctttgctcgtcatg

SEQ ID NO: 44138 - DNA, 982 bp, Heterodera glycines
ccgatcctaaggcaccggctaacgccgtaacacactacctactacgacttttctgtgcttgcgcagttggtccatccggttgccgaaagggaagtgggttaacattcccacgccaggctagggaaatgacggttcgcaagagctgttttgcgcggtaacgcaaatgaactcgcagacgtcgtgtggagtccgagccagagttctcttttctggtttagggtgtgcgtgcctggaagtggctcagcctgagatagggatgttgcgcccgtaaagcaccgcggttcctgtggtgtctcgtgcgctccacacggcccttgaaaatgcgagggaagctatttgaatctcctgcctgatcgtaccgatatccgcagcaggtctccaaggtgaacagcctctagtcgatagaataatgtaggtaagggaagtcggcaaattagattcgtaacttcgggaaaagaattggctctaaaggtcgggtcagccgggctgttgcgtgaaacaggcggcttttgcccgtggctgtgtgctgttcttttggggatggtgcgtggactagtggtgagagctgcttgtggagcgcttcagctgcgtgtatgctcgtcagggtatgcacttcggttggcgctgaacgaccagtttagaactggcacgaactcggggaatccgactgtctaattaaaacagaggagacggatggtccttgtggacgttgaccgtgtctgatttctgcccagtgctctgaatgttaagccaaggaaacttgattaagcgcgggtaaacggcgggagtaactatgactctcttaaggtagccaaatgcctcgtcggctaactaccgacgcgcacgaatggatcaacgagattcccactgtccctatctactatctagcgaaaccacagccaagggaacgggcttggcaaatttagcggggaaagaagaccctgttgagcttgactctagtctgactttgtgaagaatcatg

SEQ ID NO: 44139 - DNA, 132 bp, Heterodera glycines
ggtcagagtcgcgggggcggtggcgggggcacgaaaattccgcccccgcgggggcgggggcgggggttaaatttgaattaattccaaaaattctcacaaaaaaattaatttttttgattgatgtgtttggct

SEQ ID NO: 44140 - DNA, 1007 bp, Heterodera glycines
ctgcccaccaaccccacacactaccactctgccacgagaccagttgcaaaaaaaaaggataattgtccactatatgctgcaaagatgatgacgtcatccctgcgaggggtacggtagtccagggaaaatcgcaataaataagtcgcagccaaaaggactcgaacttttggtctgccaccaaacccaacacactaccactctgccacgcaaccacttgccagaaaaaggataattgtccactatatgctgcaaagatgatgtaataggcttaaatttattgaaacgaaaccttcaaatttaaaaattggcgggaaaattcaaattcaaaaattggcgggaaattcaaattcaaaaattggcgggaaattcaaattcaaaaattggcgggaaattcaaatatggcttgtatattctaaaaatagtaacacttgacctagatttgagggcgggccgcatataaaaggatgcgtcacccactttccttcgtttttttcatgcttctatattcttttgaattgtttttttgttgttaaccatggcggtagttctagttaatgaactctgtttatcctggcaacaaaaattaatttgctttttaggtcttgaggtggttccacatgcattgctaatctcaagagacatttcaggtgccctgtcgtcttgtgcttcatgggtggcggtgagctgctcatcaggtcaagattggttaccttttgacaattattccatgtttgctgttaaccagggcggttgatctaattaatgagctccgtttatcctggcagcaatttcaatttgtattttagaacctgaggtctctcaaactatcttgctaagttaagagacttttcaggtgccctgtcgtcttgtgcttcatgggtgacaatgtgctgctcatcaggccaagattggttactattaataaaatcaatttcctttcctgcgcaatcccaatcaggatagtaaatataaaacaacctgatgcgcaatgcctttataaggcagcc

SEQ ID NO: 44141 - DNA, 1068 bp, Heterodera glycines
tctttttaattttggccagaattttctttctcaccctatctaaattcaaaaaattctcgtgaaagtattaaaatttttagtggaaaaaggtgggttgaaaaaatcgagtaatttttcaattttcagagaatttttaaactcgaccgacatataatttggataatcggataataaagataatcgaaatttaaatccaacttgaggcgcgacagataaactcgtgaacatttggcttcacctaaaaaattgtttttaaaaaaattaatttatacttttaaagcggattaaaagaacggacatagtgtgggcgaagtccgaatggggcaaacaatttaatttaattatattttatgaaatgttattatattatatatttttaataaaatcaatataatttctaaagaattcattgaagaaaatgcacttttattaatataataatgcactttttctttatatttttattttattattaaaatatttttaagcattttctttaatataccattctaatcccttttttatattgttattttattattaaaatatttttaagcattgtcaaataaattcatttattaaatatttgttaatgtcaattcattacgcaatttcattatgaattttagaaaatgaaagcctttatttatctggctattattctgtgcatttccaattactcattaagcaccaagtcttgagctttttattttaaaaatttttgttatataaagttatttattaatgcctaaattgttttaatgtacgatgcaaaaggataatattatgaatctaaatttttcaataatatttttaaattctatttaaaatatttttttgcattaattaaattgtttgccctattcggacttcgtcctagcaccaattggactatcactagcaaaattggtggcagcgacgccgggagccacatggctcagcgatctcgccagtcatgttcggcggtgtcccaatcagggctggacgcaattgcggattgcggattgcggattacggaaattgcggggtttttggacccgaaaagattgcggattgcgggttgcggat

SEQ ID NO: 44142 - DNA, 968 bp, Heterodera glycines
taaattttcatgactaatttcccgttttttggtgattcttttaaatcaatataataaatatatttgtttgttctaataaaataaaaaacagatttaaatgatctttatttcaattattcctaaatgcctttagttttcagctatattaaatattaacttcgcattaataataacaattattattttctttatttatcaattttttaaaatgttaaattatttctatactattctttaaaaatttctttataaatttttcatttctatattatttatttttgaatctgatttcaaatattaattttcatattcttaagaaaaattttagctttagtattaaagtgtttcatttattttgtaaatatttatctatttgaataaatattttcattaaaattattataatatgatatataccttttttatttttggattttttaaatgttttttataatgtaactctttcgtagtcttttaaatattcataaattttctcttccatcatattacctgttgaaattttagaaatactaaagaaatttgcatttgcagattttttttctatttaaataaacctattataattttgtaaatgttcatcatagatcccaaactgaaattgcaatgttttcttaggtgctgaaaaggactaaaccaacaaaaatgtttttgaaccagttgaaatcacgaaagtgtgcaaatttgggaaattatagcctttgaaaaagttaaataataatttaatttttcctgtggctaaatttcatgcgcaatacatttagattcattcatgaagcatctcattaaatttttttgcttggtaggatttatttatattgaattataattggtggtggaatttattttattattatttcttatataattcgaccatccaaaatacttaatgggggacaaatataaaaaaaaaaatcaagggaattaagttcggaattttggcttctttt

SEQ ID NO: 44143 - DNA, 1060 bp, Heterodera glycines
catacgccagcgcttttgtgaggtataaatttctcaaaaaaagagatagccattttctgggatagagtataaattaaaaatttccctcaaaaataaaaggtctattgcgcaccgccctccctatcatgctcgagagcatttgtatgtgtataaaatttatcaaaaaaagagatagccatttttctgggataacctctaaatataaaaatcctctgtgaaataaaatggcgattgtgcacagccctccgtctcatacgcaagcgcttttgtgaggtataaaatttctcaaaaaaagagatagccatttttctgggatagagtataaatttaaaaattccctcaaaaataaaaggtctattgcgcaccgccctccctatcatgctcgagagcatttgtatgtgtataaaatttatcaaaaaaagagatagccatttttctgggatagagtataaatttaaaaattccctcaaaaataaaagggctattgcgcaccgccctccgtctcatacgcaagcgcttttgtgaggtataaaatttctcaaaaaaagagatagccatttttctgggatagagtataaatttaaaaattccctcaaaaataaaaggtctattgcgcaccgccctccctatcatgctcgagagcatttgtatgtgtataaaatttatcaaaaaaagagatagccatttttctgggataacctctaaatataaaaatcctctgtgaaataaaatggcgattgtgcacagccctccgtctcatacgcaagcgcttttgtgaggtataaaatttctcaaaaaaagagatagccatttttctgggatagagtataaatttaaaaattccctcaaaaataaaaggtctattgcgcaccgccctccctatcatgctcgagagcatttgtatgtgtataaaatttatcaaaaaaagagatagccatttttctgggataacctctaaatataaaaatcctctgtgaaataaaatggcgattgtgcacagccctccgtctcatacgcaagcgattttgtgaggtataaaatttctcaaaaaaagagatag

SEQ ID NO: 44144 - DNA, 1059 bp, Heterodera glycines
ggggggggggggaaccagaaacaaataatttagagctttaccaatcatttttatctattaatttgaaattggaaagttttttatttggcagattccaatgggcaattgattgtctgatttacttggtaattttagtcgagtatctggtcaatgatcaaaaataatgagtgagtgacacgttttaccttttcggcatttaatcggttattgccctaaattgctgtccgttgtcttgatatggtctctaaattcgatgttccctcccattttctcaattgtccttaatgttcctccgcttcctcagccgttgaacaatagtcccgttcccgaaaatttttggactttctaatgaatttgttaaggagattttcagaatttgcgaccccccccccccctcgcaggccccctttgcgagcgagggggggggggggggtcgaccccaccccctaaaaaatgtatggtacagtcaattgcctgccacctttgctgtgttgtttcgacaagtgcggtccaccatcatttcgttgttattcgacgtcacgggaggcaacggaacattgcgaagcaccggcggcggttgtggcggaggagtggcgaatcgaatgtttgaaacttctaaaacaaaaatacaaataagcaaatgtttggtacagcatccgtatgtaaagcttttgccttgtgatccgttgatttgttgctggtaatccgacagttcgccaatcggtttaaatttggcggcgagactccctgagaaagtttgaaaaaccccccccttcggccgcaaagtgccccaaaattggggaccccttcgcatcgaggggggccggtgtaaaagaggggggggggaggtcgccgacgaacgagaaaagagggaaatttctgaaaatttttggctatttcttaacaaaattcattaaagattcttaaaagtttcacccggcggcgcatatcggcaccgcccccccccctaaaaaacctaattttttttcttataaaattagctcaaaatacacaccgtttcaatccagtgccaaaaagatttgcatgtgtggcaaagtg

SEQ ID NO: 44145 - DNA, 1130 bp, Heterodera glycines
  unsure (1)..(1130): unsure at all n locations
aatttgaatcggcactaatcccatgagtaatgtcggctaaatttgcatttcctccgtgcatatcaagtgctttcctgacnaatatataaaaagtaataaaaagttttgaaaaacaaattaaaaattttggaatttttttattaaaaaaccaattaactaaaaactcaaattcaattcaaattcataacttttgcagcgtctctttcattcctagcccactcagcagaaagtctccggaaaattatttaatagacaatcaatcaagaccaatctgtcagtgaagaacaattcgtcagtaatgaaaactccgttttacaaaatattttgcgatttaaaaaaattactgaattttggggttcacttcggttgagccccagccatgtaggctaatagagcatgtgaagagctttcgattgatacaaacaatgttgggtttggttgacaaagaaaaagttagagttcggggccaaacacttcggggcccaactgacggagtccggaactttgtcatcatttttttaaattaataatttaatttattaacatcttaaaaactttttaattaaaaatgatttttcactattaaaatagctttttaatcaaatacttatttttctagattttaaaataaaatctgtcgttagaaaataattttgttgacggattgtccactgactaatttttttctcagagtgatgaatttttcacataaaaataatttacctagatgccgaacatacttgaaatgctcaataatgacgctacggttttgctcaatccattcacggcactgtttcaatcggtcaaaaaggccagcctcccggttgttgtaacgcgagattacaacatttacgccgcatttgtttgtaattgttgcgcattctccgagttcacattcctcgtaaaaaaatctgccacgttcccatgcaggtccaacaataacttgatggagaaagctgtaaaaaatgaataccgtattaggccacctttatttttgaaatttgtggtaaaaaattcggcagttatatttttttaaatctgtagacattaaattttgctttattaatgacacattaaataaatttttgagactaccatttacaaaaaaattgtcatactataatgaatct

SEQ ID NO: 44146 - DNA, 956 bp, Heterodera glycines
  unsure (1)..(956): unsure at all n locations
tgcaaaaatctgaattttttttctaaactttgtaaccctgcaaaatgcctaacccacctcagtgagcttcgttttcttttcattgaattgctgcgccaacacctccctcaaaaaaaatcttagaaagttttttcataagaaaattgtaagtaaaaaaattttccgagaaattttcagcaatttttttgaaatttttttttaaacattttgttaggggtcgtacgaagggaaaaaaataatgaattttggcgcaggataaaaatatctccttacaaagaaataaatttaatagctttcaacattctctattctatactcttaattattccattgtgaaattgaatgtgccttcgcgaaagtgtgctcatcaaaaatattgaaaaagtgatggcttgcttaattgaatttgcaaaacaattaattttctgaattattcatttgatatttgataaaatgttactcctattttattatttaaaatgcattgaattctttctcttttttgtttggctttgcttatccatccaattttatttattaaaaaaatgaatttttactgttttacataaatttgcgcattttcattttttagctttgttttgcatattttcaaatgtttcgttcgccatctgagccaagcccgttctcgtcaactcggtgcccccacgatactcaggcgcgatgtggacgtccgtactgtccatttgcacaccaagccgacgacactgtcgacgtcgttgaaggtgaaggaatgccgaagttcggcgggagggagtcggtgtaaatattggtaatccttcggaattggtgtcatgacaaaaaaatctaaaaattttcctacaaaatcactttccatggtaaaaagctgcgctgttttctcgggttctttatcagagtgcattttttttacctagaaaaaaattaacgaaaattnattctcagaagtgtaaaaactc

SEQ ID NO: 44147 - DNA, 839 bp, Heterodera glycines
gacacggcgccgagcaccgcagccctggccaagtcgccgccggtgcttcgcttcgcaatgaccctgaaggcaattggcacattcaaatgttggcattaatttgagttgtattttaaatcattcaaaaactttatccctatagaatcacttattgttaaaaaaccgccaaattttgactttgaaaaggagtttcaattatttcaagctaattcccgctgaagccgacaaaaaaatatttcaacaccaacttggtcaaatcattcgtttagagtgatcgggacaccttctaatacactgaaaatcggaaatttttggaaaaaaaaaatttggtcaactcaaaaaaacctagcgaattccaaggttgcacatttccattaaaatttcagcttgatttgacagtgttaatccatactgactatttattttaaaatttatgttttttttttaatttaagcaaatattaaaaataccttttttctttaattggttgtccaaaaataagaggaacaacgaaaagttcgttgataagaagaatgaaaaaaatgcaatgaattttcatttctcaaagatttgatgaaattatacaaaatctacaaaacattaatatccaaatgaataattaaatgttatcccaaaataaaacaatttattaatttgtccgtccgtcgaaagaagaggaaaaaaatggagagcattgagacatagccaaaagaacagatcgaaaagaagagattgacatgagtaaattgaacagttgttgaacacaaaaagtgagaaaaattggcaatgccaaaggcataacaaaacaaattaagcagggaaaagtagaaggagatgag

SEQ ID NO: 44148 - DNA, 654 bp, Heterodera glycines
aatctatgttaattattaaatataaatcgaaatacgggtagccctttaaatattaaatagaaaaatttgttttttataaaaatagtcttacaagaaatagtctcgaaaaaataatccaaaagtcaaattacggatcaaaattacggaaaaatcccaaaaatccgtaacccgtaatccgtaactcccaaaaccccgtaatttccgtaatccgcaatccgtaattgcgtgcagccctgctagggacgcgacttttagtgacgaaaaatcccgaaatagttaactaaaatagtgccaaaaaagtgacaaaatagtgaaaaaagtccgaaatagtgatgaatagtgacataatttttagccaaaaattgagcaaaaaataatttttattcactgattgcagttgcaaatgagctgcatttcctttataaaattctcttagcaaatattgacattttttaaatcaaaaattttgtcaagaaaaaaaatttgggggaagaatttttgaaaaaattttccaattcttagtggtgtatttttaaaaaaaggctctactgcattttacgcgtccaatcaaaattttcctaaatcgaacatccttttgacataaggtaccaaccattgcaaaaagaaataataatttaaatattaaaacgtaac

SEQ ID NO: 44149 - DNA, 892 bp, Heterodera glycines
  unsure (1)..(892): unsure at all n locations
aaaaatgtaaaagactaaaaaacggagccctaatncatgtaaatctttttttagcgaagcataaatactctgaagcggaaaaattggaattaattgaaaaattcgacgaggccaaaagcaaaaacccaacgataagcgacgaagaattggaaaaaatgttaccggtcaaaatttccacgataaaacaatggaaaagaggcaccaaaagaaggaaaactgtgaaactttaggctagattatatccgagtgacaatagagaaattttcaaaaaattcaaaaaataatttaaatgatcaaatgcagtaattcgaaattccattttaatattcgttaattagggtccctcgaagcggcaccaccgagaaaattttagtgaaaaactgttaaaaatgcccaaaatttcaatgaatatctgttaaaaaatggtcaaaatttctatttttcctccggcggcgccatcggcaccgtcggacaccccccggttcccaaaaatttttttttgaaaaagcgcgccgcaaaaaaaaaccaattttattttgaataaacgtaattgtcttcggcattgggctggctacttatcatttcgtcactgatcgtttcgtcactgttcaaaattcgtcacctctgctttgcccaattccgaacccgaattcaacaaaaatttgaaaaaaaatttcaagaatggatttttgggggtaaaagataaaaaaattcgaattctcaagattcctttcacttgccggcatcataaattaaagtttatccatatcatttattcggcaatcctaaagaatgggggtcactaatttaattttttttttaattttaaatttgagctcagaatgagtatttggagattattgatggggctgattacgaatctgaactctgc

SEQ ID NO: 44150 - DNA, 1210 bp, Heterodera glycines
gtccaggcctggatccaggtctcgaggagcctggatttttcctggacctggatttttgtccaggaaatccaggtccaggcttttttcaaaataccgatctctactaaaaatggttgaaaatgtttttgataaccacttttcatcggaattggtaatatttatttacccgttttttgttctcctcattttcagcatacattgaatcagaattcgaaatttgggaggtcgtcgtttcgggagtgacagaattaacgcattggaacgaagggatatcgtcggaaatcttaaaggttgaaaattactgaaaaataaagcagagcaaaataactgattatttctgagcaaaaaaagaatcggctcattgtcagaaatacctccaccaccacttctgtctcctgcttaattgccctcttttccttcggctgttcgatttcttttcgtttcggtggttggaaaattggtggcggcggaatgcgagggtcaaattttggtggaataagcccaaagcgtttggcccgctcaagcgaagaagccccaaatcctcctccctccgtactttttgctaagcttcctttcgtttctcggcctccgttccgctcgccttcctagaaaattccaatgatttttcacatatatattaaacaaaatcaaacgaatagaaattgaaattcaattacacatttaaaaaggaattatttttttcggaaaactcacaaaaataaaagtcccaaattttacatttattttccttggtaaagcataaaattcatcctactgaatgatttacaaataagtcaccactcacatagaactgaattgcttcgcggtcacttgggtccatcatgtcgactggacatgccgaaacagtgccaattgatgacaatgtcccgccacttaaatcccgttatttgtctccatgctttgtttcgtccttccccttgctcacctcgtccctcccgcccgtccgtttctgttctcctcctgctgttgttgagatgagtccacacaagtgaatttcatcccgcgctctttaaacaattccattgactttgtctgtttgtaactttgcatttgtttgaccgcgctggcttcgtacgcttgtgggttgagggctttacgtgccatgccattcctggccatgttcggtttcactccgctgttaaaaggcaacacaacaccagtgacaggaagttgcggcaattcctcttaa

SEQ ID NO: 44151 - DNA, 1076 bp, Heterodera glycines
aaaattattttaaatctaaactcatttataaatattcggcaaacattcagatccaacattttaggcgaaaataaggacccagagttcacgattgaatggtcaacaccatgtgaaatgaatgaagaaatgaaggacaaggcgggatctctcctcatagaggtggcggacagaatgctgccacgcttccaagacgaacacaacaaaaaaatcctgcaagaggtaaaaatgtttaatagtttgaaatttgagaactttgttagattttttttccaattttggaaaattttaaggcaagcctggggcaatgggtgctatattttaaatgttgtttctaaaaattataaataatatacaaaaagtacataaataatttttctagctcgccactagcgtcaccgagaaaggatggttgatggaggagcagatttataagtgagacttaaaaactattaactctcaatctttcaaaaattatttttagatatctggatcgcctccattgagtaaaaggacacaaaatataaaaagtttcaattaataaaatagaataagaaaaactttttataaaaaattttaacgcgcaaaaatgaatgatcgaatttaaggcataaataggctaatatttatagttttttcactattttttcctgacctctccggggcctaaaacttaagaaaaacgagtttttttattgttgttatgctacttttcgagttattggcaactattttttataaggatagaccttaaattttttcaaaaaatacacccctacgaatcgaaccgaaaattttgaaaaaatgcactcctaacaaatgaaaaattttctcaaaaatcaatctccaaaatctatttatttatttcttgataagaatttgtgattttaaaaattattagctcaatactggcttggcctaattttttctacttttttgaataattttgtcattttacatccttagatttaaaagttttagcaactatttacctattcttggcaactattttgcggctttttttagaaactaaaactaattattttagcagtttttagcaactataaatataagcccta

SEQ ID NO: 44152 - DNA, 1249 bp, Heterodera glycines
  unsure (1)..(1249): unsure at all n locations
gagaatgagagtgatgnaattgagaggaggatcagagtaagagacatgagagagacaaagagaaagggagagatagagggaaaggaagagagagagagagaaggaagaggtgagagaaatggagagaaaaatgagagataaagagaaagggaaatgagagagagagggaagagagagaatgagggaaggagtaagagaaagaaaaaaagtatttttgatcagaaaaaatgcctaagaggatattagactgatcaaaaagagaaggaaacgaaaaaagacacgagactattttaactgagactcacaaacccaaaggaactgtccgagcagtacgcttccctccgcgaacggtctcggttggcaatgcgtccacgctcaacgccttccgccgccgccggagggacagaagccgcggtcgatgccctacggcgagagaatgagcgacttaaaagagaaaactcccatttgaacaagtcgctggaaaagcaacgtgaagaagcggaacgaacggcgattcggctgagacggatggaaacgcaaagccgcgccaacgcagaagcgtgggaagagcgcaaaagaaacgaacgaaacgcggcacttttgcgaaaacgggtcgaagaaggtgcggagcgagagcgactgcttcaagagcgattggagaggcgggagagacacattgaacagctgagcagggaacagcagggccgacttggggacacagagcgagttcaggcgacgatggcacaatggcgagcgaaagtggcactattggagcaacgagagggtacattgagccaagagcgagtggtgttgggtgaacggtgcaacgaactgacgcggagactcgaagcaatgacacgcgagcacagaaatgccaaaaagcgattggccgaattgacaaaggcacaacgggaagagaaggcggaggagaagcttagggtggagggaaaagcaattggcggagaagtaagctaaaaagaaattgaaaaagggaaggaaaagccaaaaaatagggaaatcagaaaataatggcacgaaagacggaggacagaagaagagaggcacagacgcagacagaagagccaaacaaagagcaggagaaaaagccaatgccaaacgaagctggtggagtgggaacagaacgcaaaagtgaggggagaattcggtcggcaccgccttcagcgggaaaagcggcaccgacggcggaataggaggacaaatggagagaggccgaaatgagagagatggc

SEQ ID NO: 44153 - DNA, 1404 bp, Heterodera glycines
  unsure (1)..(1404): unsure at all n locations
tgctcccgcgagtggacacttctcccgtgggtgtactctttcggcagcaatttgtaagctctgtgaattcgaaatggaaagtgagcagtggccaaactgagcacggcaccgaatggactgctcgacacctttttgatgttcgccgaattggacgaagcagtgaatggcggccaagcgaatggccgtgtcccgggagacggggtgcaacccgcggagcacttggtccagacactgttcgaacagctcttcgacctgtccggggtcgcttaagtcgctgtgggaaaaggacaaacgacggcgatggctggcggggacaaagtcatcgccgggaggggaacggtcgtgacgtttcattgtgttggcaccgatcgaacgaaaaatgccaaattggggagagaatgaaagagcggagaaggaaatttaaagaaatatggaaattaacgacggaagagatcgacgagcaaaaaaaaagcggaggaatcaaagaaaatgtgtccaattggaatcgctgggaccaaccaatcaaaaaactgcttccccctcccccccccacccgttgatcgacgaattgcgccgattctccgttaccctccgacccctcacgcattttgcccatgggccgcccgatcggcgatttgccatgatcagacacagctgttctgctgctgccctcccaaaaccaaaacaatcgcagcttcccccgttctctttttgtttcttcttctcgaaatctgatctcgcgggtaaagagccaattttttttttgtttaatcgatttaaagaagaaaaatgtttgggaagagttgagagggacaaaagcaatggcaaggcaaaaaagaaaacacaacaaaaaatggggagggggggggggggaggggnngagaaagtggaagtggaaagtgtggccaattaaaagaatggcaatgccaaaatgagggaaaatccgttggcggtccaaaaatctgccggcctttgttttggctctgtctgataaataaataaataattatttgcttcttccatttatccatcgattatctctccgccatcgcttcttcttccctgtgcctttttctcagttccatccttaacatttgattttgcagtcgcttttcctcaatttgttccttaatgagttcaaactaattgcttcgcgctctcccaaaattcacttgcaacagcaaattctgaagtcgcatttgctccactcgcaattgcttcgtttccctttccaattccgaatcggtcagcgaattgcctttcgaagggctcgacgaaagcgccggcggatggaggaaaagcggcgaatcgatgcacgaggccaaatccaacgcacgacgcttgggggcagccttttgctgtcgaagaatgaaacgactgatttcgcatttcgtattatcagcg

SEQ ID NO: 44154 - DNA, 1410 bp, Heterodera glycines
gctttcgaatgataccaacaatgttggatttggttgacattgaaaaaacttatagtccaaaaacctgccggcgcccaaacgtgccggcgcccaaccgacgtagaccggcatcgaataaatgaatggaaatggaattgtgtcgccgccgcattctttgaaaaattcatttttcagcggcgagtggcagaacaaaaattgttttattaggacgacaaagaaatgctgtgctccccgaccgcagcgttgagtgaaaaacgggggaaaacgccccccgggggcaaaatgggaaagtgcaaaaactatgtgacgggaaaagcggccgagaaaacgaccgacggccccgccctagttacacacactctctcgcccctctctctattctctgttctctactctctggtctcgtccctctctctctattctctactctctgctggtctcgcccttccccccgggactgagtcgtttcagcgccgaccgtttcggcgccgccaactttgaaaagttacatttttttccttgtcagttcaagttttaacaaatctggcatcaattacatttacctgttatcaacggcaccgatccggtcggcgccgaattggccgtttaccaccgccaccgtttttgttggaccaaacgcattcatttgttgtgtggcgctgtgaacccgcccccggcgctgctgccccacctcggggaatgtgccgtcgtcgagcgtgccgacaattgtgccccaccgccgccagcgatcgttgccctctccgccgctctttgctcgttgcttaggtgccgcagcggcagcgtccgtgccccggggcaacccaatgaatggtcggcattggcacgtacggttgaaaagttgtacggcacaacgcacacgaaaagagcagcgccgccgctttttttgtaccagaaaaattggaaaaaaattttaaaaaaaacaaattattattttctttcacatttggtggccaacaaaataatttgatcaacaaacaaatcaaatgtgcacataattctaacaaaaaaacaaaaacaattatgatgaaatttaaattatcggggatttttccgtcgttgtttctgtttctgctgctgctcccaatccgtcaataattcatgatcaccatcattaacggcctcattaacggtaccatcattagcatccgcttcttcttcttcttccgttgttgttggctgtggtggtgtcggggcggtgtaatttttgtccaaaaatatggcccacgggaagccgtggccccgcacatggtccccaaactgctccgtcagcccgtccagcgacgggaaggtggtcaggtggtggccggcggccatttggtcacgcaaaaattggaagccgaccacgagcgcctcgccgagcagcggtgagcgggatgactgaattaatgg

SEQ ID NO: 44155 - DNA, 974 bp, Heterodera glycines
caaaaaaagtcgaaagaagcgttatatttcagacatttcaaacacaaatgaggatgccgtgaatttgggagtggaatttggcgaaccgaatgccgtgataactttcgacaacgttgaacaacagactttgaacgaggctgaagtctcagtaatgacctttgagcgcggaaaaacaaatttttaaatgtcatattcgtactcagcgactccaaaaaccctaaattagatccgttttccgggtttttatgtgctttttagacttttggacatttcgtgttttttactcatggacatttcgaggcttggacatttcgtggcttggacatttcgttggtcagcggtttttactaattatgttataaaattcgaattaaatttctttttttcccacatcattgggacccttgattctttataattttttaaaatccacatcaagacaccgttaataaaaagctgcaacacgaaaaccgtaaaaaggtcagatttttgcattttttttataacttttttacatgacggtatttctttttgattgtggaaagccaattgagcttacctacctatttattttccgagtgtccattatcccatccccctttcttcagctgtacccgagtatataaagccgactaaatccaccttccagtcatattcttcatcccatccgcatttatttgataatttttttctgtcacttcttttttctaattctgtttgatttacagctaaaaaaatgacgtacaatccgaaagaagctgatagagaaattgaaaaagcgatgtaataatttaatttttgaatttcatttctatgggtaatcattttgcttttccattttcagcttcatctctgctgactgttggcacaaagtgtttgatttgctgccgccctttcagcttggcttcggaatcgcgatgatcagtcgccgttttgactattttgttgacgaacattacaaaactcgcaaatgg

SEQ ID NO: 44156 - DNA, 1069 bp, Heterodera glycines
caaatcttaatatctggtgaaatttgagcaatttaatatcccccaccattttttgtcgattttgaaattccgtttccatatttagtagagtccgcatggacaggataccgtacaatttccccacgccctcgtcccggtcccgtattcttaaactcgcaacatcgacatcggagtccagtaaaacagttcttttaatccttaattctatccgcttaatccccgacgatttttaattaagaaccccaacaaatcttgttgttgattttttgtcaattgtctcaattttttctcgtcctaaggtcggagacaattctaatttattttttttcaaaaataaaaaataggtcaaaaattggtatttcgtgaacaaattaacagaaatcctcaaaaaaagattaaaattagaaaaataattttttaaaataattttatttttaggaaatatattttttccacttcatcttcaaccaatgtttgacgcagcatatggtaatttcaataatattcatcgggaacgaagcaaaattttcccatgtctcagtggatttggatctgccgatggctcagcttttcggatcgaccggttttgcgctgccgacacatccgggtctcgacaagcagcatattgatcaaattgtgatcacgatttatcaattcttcaatgaaacaatgaattagggttgcgccaattggggggagagaaaatatttttgggaaaattgagaaaataaaaatttttgagaagaaaaaataatttgatttatcgttttaaatccaaaagaaaaaagaatcatttcgtctagtggctaacctacagtcgttctttgattcctatgatgctttcggcgatcgcaaaagtatgttttatagttttagttgcatgtctcgagttttatccaaaattttcgactgtttcttcgaccgttttaattgataattgtggctaatttgtttggcaatttgtacccaaccacaaaaaacacctgttgctgctgtggttgttgcacaacgcccctggcgttgtgatgccattctgttgctgctgctgtttttgctgttgttggtgctg

SEQ ID NO: 44157 - DNA, 1282 bp, Heterodera glycines
  unsure (1)..(1282): unsure at all n locations
agatttttaaatgtttggattttttttggcttaccaaaactttcatcgaacctgggttctttctattctctttcaaatcgccccaaattttttttacagcttaactaggccctattaagcttatttccagaaaatctcgcatgaattctcatttttaaattttttatagatttttaaatgtttgcattttttttggcttaccaaaacttcatcgaacctggttctttctattctctttcaaatcgccccaaattttttttacagcttaactaggccctattaagcttatttccagaaaatctcgcatgaattctcatttttaaattttttatagatttttaaatgtttggattttttttggcttaccaaaacttcatcgaacctggttctttctattctctttcaaatcgccccaaattttttttacagcttaactaggccctattaagcttatttccagaaaatctcgcatgaattctcatttttaaattttttatagatttttaaatgtttgcattttttttggcttaccaaaacttcatcgaacctggttctttctattctctttcaaatcgccccaaattttttttacagcttaactaggccctattaagcttatttccagaaaatctcgcatgaattctcatttttaaattttttatagatttttaaatgtttggatttttttggcttaccaaaacttcatcgaacctggttctttctattctctttcaaatcgccccaaattttttttaaagcttaactaggccctattaagcttatttccagaaaatctcgcatgaattctcatttttaaattttttatagatttttaaacctgtactttaattctgcgttggatttttgctccccataattgtttgagtaccccaaacggacacttgaaaaaatcgatttttttgttttcggggcagtccccccgaaccgatgcgcccagatttatggggagaccgaatccttcgggaatagcttccctatagcctgtactttaattctgcgttggatttttgctccccataattatttgagtaccccaaacggacacttgaaaaaatcgatttttttgttttcggngcagtccccccgaagcgatgcgcccagatttatggggagaccgaatccttcgggaatagcttccctatagcctgtactttaattctgcngtggatttttgctccccataattgtttgagtaccccaaacggacacttgaaaaaatcaatttttttgttttcggggcagtccccccgaacgatgcgcc

SEQ ID NO: 44158 - DNA, 1301 bp, Heterodera glycines
  unsure (1)..(1301): unsure at all n locations
gaattatgattaaatttttgcgtttcgaattcatttggaattaagaaaaataaaaattgataatcatttgatcatttttagcgcactttaagcaccgcgtttaggcagcgcagttccaaaatttattccatgccacagatattatgggcaggacacgccaagtacctcaaacttgggtaattaaaccgaagaaagaagtgcagtggggaagaatgacgcccaaaatgaaggaaatattcgatgctgtgcgaactctttgtgacccctctctgactctgccaatgcagcagttgaccatttttaccactatttttctctcattcatcgtctgctcgtctctcctttattataagctattttcctaagccaacgcccttttctccctcttttctgttagtcatttctcattggtgttgacgatccaacattcagtgtacaaatttgttaaacctctcaacattttaaatcaaaatcctaataaaaatttcgttgaatttctccgcctcttatttgtgcaaaattttcgaaaaagtaattttctatttaaaattaaaaaattcagaagcaaattcaagaattttttttatttttaaatgcattttttaccacatgaattatgattaaatttttgcgtttcgaattcattttggaattaagaaaaataaaaattgataatcatttgatcatttttagggcactttaagcaccgccgttaggcagcgcagttccaaaatttattccatgccacagatattatgggcaggacacgccaagtacctcaaacttgggtaattaaaccgaagaaagaagtgcagtggggaagaatgacgcccaaaatgaaggaaatattcgatgctgtgcgaactctttgtgacccctctctgactctgccaatgcagcagttgaccatttttaccactatttttctctcactcatcgtctgctcgtctctcctttattataagctattttcctaagccaacgcccttttctccctcttttctgttagtcatttctcattggtgttgacgatccaacattcagtgtacaaatttgttaaacctctcaacattttaaatcaaaatcctaataaaaatttagttgaatttctccgcctcttatttgtgcaaaattttcgaaaaagtaattttctatttataattaaaaaattcagaagcaaattcaagaatttttttatttttaaatgcattttttaccacatgaattatgattaaattntttgcgttcgaattcattttggaattaagaaaaataaaaattgataatcatttgatcatttt

SEQ ID NO: 44159 - DNA, 659 bp, Heterodera glycines
ttttttcaaacccattaattttttttacccatttagcgacacaaagtgattgttctgttacggctcaagaaggcattaatggtggaaaattcaatatctttttagttagaaaaccttgcaaaattaaaaccggactctaaacattattttttgataaaaatctgttcttacagctgaagtaaacccaaaaaaccctaaagaacaagtgttaaaattagtgacaaaaatgggaaaaacggacaaaaaaaaacattggtggaattttttttatgaaccgataggtaatggcatctcctgaaattggagcgtttttataagtgctagaattagtgacaaaaatgggaaaaccagacaaaaaacacattggctgaaattttttatgaaccgattaggaatatcggcatacagaaattggagcgttatttctttcttgtagatgcatgccaggggtggagcgcgaccgcgatccgcgattcgcggcattttttttgcgcgatccgcgattcgcgaccgcggcaaattgaatccgcgatgcgcgatccgcgaccgcgggattttaaatccgcggttcgcgatccgcggaatttgagagtccgcgacaattttgcataagattaaaaatattatttatcgaagcgattgattttatattaacatta

SEQ ID NO: 44160 - DNA, 1018 bp, Heterodera glycines
ggcacattcgccatcatgatctccgccgacttcatcacacgtgtcaacgtgaggagcgagaatcaaacgatcgagcagctcttcgtcattcgccaaggagtcgtcggaagttaggatagacataatctatcagctcttccttcgctcttaacgaggaactcgcggaggaatccagaagtgctctccggtttctccgagcccgatttggcggcacatttgcaagtacgctcgctcgacctcggcccagtctctggttgatggtcaatttcatcgtggtgaattgaccaaacaacggagacgtttgaaaacaggctgtcacctgagcggttaagccttcatgaggcacgaccggcagcgactcgtttgaagtcaccgctgaaaatgaccgtttttcctccgaagaggagatccttgtgctggcgaattgccatctctttgcacactcggtcgatgacctcaatcaccgtgttgtgaagcatggtgatctcatcaatgatgatgagttgggcctcacgaatccgacgggcaaagaagctctccagcggaatgcttgggagtttgtctaatgacacttctctacccagacgaaacgtggaatgggctgttttcccatatggcagcaaaatggctgcacacccagtggatgccgtagcaagcactttgtaggtgtatggggcctttcgcaagcgcctaataatttggccaaacaggaatgtctttcctgtgcctccatcgccgtatatgaagaaacggcgggggacagtcgaatccctagggttcgactgtattgccaacaaaacagcatcaaagaccttctgttggtcgctgttaagtggcggaggggtatttggctgtggacgaggatttggttgccctggaggcaaattcaaatcatcatcgccaaagaaaaactcttccattgccgcgtcagtatttttggcaattgaagttggcggggctggcagggtaaaatgcacacagcttaagttaaaagagctgtgcagccgcccatcaatgt

SEQ ID NO: 44161 - DNA, 1461 bp, Heterodera glycines
  unsure (1)..(1461): unsure at all n locations
gtccagcgctgaatcgcagctctctngggttgcgaggtgtagcgtatagaccgtgagcttgggttggcccgctgtttcaagtttcccttgaccggggctccagagaaggtgcaagacctgtccaactggcggtgcctatccatctttacgtgtcttggagtcgggttgtttgggatcgcagcccaaatcaggtggtaaacttcatctaagactaaatacggccacgagtccgatagcgaacaagtaccgtgagggaaagttgcaaagcactttgaagagagagttaaagaggacgtgaaaccgatgaggtggaaacggacagagctggcgtatctggtctgcattcacccgtttgttgctgtacgttgtactgctagcctccagactggggtttgctgtccttctgttcagtggcgaatggggcatttgcaggcggagtgcgctgagatgctcggagtagctgcgtgagctcggtcttgaggccagccttttggggtctggtacccggatcgggggagtgctgtttactctgggtgaattgtgcaatggtttcgggtccgtgttgactcgagctgggggtcggtggcggtcgcgtgcgacacgtaccagcaaccagttcggtccagctcaggctctcacttgtgcgttctcggtgtaaaagccggtcatctgttcgacccgtcttgaaacacggaccaaggagtttagcgtatgcgcaagtcattggggtggttcaaaacccaaaggcgcaatgaaagtgaaggcttcttacggagctcgacgtgtgatccccggcaccgcggtgttggggcgcaacatagtcccgtctcgatcgcacgcgatggggcggagacagagcgtatcgcgctcgagacccgaaagaaggtgaactcttcctcgagcaggatgaagccagaggaaactctggtggaagtccgaagcgattctgacgtgcaaatcgatcgtctgacttgggtataggggcgaaagactaatcgaaccatctagtagctcggttccctccgaagtttcccccaggatagctcggagctcgttaagcagttatactcggtaaagcgaatgattagaggacttggggacgaaatgtccttaacctattctcaaactctaaatgggtatgaagccagggttgcttgactctgaacccaggcgttgaatggtttgagctccaagtgggccatttttggtaagcagaaactgggcgatgtgggatgaaccaaacgtggagttaagagtggccaaagtggcccgctcattaaacctcataaaagggtggttgggttggatatagacagcaggacggtggccatgggaagtcggaatccgctaagggagtgtgtaacaactcacctggccgaatcaactagccctgaaaatggatggcgctggagcgggccacctatactccaccgtcattggcttgtacacgtgctggtcgcg

SEQ ID NO: 44162 - DNA, 995 bp, Heterodera glycines
cttttatttttgagggaatttttaaatttatactctattccagaaaaatggctatctctttttttgataaattttatacacatacaaatgctctcgagcatgatagggagggcggtgcgcaatttaccttttatttttgagggaatttttaaatttatactctatcccagaaaaatggctatctctttttttgagaaattttatacctcacaaaagcgcttgcgtatgagacggagggctgtgcacaatcgccattttatttcacagaggatttttatatttagaggttatcccagaaaaatggctatctctttttttgataaattttatacacatacaaatgctctcgagcatgatagggagggcggtgcgcaatagaccttttatttttgagggaatttttaaatttatactctatcccagaaaaatggctatctctttttttgataaattttatacacatacaaatgctctcgagcatgatagggagggcggtgcgcaatagaccttttatttttgagggaatttttaaatttatactctatcccagaaaaatggctatctctttttttgagaaattttatacctcacaaaagcgcttgcgtatgagacggagggctgtgcacaatcgccattttatttcacagaggatttttatatttagaggttatcccagaaaaatggctatctctttttttgataaattttatacacatacaaatgctctcgagcatgatagggagggcggtgcgcaatttaccttttatttttgagggaatttttaaatttatactctatcccagaaaaatggctatctctttttttgagaaattttatacctcacaaaagcgcttacgtatgagacggagggctgtgcacaatcgccattttatttcacagaggatttttatatttagaggttatcccagaaaaatgggtatctctttttttgataaatttatacacatacaaatgctctcgagcatgatagggga

SEQ ID NO: 44163 - DNA, 1019 bp, Heterodera glycines
ttatcatttctaactcacttctcaaattgttgataactttcaaatatatttttccaaaagtctgttgacactttctgaaaataaattctatactcatgtattttccacttattagattttgcaggcttattgctgcatgttctttgacacttcttcaaaataacctatgccctttattcgttcaaaacagcatctttgttgtttcgctttggattgacaagcccgatgataaatagctcgagcgcaaaacgcgtgcatgtttggaaagtatcgttcataccaataattgagggtttatttttaaatgaaattttatgataaaccttattatctcagaagctatttaattgattcgaatgtttttatcgcggttaattagagcaacgaaaattggtttgaatcgtgaagtttatcatttctaactcacttctcaaaattgttgataaattgcaaatatatattccaaaagtctgttgacactttctgaaaataaattctatactcatgtattttccacttattagattttgcaggcttattgctgcatgttctttgacacttcttcaaaataacctatgccctttattcgttcaaaacagcatctttgttgtttcgctttggattgacaagcccgatgataaatagctcgagcgcaaaacgcgtgcatgtttggaaagtatcgttcataccaataattgagggtttatttttaaatgaaattttatgataaaccttattatctcagaagctatttaattgattcgaatgtctttatcgcggttaattagagcaacgaaaattggtttgaatcgtgaagattatcatttctaactcacttctcaaaattgttgataaattgcaaatatatattccaaaagtctgttgacactttctgaaaataaattctatactcatgtattttccacttattagattctgcaggcttattgctgcatgttctttgacacttcttcaaaataacctatgatctttattcgttcaaaacagcatctttgttg

SEQ ID NO: 44164 - DNA, 550 bp, Heterodera glycines
ccctgcgatgagactgtagttactctcagagggaggatgacttgagaatgagaacatgcataaaaacttgagtatcgtagccacgcattttcacgcatattttaggaattttaaaattaattaaactttttgtaattactaattagaattttaaattacctctttaacaataggataaaattctcgaaattaagaaatctgactttcaatcgacacaactcttgtgctaattttctgaaaaaacgacaagatacatttatttgtgtgaaaattacgaaaaaattcttattgttagaagaaaatagaaaatttcataaaaaaacttaagaatttttgtagtatttttaataatttcctagaatttttttaaaatttccttgtttacaaatttttttcggggggggggggggtacgatgcgtggagtggaatgtaggttatgccggaatcccggcctcttaaaaaattatcgggctcttatacagtttaacccccatgatttttttccccatttctaagtgaaaaatgccaaaattttttttgactttatgt

SEQ ID NO: 44165 - DNA, 1134 bp, Heterodera glycines
aaattattgcgcgtaattgtcagggtttccgcgcgaatcccgaaaaactgaatctcgagtcgcaaaagccgacatttttctcgccctgaatcccacccgaccatttttctcgattcgcggcacaaccaatgcccaataatgccaaagaaaatttaaaaatgcattctgtttgtttgtgtgaggataaatagtgccgaaaaggcgatggtggcgattagctaatttatttttgatttttattatatcttacggatgtctctatttttatttatcatttatttaattttccagcaggatgttatgctcaaattttcttgcatttttatttttattattttattgccatttttcatgtgccatcaatccggatccaaagtttccagttcacacaattcaaagtaaaatatttaatttaatttgaaacatatttaaataaaacaaatttcaattggttccaatatggaatttccaactcataaaatccaaaaacacttaaagtaattttattatattttaaaacccatcaagcgtgggaagaaggctaccccccccccccccccctgaatttttgcgcgtgccttttttaaattttttttaggttgattatttttcaaaaatttccccattgttcattttaaaaaattttcgggaggagggtggctatagctagccataaatcatcagattccgccctggctacgcccctgggaccaaaaattttaagatttaattatataatttattaaaaataacttccaaagcaattaattaaaatgaaatttaattggtcgcaatatttccaatttactcaatctgcattaattagccaattcattaattcaaatagctcatttgtcagttgatgcaccccatcgtacagcaacatttggtggcccacccggcgtcagaccgttcatttcgggcagcattttcaccagcggcgttggcccggctgccgcaggtgcgatcagctcatcccataaccatcagccaaccgccgtctgttccgagaacgaatttcgctgtgacgatggtgaaatttagaataaattaaaagttaattatttatttttgtttatacattttgggaatatgtgggaaaaattaaaatttagaaaatactaactttaaaaa

SEQ ID NO: 44166 - DNA, 1093 bp, Heterodera glycines
ttggttcatagtcacccgtcgccagtgaagttcaacacttgctgcttgaatgtctcgtaacgcagtccttggttgttgatgacgtcgtagttcaacgtcatccctcgcaccttcagcacatattcaaactccgcatctgcaggtgcgttcagcctcagtttcaaaccatactaaataacatttaaatttaccgttgtgacaaattaaaatacctgatttgcaccaccactacagtactccacaatttcatgttgtgggtactcatccgtgaactgacccaaatgtgggccagttttgagcgggcagatgtcttacgggtggagaaagatcaacgaatccgtgtctgggaaaattttctatttatttgttgatgaactaataataattgtaccagtgtatagcagcccgcacccaggcgttcgcaccactttctgcattgcctttagtagtaggagccgtgcagccgaggtcatccacagagatatcactgaaatttttatattatatatatatttgcgctaatttattgatccatacttatgttggagcagtcgtgctcctcaacccactcttttttattttcgtagctgaggaggatgtgctcctcatcgagctcgtcaattgcggtcacatcgattgatcggttgtccaagtgttcccttaagacaaccgggtcgttagttatcagcgtctgcgaaagtccaaagatgcgcaaagagaaacgccccctttaaattaatccgattattattgacacttgaaaaggaaaacccacataaattattcagacacagctttgcaatcgaccgctttccttttttttgacagccatttttgatgggtcgatgcttattccaaattgctcatagcattcccggacgaactgcgtttcttggtcggcgttgcctttgattttggagtcgaatcctgatgcttgaatcttctgcgccatgaactcagcaatgtatggtcggaacagctgatcatcactctgctcgtactccagcacgcggaacactttgttgacgcgatacccctactcgatcgctgcgttcagttcaattgaagtgctcttgttgacccaaccgcgttg

SEQ ID NO: 44167 - DNA, 1155 bp, Heterodera glycines
ttttgctccccatattgttgagtacccacacggacactgaaaaaatcgattttttgtttcgaggcagtccccccgaaccgatgcgcacagatatatggagagaccgaatccttccggaatagcttccctatagcctgtactataattctgcgttggatttttgctccccataattgtttgagtaccctaaatattatctagtcagttcatttaaataatttttacttgaaaaaattttttttttggttttcggggcagtccccccgaaccgatgcgcccagatttatggggagaccgaatccttccggaatagcttcactatagcctgtactttaattctgcgttggatttttgctccccataattgtttgagtaccccaaacggacacttgaaaaaatcgatttatttttgttttcggggcagtccccccgaaccgatgcgcccagatttatggggagaccgaatccttcgggaatagcttccctatagcctgtactttaattctgcgttggatttttgctccccataattgtttgagtaccccaaacggacacttgaaaaaatcgatttttttgttttcggggcagtccccccgaaccgatgcgcccagatttatggggagaccgaatccttcgggaatagcttccctatagcctgtactttaattctgcgttggatttttgctccccataattgtttgagtaccccaaacggacacttgaaaaaatcgatttttttgttttcggggcagtccccccgaaccgatgcgcccagatttatggggagaccgaatccttccggaatagcttccctatagcctgtactttaattctgcgttggatttttgctccccataattgtttgagtaccccaaacggacacttgaaaaaatcgatttttttgttttcggggcagtccccccgaaccgatgcgcccagatttatggggagaccgaatccttccggaatagcttccctatagcctgtactttaattctgcgttggatttttgctccccataattgtttgagtaccccaaacggacacttgaaaaaaatcgatttttttggtttcgaggcagtccccccgaaccgatgcgcccagatttatggggagaccgaatccttccggaatagcttcgctatagcctgtact

SEQ ID NO: 44168 - DNA, 706 bp, Heterodera glycines
  unsure (1)..(706): unsure at all n locations
aaaatttagaaaacttaggaaaattcaaaaactaatcccgcccccccccccgcccttcaaaattttgaaaaataaataaaataataggagactcagaattttgaaaattttttataaaaactgatgacaagctaatgtgataaaacaggttaattcttttcctttcagtatccctgcaaagtttggggcgcttctgataagtttctgaaaaaaaaagataagcctaaactttttggcctgtttaaaaaggaattaaaaatttttaaaaatttattcatctccctttttgatagaaaaagcatcagagtgcctaaactagcatgtaaataaaatttggtgggtttnagagnattttntgaaaaaaatatttatgaattaattatgnaaaaaanaaataaaaangaaagaatnagattttngaaaatttttttgagnnagntagntnggngntnatttnagtgtaagttagtnntttannggggagtatnnntgnaaagtttggtangnttntggtnaattagnaaaaaatatgagtgatngaattttnantaaaaaagttaagnntaaattttttggnatatttaaaaagnaattaaaaaatttttaaaatttaataattttnntgnanngaaggtantnantnggnntnttngnggnntngtggtgggccttcggtgnaggaaaattattaaattttaaaaatttt

SEQ ID NO: 44169 - DNA, 726 bp, Heterodera glycines
catcgccaatgcttttcagagagaaaataaaaaagaaactcgtaatggctgctgggaaaaaggcagacggagaagttgccgcaaggcaaaaaaagcgaaaacgaaaaatgtccgacgaatcaaacggagacgatgaaagcgacgagaaggactcggcatccgaagcagaggaaggttggtgcgccgaacgagcagatattgggcattcatggagttgacgggtcccgcgttgttgtgcgtcgcccagactcgaatggagaactgtgagcgatttgaatgctttgcggacgatggcgcacaaattgtggggggatccagagcacccatccggagtgggcttgagctcaacgaagtgttcatggactactgcaagaatggaatactttttggaaaatctatgttaatgatatatgatttttaatgatggccagatcctgacctatggtatgggaaagtatgaggcagctggtcttgtgcgagactcgggatgacatcacggattcggtcaccatcccatccgggtgcatgaagtatcgggagcagcgggatcaccacgacgaagaacgggttacgatcatcccactctcgagatacgagatgcgatgaatacagagctccatcgccagcaaatatgtgaaggtgtatcacatttagtgtaattttactttttgtcgactctcagcggcgagccgaagaagaattgcgggagaatgaacgagtcctgcg

SEQ ID NO: 44170 - DNA, 1787 bp, Heterodera glycines
  unsure (1)..(1787): unsure at all n locations
gggagagggaatttaaagnccgcgnacagaatgggccaaagactgagaaagggaaaacggagcaaacacnaaattaatttcgtacctattaaattttttatttgtattattaataaaactattctgctggaatgaattacaatacaaagagaggtgttcaaaaagaaaggaggaaaatgaagggaaaaaagaaagaaaaacggtgagaagtgacgacaccaaacaaaaccggagatgaacacatggaagaacatggacaattaattgtattagaaacaaatttataacggatgaggaatttgtcaaaaaaatgaaaatgggaagagagagaccaatgtaattccaaaggagaaaaagagggaaaggaaagctcaattcatagtgaaacgatcagttgactagaaaaaggaataaagaggagcaatgctactgattgtgaacggaattgtcaatgggctgaggaaatgttcgatatttggctgatctttttggttgtgtaacggcccatcctcggcccaaaagaaagagtccgttgaatcggcgattggtgccgtccgccagcgaagaatttctgctgttccgatggattgtgccattggtcccgtgccgacggcgaccccacgggattctcgacgcgccggggaatgacaatttttccggaatgaaggtcatgcaaatggtaacaataaccgtcgtccaaagacacacaaccgcgtcgacgatggccgcccactttgaaaatgcgttccgactccaaaccggcatttgaatagacctaaaagggaaacaaaagcactgccaatgagcagaacacggtcgaccaaccggaatgtccttggcactgccgatacgcagcatggatgcaaatgcccatgtccaacaagtgtttgatgtgttgcgtcttctgccgaagaggctccgttgaaagggaaggcgtgaaaaagagcagcccttgggggaagttgtgagtggcgagccatgcgctgactaatcgctgctgcatgtcgggccgcgcggtcaaataaatgatcaaaaagccctgaaaggcaatcgcgttttcgactcctatgggaagcaactccgaatttgactgcacctgctgctgccaaaaacggaccacgtcaactgcgcccgggcgaagacgtgggtcacgaccagtcacagaaacagaggcagtcagagagctgaaaacaaccaaacgggaggcaattggaggatgggtacggacgatacaaccatcggcaaattactcacccgtcgatgctgaacacgaccacgggagtcccggtaggaacgacggcgatattcacactgagataagtatctgaaaaagggaggagataccggcaatgaactgctaagggccagcacttacgatccccctgcacaatcagacgaacattgtgaattccgatgggcaaactccgtcccaagtcaatgcttagcctcccgtttttgtcggtcgtctccacgcccttcagaaaccattcaccgccgctgggcagcacatacaccaaaacattttcatgagacaaaaccaccaaatccatggggccgtagcaaaagcgagcggtgatcagctgctcaaggccttccnaccacgatgaggtcgttgggccctggtggttggcttgcgagattggcaacctaacctttgccagattacaattccaatgccaggatcgccttcccctcgtccgtcctcagtttcccaccttanaccgtgtccttttcctgttccacactgtcagtggcacttggactcaaacggcggctgttcattgagg

SEQ ID NO: 44171 - DNA, 177 bp, Heterodera glycines
ttgctaattgtcccgccgttggcattttcttctcaaaatgagaggggggagggggcggacggttaaaaatatttgaagagccaatggaccatggaggaggggggagggagaaccaacattgcggatttccgtaattgtaaatccacttgcatccagccctgaccggtacgaatccca

SEQ ID NO: 44172 - DNA, 938 bp, Heterodera glycines
gcactcttagtttaatttcatacaaatttgcattatttaaacaaaaaaaaatttaaagttttctggcagcgccagacccctcctccctgtccttctgcccattttcccagaaatttcttttgaaaaaattgcattgaaaaacggaatttcggatttcagacaattttttttgggcgcttccaccagttacgcccctgctggtataaaaagtaagcgttaatgaggaaaaaatgactaaaacaatttaaatagtacagccatattatatggaggacaaaaaaaaacataaaaaattattaaataatttgatggaaaatgaaaattacaatgttcgtccaccaaaaacggcgcccccacaaagtgtccaagccacgaaatgtccaaaagagtaaaaacccacgaaatgtccaaaatttttcaaaatttataaaaacaaaatgagtctaatttaggatttttagggttttcggggtcgctaaataagaatataccctttatattaccccttgcctaaccttaggcccatctgaattataaaaaactcaaattcgagacttggacatttcgtggtcagcgccaaaaacggaacggtgggaggcgaataaaaggtgaaattaatgaattcacatcaagcaaaaatgaggaaagtttggttgattgaatttttactctgattaaatggggaaaaatatgaaattattttatcgaaattttcggaaaatgaccgatttaatcgatggtgtcgaagcagcaaagataaatctgctttccatgatttattagcattataaataaattttttgcattaaaaatctcaaaaagcatttccggcagcgccggacggacacctaatcccccccccccatttttccaaaaatttcgaaaaacagcactgaaaagcggaaaatagctaataaatataatatcgacgaaggaca

SEQ ID NO: 44173 - DNA, 1303 bp, Heterodera glycines
  unsure (1)..(1303): unsure at all n locations
ccttgcgatgacttaatttatgttaattaaaataaacaatagttattngaaaaattgtaatcaaatcattattaaataattttcaataatntaggatagtttaatcacttgcttttattcaaaaaataaggataagtaatatagtgaagcttgtgattagtttattttttgcaatatcatttttgatgcgttaaaaaaattatttaaatatttcagttaatgttaattttatgcccattaagtgtaatattaacttcttgagtgtcctttatttaataattttgtcaattatcgtattaattttgatttttataatttatctgattgtgtaatatttttgttgtttaattctatggtatttttgaagattttttgtttattaactatatattgccagttttgaaataaaattctatcagtttttagaaaataattatttcaatgaatttatcaacgttttaattttttgttgtataacatttaaactaaaatttaaataatattgcaggttgtttgtcggttatttttctttcaaagttccttgcctccagcttttttgtcccagtcttaatatgtttttcaaaaactaattgttattattcattagcatttttagtattattgtgttcaactatttttaacaaaagcgcatgtgatgctgcaaatctaatggttctgatttctggctgtttactgtttgtaaagtgttattttaagttttttggactttataaaatttaattttgtaattatgtaacgatttttttaatttgattcattttaacactaataaacatcggttggcgcatataactttttattttaattataatctcataaaataattttattctcatttgatagttttttaataggataaatttatatgaatccaatacttttttaaatttcattgaagctataatgcatttcatacaattcaatttatatagcttatgctgtaaatatatttttaattatttttctatcgtatgtaatctctttgaataataaatttagttttatctttttttacaattcaatactttattttaggagtagattaaaaggccgtagttggtattcaagaataacagaaaaaatagataattgttatttcaaaatttgcttagtggataggaacgacatttatattgttttataaaatttatgtagaagtgttttcattataatattttttattctattcngttgatatttttcaatagccttgnaagaaaatagtttttctgtctattttaatttatttttcgcttcaatttaaaaaaaatcaattttccaa

SEQ ID NO: 44174 - DNA, 1485 bp, Heterodera glycines
aaaataaattttttttttttttttggtttattttaatttgtttttcatcctaaaaattttttaattaaactttttcaaacttttcaccttatttattttaaggcgaatttttgccttttttaataaattttcttgggaaaaaggcaaaaaataggctttttttaaatatgcctatttaaatgactttaattgctgtcctttcgcttacgaccataccacgttgaaagcacgccatcccgtccgatctggcaagttaagcaacgttgggccttcttagtacttggaacggagacgtcctgggaatcgaatgtgttgtaagcttttttccttttttcacttttaaatttatttaaattttcaattttttttttggctttttttcaaaaaattttttgtcttttttttcggcaggcactgcctctgacaatgttttttatttatttaaaaaaataaatttattttgttactttttgattattttaattttatttcatcctgaaattttttaataaacattttcaaactttcaccttattaatttaaggcgaattttgccttttttaataaattctcttgtgaaaaggcaaaaaaataggctcttttaaatatgcctatttaaattactttaatttttttcacttttaaatttatttaaattttcaattttttttggctttttgaaaaaattttgtcttttttttcggcaggcactgcctctgacaatgttttttatttatttagaaaaacaaatttattttgtttcaatttgattattttaattttatttcatcctgaaattttttaataaacattttcaaacttttaccttattaatttaaggcgaattttgccttttttaataaattctcttgtgaaaaggcaaaaaaataggctcttttaaatatgcctatttaaatgactttaattgctgtcctttcgcttacgaccataccacgttgaaatattgtttctttttgattattttaattttatttcatcctgaaattttttaataaacattttcaaactttcaccttattaatttaaggcgaattttgccttttttaataaattctcttgtgaaaaggcaaaaaaataggctcttttaaatatgcctatttaaatgactttaattgctggcctttcgcttacgaccataccacgttgaaagcacgccatcccgtccgatctggcaagttaagcaacgttgggccttcttagtacttggaacggagacgtcctgggaatcgaaggtgttgtaagcttttttacttttttcacttttaaatttatttaaattttcaatttttcgtcctgggaatcgaaggtgttgtaagcttttttacttttttcacttttaaatttatttaaattttcaattttttttggcttttttgaaaaaatttttgtctattttttcggcaggcactgcctctgacaatatgttttatttatttagaaaaaataaattttttttttcttttt

SEQ ID NO: 44175 - DNA, 1612 bp, Heterodera glycines
tctgattttttaaacacactcataattttggagttttatggcataatgtcaatattagtcaagaaactttcaagtttacgcaaaatttggtcatttttgggcaaaaaatcttaaaaaattattcaatttaaaaatgcactgcaaaaaatgttaaaaatctgaaaaaaggttaaaaaaccattttgatcacaattacactgttcctccacaacattgttataaatgatggaggtgaaaaatataatatttttatatttttttgattaaataaattgtaaaaaacagctgattaaagcaatttgcaaaatgttcttatttttggctttatgttcttattttgaaatattaatggcaaaataataataaatagggctgggatttttatgtgctaaaaatcctgaaatatgtaataaaatatgtgctaaaaaccaaaaaaaggcctaaatacgtgttaaaaaatgcaaaaatatgtgctaaaaattggaaaaaccaatagtatttttgcataaaaattccaaaaaactcattctttttattttcgcccgcacaattgcaaataaaaaacatttggaggtgtttgggggtaaaattagtccttttttgataaattgtttttaaagataatttttccatcagttgagtaagttccagcaagaaacttcgatatccagtaacgaataaatgaagaattcgattttcggtacacgaaataaataaagaaaattttgaaagagcctataaaaatggcaagaaagttgatttttaggggtgcatttttgaattttttgtgtttttcttagatatttttttcaaaaatgccaaaatatgtgcaaaatatgtgccaaaccccgaaaatgtgcgatatgtttttatgtgcgaaaacgccaaaatatgtgtttttatgtttttataagtcgctctaaatcaaaaattgttcggagaaaatgctatttttgggcttctctcgccataactaagccgcaaaaaaaatatgttaaaacataaaaatcccagccctaataataaacaaacagagaatattgaacaacaccaagaatgcttaatttgtattgataacggatgagaaaatttgttgttatggaaaaaactttttggaaaagtatggtaatttttaataaaaacaattggtaatttttttgcgcgatccgccacaactttttcggttccgcttctcaccccatggctctcttttctccttgaggaggaaatacttttttttgaaaatgccgccaaataaaacgcaacaccaaaaaaatataagtacaattttcatttttttatttaaattttatgtcaaatgattaaggaaaaatggaatatttcagctctttcgttgactcttcagcaatggaaatgcaaattttgagcaaacaaagagagaattatgaagattttttctatttcctggcaaaagttttgagcaaatttggtggaaaattgacaaaaaatgagaatagggaaacaatcgaaattggcatcgatgggggccacaaaatattggaaagtttgaaaaatatgccgataatatgttgataaaaaaggctagaagatggcacccgtactacgagtgccaagcgaagaaaaaattgga

SEQ ID NO: 44176 - DNA, 1114 bp, Heterodera glycines
cgaattaaaatataaccatagttgaaattaaatttagttaaatttgtatttgactacaatgagagcttgaccataatcattttaaaaataaaaaaaataaaatgttaagggttcgaacctacgagtatgagacaagagcactacaactgcaccactgaacaccacaaaaccagtgaaatgtttgttctttttatatactacctaaacaattttggtacgtcaatctcggcgcagatgcttattccgcagcagaaaatttttttgtaacacaactcaggggttgtctacgcacctacaaagtttcatttggaaatcccaacatctcctgaaaactctcctttgtcaggggaattgggtctgctccagcaattttctaatacataaaacggagtaagggttttacgggtttttagtccgtaagtccgttgtccgtatggatgcctagtccgtagtcctggtcctgatccgtattttctcaaaatcacgaactctaatttatattaatttcttgtaaaaaatatttttttaaatgaaaatgtactcataaaaatcttttccaaaaatgtgatgtcaaaaatcactttgtaaaatatttaatagtgattctaagcctattttggtcatttttatggcattttgtgcctatttcactttttacgaagaattttttttctaaaaataatcattaaaattttttatttacatgttttggtacatatttctgggtttttgtacatatttcttagatattttagcattttttatacatattttatttacatatttcgcgatttttcttacataaaaattccatccctacatatagtaaaagtaaaattgcaggtggaagaattttttgcggaacaatatttcaattttaatttgctttcattaaaaatcaaatttcaattaaagaataaaagcatcaaaaggattaaaatgaacaaattgatcaactttagtgtatttcttcctcagagagttgccaaatcgaatttgaaattgggcccaaaattcgcctcaatttggtcaccaaatgaatacattgaaacgaatggatggaaagaatcatcagcataagatttatcaacgaaaaaatcagagaaatctatga

SEQ ID NO: 44177 - DNA, 641 bp, Heterodera glycines
aaattttttgaaattttgcaggctaatagaggattcttagggctatcgaatgatactaagaatgtttaatttggatattcttgaaaaagttatcggacatcgctggcgcccaaccatcgcgcgcccaaacgtgagcgtccaactcgagcggttccgatatacatagattgattttttgtcgctaatttaaaaatataagtagttacctatcgtgtgtttctgagtgttttcggagtcacttatggtaattttgaaaccatttagaccaattaaaaacctaacccgagctcgaataagttgaaaatacaaatttcggattttgacttttatacaattcgggttagtgattcagaatttacgtgtattcgaaatatttattcgattttttttttttttacaaacaggtctacttcatctaatttatttataaatgttaccggatttatctgatcatttacatacagaagaatgtaatttcctcatcaatctttatcatagatgcatgaaggaaacacctttctacagtaagttatttaaatgaaatttaaatggggctttatgttaattcctatccagcaaggtatctctggcgcggatgttcatattggtacactgccatttctcagtgtcttcaccaagag

SEQ ID NO: 44178 - DNA, 942 bp, Heterodera glycines
  unsure (1)..(942): unsure at all n locations
caaaaaaaaattcttgaccaaaaaaatggctatctcttttttttccatttttttccggcaaaacttggtcccaacagttgccttctcttttctggccctatcaaacaatcttacgatatttgaaacgcaaacaaaaaaaaattcttgaccaaaaaatagctatctcttttttctcatttttttaccgcaaacttggtaccaacagttgccttctcttgtctggccctatcaaacaatcttacgatatttgaaacgcaaacaaaaaaaattcttgaccaaaaaatagctatctcttttttctcatttttttaccgcaaacttggtaccaacagttgccttctcttgtctggccctatcaaacaatcttacgatatttgaaacgcaaacaaaaaaaattcttgaccaaaaaatggctatctcttttttctcatttttttactgcaaacttggtaccaacagttgccttctcttgtctggccctatcaaacaatcttacgatatttgaaacgcaaacaaaaaaaattcttgaccaaaaaatggctatctcttttttctcatttttttaccgcaaacttggtaccaacagttgccttctcttgtctggccctatcaaacaatcttacgatatttgaaacgcaaacaaaaaaaattcttgaccaaaaaatggctatctcttttttctcatttttttaccgcaaacttggtaccaacagttgccttctcttgtctggccctatcaaacaatcttacgatatttgaaacgcaaacaaaaaaaattcttgaccaaaaaatagctatctcttttttctcatttttttaccgcaaacttggtaccaacagttgccttctcttgtctggccctatcanacaatcttacgatatttgaaacgcnaacaaaaaaaatcttgaccaaaaatggctatctcttttttctcatttttt

SEQ ID NO: 44179 - DNA, 1399 bp, Heterodera glycines
tccctttcatgctcgagagcatttgtatgtgtataaatttatcaaaaaaagagatagccatttttttgggatagagtataaatttaaaaaatccctcaaaaataaaaggtctattgcgccccggctcccctatcatgctcgagagcatttgtatgtgtataaaatttatcaaaaaaagagatagccatttttctgggataacctctaaatataaaaatcctctgtgaaataaaatggcgattgtgcacagccctccgtctcatacgcaagcgcttttgtgaggtataaaatttctcaaaaaaagagatagacatttttctgggatagagtataaatttaaaaattccctcaaaaataaaaggtctattgcgcaccgccctccctatcatgctcgagagcatttgtatgtgtataaaatttatcaaaaaaagagatagccatttttctgggatagagtataaatttaaaaattccctcaaaaataaaaggtctattgcgcaccgccctccctatcatgctcgagagcatttgtatgtgtataaaatttatcaaaaaaagagatagccatttttctgggataacctctaaatataaaaatcctctgtgaaataaaatggcgattgtgcacagccctccgtttcatacgcaagcgcttttgtgaggtataaaatttctcaaaaaaagagatagccatttttctgggatagactctaaatataaaaatcctctgtgaaataaaatggcgattgtgcacagccctccgtctcatacgcaagcgcttttgtgaggtataaaatttctcaaaaaaagagatagccatttttctgggataacctctaaatataaaaatcctctgtgaaataaaatggcgattgcgcaccgccctcactatcatgctcgagagtatttgtatgtgtataaaatttctaaaaaaagagatagccatttttctgggatagagtataaatttaaaaattccctcaaataaaagatcgattgcgcaccgccctccctatcatgctcgagagcatttgttgtgtataaaatttatcaaaaaaagagatagccatttttctgggatagagtataaatttaaaaattccctcaaaaataaaaggtctattgcgcaccgccctccctatcatgctcgagagcatttgttgtgtataaaatttatcaaaaaaagagatagccatttttctgggatagagtataaatttaaaaattccctcaaaaataaaaggtctattgcgcaccgtcctccctatcatgctcgagagcatttgtatgtgtataaaatttatcaaaaaaagagatagccatttttctgggatagagtataaatttaaaaataccctcaaaaataaaaggtctattgcgcaccgccctccctatcatg

SEQ ID NO: 44180 - DNA, 1125 bp, Heterodera glycines
ctcgtcatcaatcagtgatccgaccagcttggctattgatcagcatcgatctgatcagtctccatcactacgtttttccgttgatcagccgatcaacggaaaaaactctttccaatttttatcaattgttatcaccctctgatcagtgttcttctgatcagaattttttgtgtttctcttctgcttgcctgcaatgtctgctgccacagatcggtccgcgttgtcgtcggtgcgctgccgttcagcggcgtcgatgccatgccggccactccgtccgcgacaagggcatttgtcgcgttgccgccaccgttgtccgcaccgttgccaccctcttgcgaagcggagccgttgaacgccgcgttgctgaacgcaccgctcgcccccgtgttgtggtgatacggcacaccggcgtcgccgccggcgcgccccccgtcatccgacgaaaacattggcacgcggcacacggaataatcacacagactacggcactactaaaatggcaaaaaaagggctatcaattatcagaattagattcactggatatacaaagatcgctctaatcaacatttattgaccccacaatgattaattggacaaatacaaataaaagttgctaccagaaattttagatcgatccgacctcaaaaaagccaaaagcacaatttggacgaggggagggggcagctggtgggagacaagcatcagcagaagataaaagggggcttaaaagaggagagagggagaagaaagagagagagagagagagagagtgaggaagagagagagagagagagagcgagagagagagagcatttggcccaatcgctgcttcttttgtgaagcaagagattggcgagagagtgtgtgtgtaagcaggaaaaagactgagtgggatggagagagtgagagaagatgagcgaatgacattggaatagagagatatgttggccaggatttgggagatccggtgaggtgatagaggtcggaaaggtaagcgagagagcaaaagagaaaacgaagagaaaaagatgtggtagagaagaggaaagaaacgagagcatgggaaagagtgagagataaatgagagggagggacagagagagggaacgagagtgagaacgggga

SEQ ID NO: 44181 - DNA, 758 bp, Heterodera glycines
tcagcgaacgccgatcttttttcggttttaaatcgaacgccaagcggaagtgccaaccaaaacatattcgattttcaattaatctaatctttttcatcattcataatctcgtttctcttctctcagaaaaaaaatcaacaataaaaagacgttcaaattcacaaaatctctcacaagagggaagttaatccaacaattcgatcgataaaaatcttcgtcaaaatcgattacgtgaatttcgtgcgctttatccattctttacggaaatatcgttcgtagaataaaataaatcaatcaaaaaatctcaatttttcaactttaacagccacaaaggcgcaggacaacgtcaatgtttgccccctttttaatgccataatcccccaaagtacggccgtcctcaagttgttttcctgaaacaattttcataaaaaatggaaaaaactactagggttgggcccccgaccccgccccgacccccgacagttttgcccatttttcggggttaaccccgaccccgacgctcccaaccccgacgaaccccgaccccgacccttaaccccgactcggggtcggggttaaatatacacccctaggaatagcatttttgttggggaaaggcaaaaaaaataaacaaaatctgaattttttgttaaccattttgccaaatttttattaaataaagtaatttgcttttgatgtttaatatgtagtagtggtgtagtggttagtgcgttagcactaacacttcttttgtcatg

SEQ ID NO: 44182 - DNA, 1150 bp, Heterodera glycines
ttgctgtcttttgcttcaggtctgcaaaatgtgctctttgtggtgagtcgaactcgtaaatttcggcttgtccacacttgggccggccaatttcacgtaattgccggagccaaagctttgcacgttgaagccacgttttctaatggggggagggggggggggggtacagaaaatgtgcccataaaattgaaatttaataaaatttataaattaaatatagaaatttgtcgcaaattttttgaagagcaggactttgattttgataccgaaattagggtattttcccatttctgggttcgcagaattcatttttatttttttaatcaacaaagttaggacgatagtttacttttgaggaaggaggacttgtggaggagctggacccaggcttggattttccttggctcaaaccaggtttaggtatgaattttttttttttttttgaatagccaattttcaatcccggcccaaaacttaaacaaattgcgaatgatcttttcgatcccagcgacccaaaaccaataaatacttttttggcttaaaaaaacagattggtaccatcgacatattattccaggcaatatttggccacctggactccctgtatttttgtccagaaaacagatctaggccaaataaaatcccatttttttatttcttcgacttacaattaactcgttttttcattattttatgccgaaattcaggggctaaaccaatcaaaaaacacttcccaattttgaatagttttccaagaattcaaaatttgctttttcttcttttaaattttctcactgcaagaaaaagtgtgcctccatgctgcggttcatgtttgacgagcaactgacagcaaaccgaattttgccgttggaccgaatgttcatcatttttaacaaaaaatatttgaagacacgaaagcgaagaaacactccaaaacaacaatcaattagatgaaatgaaaaatgccttttttggtgagggaaagacatacataagagaaattggcaaaatcttttgtctctttgtacagctttaacagtatgaaaatttaaaatttggcaaaaaacattatgccataaaaattcaatccaaattttggagtaaattttttttttgccgttagcccctaaaaattttttcacagctaggt

SEQ ID NO: 44183 - DNA, 1846 bp, Heterodera glycines
  unsure (1)..(1846): unsure at all n locations
cgcttttcctctatttcttttttttctctaatttttccacttcctttttctctttttcctccttttctccttttttctctcccgttttcctcctctccttttttctctcactttttcctcttttcccttttttttctccctttctcatccttttttttcctccttttttcctcccttttccactttttctttccctatctgattttttcctcccttttccctattttttcctccttttcccttttctcctttctttccctcgccccgtgagtgcatttccctcccctctttctatccctgtgggtgcattccccttttttcctttctaacccccgtgagtgcattccctcacccctttctcccacacccgcgccatgtgagtgcattttgcacctatttcttccaccacccccgccccttcaccgaatttcattgatttaattccatctttggatggaattaccgaaaccatattaaaacatttatccttttttttggataactgtatcctgggccgaatggttgtggtttgaatttggttcaaagttcggaatcccatgttaacggttaattattttaaataaaagagttggtttttgacgaattaattatttaaatttctcatgggtttggacccctgcccctgggactgggtgattttaaatcatacatagctgacatttatcctttttctgacaacattatccttggcctgatggttgagttctggatttggcatcggggttcgggtccccattgcttgtgggtgaattaattggaattaaatggtatcatgggtttagaccccggcccctgaggctgggtaattttaaattacagatatatgtcatttatcctttttccgtcaacactatccttggcctattggttgtgctctggatttggctcttgggttcggatccccatgtatgttgccgaattaattgaattaaatcctctcatgggtttggacccctgcccctggtacataaaccttgggtggtctcgacattaaaaaacattggtaaaaaatgggtgttttttgggcggggggaggaatttggacgcccgtaaacgtggtcttatactactcttgaattataatgattaattaattttgttatttctcatttaatgaattattttaggcttgaattattttaattaactaactcggttcttttttttattactattttgtatctgaagacgaattaatgaattcgatttgatttttgacattcgaagtaaataaaattttttgaaaatgttttaagaaatatacaagaaagttgatttttaaggggtgaatttttcatttttcttacagatttttctcaaaaatgccaaaatatgtgcaaaatatgtgccaaaaccccgaaataagtgcgatatttttatgtgaaaacgccaacttctttctggttaataattttgtgcattgttttggcaggataaaaatcgtaataaagaaatattatttttcaattttaatgcaaaatatttaaattcgaaatgaaacattaacgcaaatttttgataagaaaataaattactcaaaaaacaatcaaaataaaaattttgtgtttgactcaaaaaaccattaaaattggccacattatcaacttgaaaattatttttgacattgtgaatggaatatacatagcatataaaccataatagtagcgtttgtatggttatgatagtttttttgagtaacgcccaaaactcaaaaatttttattttaaaaataaaatattntctatctttactaaaagaatatgacatgctaaatttattttatttttatttttttatatttatgcaatggaaattttgatattca

SEQ ID NO: 44184 - DNA, 1512 bp, Heterodera glycines
aaaaaaatcgatttattcaagtgtccgtttggggtactcaaacatttatggggagcaaaaatccaacgcagaattaaagtacagactatagggaagctaatcccgaaggattcggtctccccataaatctgggcgcatcggttcggggggactgccccgaaaacaaaaaaatcgatttttcaagtgtccgtttggggtactcaaacaattatggggagcaaaaatccaacgcagaattaaagtacaggctatagggaagctattccggaaggattcggtctccccataaatctgggcgcatcggttcggggggactgccccgaaaacaaaaaaatcgattttttcaagtgtccgtttggggtactcaaacaattatggggagcaaaaatccaacgcagaattaaagtacaggctatagggaagctattcccgaaggattcggtctccacataaatctgggcgcatcggttcggggggactgccccgaaaacaaaaaaatcgattttttcaagtgtccgtttggggtactcaaacatttatggggagcaaaactccaacgcagaattaaagtacagactatagggaagctattcccgaaggattcggtctccccataaatctgggcgcatcggttcagggggactgccccgaaatccaaaaaaaaattttttttggataaaaattatttaaatgaactgactagataatatttaaaataggttatttctcttcctttcagtatccctgcaaagtttggtgcgcttctgatcagtttctgaaaaaaaagttaagcctaaactttttggcctgtttaaaaaggaattaaaaatttttaaaaattttattcatctccctttttgatagaaaaagcatcagagtgcctaaactaacatgtaaataaaatttggtgcgtttcagagcattttctggaaaaaatatttatgaattaattatgcaaaaaataaacaaataatgaactctcttccttaataattttcatgcaccgaggtactcactcggccgcttcgcggctcgtggtgggccttcgccccccctccgcccttcaaaattttgaaaaaaaaataaaataataggagactcagaattttgaaaattttttataaaaactgatgacaagctaatgtgataaaacaggttaattcttttcctttcagtatccctgcaaagtttggggcgcttctgataagtttctgaaaaaaaagataagcctaaactttttggcctgtttaaaaaggaattaaaaatttttaaaaatttattcatctccctttttgatagaaaaagcatcagagtgcctaaactagcatgtaaataaaatttggtgcgtttcagagcattttctgaaaaaaatatttatgaattaattatgcaaaaataaataaaaatttctaaaaatttgatcgtccataaataatttgtaattgatcaggggctcaccaaattttgcaggaatacgtatcggaacactacaaatgcttactaattttccta

SEQ ID NO: 44185 - DNA, 1223 bp, Heterodera glycines
agtccgttttcaaaaaaccagcagaagaattagtggcgaaaacggttctttcgcgtactttttgcgttgaaagacggacatccattaggttcgacattttttaattcgttaaagaacaaatcgctcatttcgtcactcgatttccccggcacttcaagtaaaaaatttgttcatcgaagtgaacggacatcggacggcagaaatcgtacaaaacatttccttagagacaaactcctcgaaaccttttccgatttaattgtgtcgccgtacgccggtgacttccgaaggcgggcaactcgaccacaggggactcgacttcgccttcatcgaacaacgacggcgttttgcctctgagcattagcattccttgtctttatcgtgtggtatcttcggaacggtgaccctttaaactcgcaattctatgaaaagtattggatgtttgcttttgctacttgcgcattgaaaccccaaaatgggatgatttgaaaattcaaaaaactatgccgtaaaattcgtggggagcgataactcatcatttttagcatagattttcaacttttctcattaaatgtgccattttacagagatggtcaattcatctactccgttgagttaactctacttgtatgatgaatccggaagtacatggcctcaccaatgctgttttgccgcacttttccgaaaaaaacagctcattttctcggcatcggaattgacaaaagtgtctgaattgttgaaagttagtgaatgaaattggaatgaattaaattttgaatttcgcagacggactgaagaaaagcagtgatgtggcgaaagcagcagcggtggtccagttcaaaaagtgcattttaattcaatattctctttaacacgctttccatttcagactccgtttcattgggtcgaatttgttctcgacaaattctaaaaattggttcctcgttggaatggcaagcagttggaaaaacggcaaattgacccacgtcagtcgcatgttgagaggtacggaatttagaattgaattaggtgtacctttttttcgggggggggggggagctgctctcgggaggaacatatgccctcatttgtttgcccttccgtcatgtaatatttgtcaatcaaaagaacgccctgtttctgtaaagtttttgataatgatgcatgccaatgttcacacagcctagaagacgagtcgacactgtccgtggccggcgtcctgctcg

SEQ ID NO: 44186 - DNA, 913 bp, Heterodera glycines
cactttcctatcatcgctcgagtgcatttgtaacgtataaaatttctcaaaataagagatagtcatttttcttggatataagataaatttaaaaattctctgagaaattaaatggcgattgcgcaccgccctccctctcacgctcgagcgcttttgtaacgtataaaatttctcaaaataagagatagtcatttttcttggatataagataaatttaaaaattctctgtgaaactaaatggcgattgcgcaccgcactttcctatcatcggctcgagagcatttgtaacgtataaaatttctcaaaataagagatagtcatttttcttggatataagaataaatttaaaaattctctgagaaattaaatggcgattgcgcaccgccctccctatcacgctcgagcgcttttgtaacgtataaaatttctcaaaataagagaatagtcatttttcttggagataaagataaatttaaaaattctctgtgaaattaaatggcgattgcgcaccgcacttcctatcatggctcgagagcattttgtaacgtataaaatttctcaaaataagagatagtcattttttcttggatataagataaatttaaaaattctctgagaaattaaatggcgattgcgcaccgccctccctctcacgctcgagcgcttttgtaacgtataaaattttctcaaaagaagagatagtcgattttttcttggaatgaagataaatttaaaaatttctctgtgaaattaagatggcgattgcgcaccgcccttcctatcgtgctcgagagccgtttgtaacgtataaaattttctcaaaatagaagaagaatagtcattttttcttggatgagaaggataaatttaaaaatttctctgagaagattaagatggcgattgcgccacccgc

SEQ ID NO: 44187 - DNA, 1041 bp, Heterodera glycines
aaaaaaatgagaaaaaaaagataaccattttttgttcaggaatttttttgtttgcgtttcaaatttcgtaagattgtttgatagggccagccaagagaaggcaactgtgggttccaagttttcggtaaaaaaatgagaaaaaagagagccattttttggtcaagaattttttttgtttgcgtttcaaatatcgtaagattgtttgatagggccagacaagagaaggcaactgttggtaccaattttgcggtaaaaaaatgagaaaaaagagataaccattttttggtcaagaattttttttgtttgcgtttcaaatatcgtaagattgtttgatagggccagacaagagaaggcaactgttggtaccaagtttgcggtaaaaaaatgagaaaaaagagatagccattttttggtcaagaattttttttgtttgcgtttcaaatatcgtaagattgtttgatagggccagacaagagaaggcaactgttggtaccaagtttgcggtaaaaaaatgagaaaaaagagataaccatttttggtcaagaattttttttgtttgcgtttcaaatatcgtaagattgtttgatagggccagacaaaagaaggcaactgttggtaccaagtttgcggtaaaaaaatgagaaaaaagagataacaatttttggagaatttttttgtttgcgtttcaaatatcgtaagattgtttgatagggccagacaagagaaggcaactgttggtaccaagtttgcggtaaaaaaatgagaaaaaagagatagccattttttggtcaagaattttttttgtttgcgtttcaaatatcgtaagattgtttgatagggccagacaagagaaggcaactgttggtaccaagtttgcggtaaaaaaatgagacaaaagagatagccattttttggtcaagaattttttttgtttgcgtttcaaatatcgaaaaattgtttgatagggccagaacagaaaaaggcaactgttggtaccaattttgcgtttaaaaaatgagaaaaaaagagatagcccttttt

SEQ ID NO: 44188 - DNA, 1160 bp, Heterodera glycines
gaatatagacgtaaatataaaaaattattatttataatattaaatactttaaaaattaacaaattaaattaataaacaaattaaactcgccttttttccgtctccgtcgcccaccaaaaagtgcacatccgcgtattctcccgtgctcagcatcaactttaggaaagcaatcgccgctttggacatgataatttcaataaaaattttagtcctttaccaatggcaactaaaaaataaatattaaaaggttttagagcttatagactctgattaaaagtgatgaaaaatgaggggccaggccgttttcgtacgaacacatgtttttggactataacttttttctttgccaaccaaatccaacattgttggtatcattcgaaagctctttagatgctctattagcctgcaaaattccaaaaaatttcgtcaagttcaaaaaaagttcgagccaaaaaagttggaaaatttggttttttgaactcttctgaccgtaacttttttgaaccttaacgaaatttttccaaattttaaccaaaaaattgggctcgtacgaaaacgaccccgacccgaaaaatgaacattgggcaaatttatttagaagggcaacaaaataaataatgttgcggcaaaatattgacctaaaaatgaacataaagcagagaaatttgcaaataatgtaaacttttgtttcagggaatttcgaaaagcaaaataaaatcaaaaaacgacattaaaagcactgaaaagacgagaatacgagactttttcgtgaaaattggagtcgggagttgcgccagaaacgggttaactgcgtcccaaaatacataaaggaataaatgcttcccaaaattattattttttgaaaattaattcaaaaatatttaaaaaatcaaggtaacacgataatcagattgaatagtgaataatagggggaaacattcaataaacatgcctaaccgagaccatccaaatatgtcatacttttttgttttattttatcatcaataaaaaaaagtaatcagaagggcgaaaacaatttactctgacgactgtttagaataaatatgtcgtagagagtaagtgacaaaatatatgtatggatgctcaagaaaattgagattcatgttaacctagctttggatgattaacaaaaacccata

SEQ ID NO: 44189 - DNA, 758 bp, Heterodera glycines
ccccccccccaatttttccaaaaaattttttttttgaaaaaaccagcgcccacaaaaaaaaccgacttaaaaacaaaaaatttaaaaaacaagttttggtcattttttgaataaaatctgttaacaaatccgaagacaattttcaaaattttttcggcggcgcctaccggcaccgcccgaccccaactgtccccgaagttttaaaaaacgcaccgcaaaaaaaaggtggaaaaaatggacaaataataaagtttgtttctaaaataaatatatttcatgaaaatattttttaattttcatgaaaaaattttaaagatttttgtttggatttttcatgacttggactcggtttaaaaactaggactctgacccggctttctgtacccggcaataccctgacccggtatttgcccaaatacccaggcccgtacccctaatttaatatacgattttgaagttttttaaattaaaaataaggctacagaaaaaattgaaaaactctcgcctctcgccaactctcgtgtttttggggactctcgcctctcgccaaactctcgctctcgtctttttggggactttcgcctctcgccaaactctcgctctcgtgtttttggggactctcgcctctcgccaaactctcgctctcgtctttttggggactttcgcctctcgccaaactctcgctctcgtctttttggggactttcgcctctcgccaaactctcgctctcgtcttttctgagacaagacacacccctg

SEQ ID NO: 44190 - DNA, 1188 bp, Heterodera glycines
  unsure (1)..(1188): unsure at all n locations
ttttaaattttatcttatattcaagaaaaatgtctatctcttattttgagaaattttatacgttacaaatgctctcgagcatgataggaagtgcggtgcgcaatcgccatttaattncacagagaatttttaaatttatcttatatccaagaaaaatgactatctcttattttgagaaattttatacgttacaaatgctttcgagcatgataggaagtgcggtgcgcaatcgccatttaatttcacagagaatttttaaatttatcttatatccaagaaaaatgactatctcttattttgagaaattttatacgttacaaaagctctcgagcgtgagaggaagtgcggtgcgcaatcgccatttaatttctcagagaatttttaaatttatcttatatccaagaaaaatgactaactcttattttgagaaattttatacgttacaaatgctctcgagcatgataggaagtgcggtgcgcaatcgccatttaatttctcagagaatttttaaatttatcttatatccaagaaaaatgtctatctcttattttgagaaattttatacgttacaaaagcgctcgagcatgagaggaagggcggtgcgcaatcgccatttaatttcacagagaatttttaaatttatcttatatccaagaaaaatgactatctcttattttgagaaattttatacgttacaaatgctctcgagcatgataggaagtgcggtgcgcaatcgccatttaatttcacagagaatttttaaatttatcttatatccaagaaaaatgactatctcttattttgagaaattttatacgttacaaaagcgctcgagcatgagaggaagtgcggtgcgcaatcgccatttaatttcacagagaatttttaaatttatcttatatccaagaaaaatgactatctcttattttgagaaattttatacgttacaaatgctctcgagcatgataggaagtgcggtgcgcaatcgccatttaatttcacagagaatttttaaatttatcttatatccaagaaaaatgactatctcttattttgagaaattttatacgttacaaaagcgctcgagcgtgagagggagggcggtgcgcaatcgccatttaattnctcagagaatttttaattttatctatatccaagaaaatgactatctctttatttgagaaattt

SEQ ID NO: 44191 - DNA, 1279 bp, Heterodera glycines
  unsure (1)..(1279): unsure at all n locations
agccaattccacgcgctgtgagtcatttcaccatcattccgcacgaaatcggtgaacttaacgcgtgacggtaacgagaaatgggaatgggcactaacatgctctttgacgccggcaacgattccgtgggtcgtcgaaacgcaacggaccaaaacggcaccgacgacgagttgggggaagctcatctcgagcaacggaacgaatcagtgaccaaagcgggagctaatgaatgagacgcgttaccgcaaaacgacaaacgatgtcggcacccgcgccctccccaatcggcaatgcatttgctcagattgaactgctccatcacttgtgaaagtccgtcccccaattgttccatgggaggggaagcttaaaagcagtagtcggcaaataacaaataatgcctttagcattttcaatttttaaacgcactctccgacaaaattttcagcgccgggcgcttgccctggcacagaaacgtggaggaaaacggcacgctgaccgaccagcggagagagcgtcggactgttggcaaggtccacgcaagacaaatacgtcttgccaacgtcatgaacggtgaggaaaacctttgggtgggggacgagatggaagcaatgagtctcaattgagtgattctcgagacaaatgaattgatggcacgaaaagtgccatgagaactgccataactcacaactttgtcgtccaaatgctctaagtttccctgaacgtacacatccaaagtgcacttgcgcgtccctttgaattcgtcagtgaaaattgggtaagagccgacgtcggcaaacggagcgacgatcggattataaaggcattgcttccactgaattaagtcacctaattaggtaattaagccaatatcagttgggaagcaggtggctttaaaagtttaaaccgccaaaagtaacattaaatcaaattttgaaggatatctgttaaaattgcaaacgaattttcacaattttccccttggactaaaagctttatcacctgggctgatcatttattaacaccttacttgaatttccacttgtacgcgttgcaaattgtcttcaaaattcaaatttgacattttgcggaaacgcaatgtaaatgagaaaagaaagaaaagaaaaatggcgaatcgaattggggggatgtttggtattttgtttgtttacataagaagaagaagtagtcaagaatcttgagggggaagagaccgagaatggaattgtttaccacaattttgacctgattanagtccataacaaagagataggaaggaacg

SEQ ID NO: 44192 - DNA, 960 bp, Heterodera glycines
caatataagcctgtttcgtgaatatttacaacaaaatttttttgaccatttctaaaagggaaggaaaacaaattttttggtctcatgttttatgtcatgttgttgaatggcttagactgcttctgatgcggttgaaaaagtttttggcttttcgcgaaaagttttctcagaaaattcagggacaaaaaaattttatggaaaaaagtagagtaacaaaagcctgtttcgtgaataattacagcaaaaatttatagacaatttctaaaagggaaggaaaacaaattttttggtctcatgttttatgtcatgttgttgaatggcttagactgcttctgatgcggttgaaaaagtttttggcttttcgcgaaaagttttcccagaaggcctaatataagttttatataacgtaatccaaatcttagacgatttggatttaattattctaaacaaggaacgcatacgtaaatacgcattccttgttatttggttaacatgaccggaaaattggaatttgttatcaatgtttattcctaaatccctaattgtatccacagcatttattgtatttccatcaaatttgtatgtttcttttgggttttttgaacccaaatataatacaaaagttttttgaattgaaacttttatttgccatttatttgcccattcgaataagttatgcaatgctttatgcataatttctgtgtcagatcttgctttatagcatatatatattttaacatcatcagcatataattttattttcactcctgatggcaaagcatcaggaagatcgttaatataaatcaaaaatagtaaagggccaggacagagccctgggggacgccagaagtaacttttttacttgaggataaggaatccccaattttaactcgaaaagtcctattactcaaaaagccctttatcccccataaaaattttgcccctttataccaatttttt

SEQ ID NO: 44193 - DNA, 1058 bp, Heterodera glycines
ttttcaaaacgttaaaaaatgcagagaacgccaaatttattaaaattagggggataaatgtcctaaattcttggaaaatagcaaattagcgggtccgcatagtaaaagcctcccatcgtcgtgagcgtaacactgacccccacatgacgcgctgcttctccgtctgttggtggagccaactcggccatttgtattcgatcagctgatagtcaaagccgtaatgagaagccatcacgggaagggattcctaaacaatcaaaaaaatgagggtagaaaatatcaacaaaaatttaaaaaatgaacaatataggctccgatcgattcatggaaacaatgtttttcgatgaagattttcgggtagggtcgagaggaattccagtcagaatttgaaacgttgtaaaattgaaaaaattgggtttttattcctttgaaaatgttattctccaaaaattattccggcaatttcgctggggaattagaaccacaatttagtatgaagaaaagtcatggaaagtctttaacgcttaaatggaatgaaagtttgtcaaatttgcggagcgtgactcattaggaaaaaataataattaatgtttcagctggatcaccctgaattggggcgacaggtaattgttgagcagccagaatttgaccgggtgtttggtgttcttcagcacggacagcatcatgatgcgcaggaagcgctcgtagagatggccggaggccagcgagaagatgttaatccgatcgtacgattgaccggtgcccatcaatttgctaaaaatgggagtcgaaagtgatggctatttgtttaaaaaatggttttaaaagatggcgttcaacagggttgattttttgtgatttatccattagaaaatgcaaatatctttggattcccaggcgtaatgaaaaataaaaatttttcagaaaaatttgagtattatttttaaattttactcaatttacttaacgaatttggcccaccaccccgatggtgccaacgacaccacaggatcccaatttcaaaattttgtcttaaaatggtaaaaatttggctaaaa

SEQ ID NO: 44194 - DNA, 1299 bp, Heterodera glycines
atcgtaggaaaaaaactcttctttttcgtattcgcgaacaaaatgtcgggacttttctcttacatcatttttttaaatctcttcggggtttttctcacttcattctatatcgtacatatttttatacatattccggactttttcgcattttttcgtacatatttcgcaatttttcgaggattttttaaggaaattttcagaaacacgcccccaaaaaacccaaaattacacatcgtacatattttcatttttttacacatttttaggatttttcgagaaattatagaaaatttcatatgaaagatttaaaaatttttcgaaaacgctcctaaaaattattttaaaaaaagagatagcaaaacttcgatttttaaatagtaaaagacgcttctaagcctctttaggtcatttttatagctttttcgggcctcttttcactcctttcacgaggaaatttttcctaaaaaataaccattttaaaaaattttattacatcttttagtacatctttagggtttttgtacacttttagcattttttctacatctttcatttatgaatttaatattttaagaatgtttattcaaattttaaagacatgatagttttttataataatcatttgattgatatagtttttaatataattttatttaatttagcttttttatttcatgttgttttctttattttaataattaaacatttgttataaatatttttgctcgtattagttgtaattagagtccggtaaaaaaaaaatttccgggagcgggagcgggatcgggagttcaaaattttccgggagcgggatcgggaatcccgtgaaaatcccgctcccgttaaaaatcccgttcaccgaaaaaagcgggagtcgggagcgggaatcccgtaaaatcccgcgggagtcccgatcccgccggactctagttgtaataacaaatttaaatcgttcatttcacccttttcaatcatgttctcgtaatcgaatactcggatcatcagtttaaatttaattaaaatttaaattaatttgctttttcataaatattaaatttttatgtatgtaaaagactacttgatagtatttatattaatttatttttaatttactaatttactttttaaattttgtttgaaataataatcttcattccctttgttcagcaatgaattttacagatctataattaatttacttgttatttataaattctcatgttcgattctccttttgcctagttccgcatttccaagaacaattttcttagtgcgattgcaaaaataaatcaacatgag

SEQ ID NO: 44195 - DNA, 1206 bp, Heterodera glycines
tacaacagtgatgagaagaggtacaaaagtgattaaaagaggtacaatagtgattaaaagaggaagaacagtgattagaagaggtacaactgtgattgattagaagaggtacaactgtgattagaagagacaacagtgattagatgagtccaacagtgatcagaagaggtacaacaaggtttaaaattaaataaataatgaaaagtttttataaaaatcgaatgcattttaatttaaaattttttttataataaaatactctttttattcattaaatataattttgaaaattaataattgaatatttattttgaaatgaaattcatttttataaattcaaaaaataaataatgaaattaaataaattcaaacaaaaaattaattttaaaaaatttttcacaaaaaaataatttaatttaaattaaaaaattaattaaaaaaaacaaacactcttttaaatgaattaaaaacattaaaaataaccaaaaatgcatagcaaaaagaatgtacaccgcccggattcgaacttcccccccccctcaaaatgatgcctcagaatccccaatcacacagggattctgaggtcttaacgatgtcaaaagtaaaatctgattacttattcgtgatcagcgtcccaaataacccataaagacatgtttttggaagatttttattgaaaaaaatttttcactcaaaaatcctgtccaccccctttggtcccgaatcacaaaatcacttttatttttataacaattcgcaaaaaagagataaaaatataaaataaaatttatattatagagaaaaaaattgcggatttttgtagtattttacttttacagaatgacttttcagaagggagttctgattttttttctgaaaaatctaaaatttccagaatttctggaataactttttttctttagaagatagaaattccaaataaatcccataaaattctcccgattttttgctatttttaaagctttatttgctcaaaattggtcaacccttaggctagatatgaatttttcaatattcgcccaaaatcccgtgggccaaaaaattggaaaatattttcgaatttttaaaaaattccaaaaattttgaaacgaaaaataaacatcatatgcgtgctcagcacatcaaaataccccagaaaaatcgagtgacccccattttcaacccaaaaaaaattttcgaaaattt

SEQ ID NO: 44196 - DNA, 964 bp, Heterodera glycines
aaatcgattttttcaagtgtccgtttggggtactcaaacatttatggggagcaaaaatccaacgcagaattaaagtacaggctatagggaagctattcccgaaggattcggtctccccataaatctgggcgcatcggttcggggggactgccccgaaaacaaaaaaatcgattttttcaagtgtccgtttggggtactcaaacaattatggggagcaaaaatccaacgcagaattaaagtacaggctatagggaagctattcccgaaggattcggtctccccataaatctgggcgcatcggttcggggggactgccccgaaaacaaaaaaatcgattttttcaagtgtccgtttggggtactcaaacaattatggggagcaaaaatccaacgcagaattaaagtacaggctatagggaagctattcccgaaggattcggtctccccataaatctgggcgcatcggttcggggggactgccccgaaaacaaaaataaatcgattttttcaagtgtccgtttggggtactcaaacaattatggggagcaaaaatccaacgcagaattaaagtacaggctatagtgaagctattccggaaggattcggtctccccataaatctgggcgcatcggttcagggggactgccccgaaaacccaaaaaaaaattttttggataaaaattatttaaatgaactgactagataatatttaaaataggttatttctcttcctttcagtatccctgcaaagtttggtgcgcttctgatcagtttctgaaaaaaaagttaagcctaaactttttggcctgtttaaaaaggaattaaaaattttattcatctccctttttgatagaaaaagcatcagagtgcctaaactaacatgtaaataaaatttggtgcgtttcagaaccctttctgaaaaaatatttaagaattaattttgcaaaaaataaataaaaaacgaa

SEQ ID NO: 44197 - DNA, 786 bp, Heterodera glycines
  unsure (1)..(786): unsure at all n locations
atgaaaaacattacttcatgaaaaatcatagacattacataaaatcatagattaaatgatgtcatatgataaatctgatgtcagattcgtgatcagcgccctagataaccccctagtagttctcagaatcgcaaaaaacgacccttttttccctttttttatgggaccaatgatgtgaacgattaccgaaaaaacttaccaattcatcgtacatttcaaaaaaaacgctgaaaaattttttcaaaatttttcttgaaaattttctaagtttaatttttttttccggcgacgaaattttgtcctgttcccgtgtaaaaataattcattcacccaattcaaattgtatttaattccgttttattataaaataatcactcaataaaatatttctaaaatttagaaaatatattatttaattgctaatatttattcaaatacctattcacaatgtttcttctaattgtcatttttactttgcttttctctgctttcattttttggctttttactgccctctcaaattatcggcgacatttgaaagtgtccgacaatatgatttgatttaggaaatattggaaaattcgatggaactgacaaagggcaatgattacaacttgttcaagcagtggctgggcgagggtttgctgctgagcaccgatgcaaaatggaaaagacagcgacgcattctgacgccaacttttcactttgctaaagtgaagcagtacancgacattttcacgncaangcacgtgaatttgtgcaaaggtcacaaaaaagcgctttttg

SEQ ID NO: 44198 - DNA, 1136 bp, Heterodera glycines
aaattctctacaaaaatgttctaaggcactttttggcttttaccaactcctgacgagttatgggcccgggactcaaatgtcccgctcaggccaaaatttttttctatttccgggaaaaaatcgaaattttcctgaaaaaaataccagtcgatagagctcaaaaaactatgttttggaagtggtctccgtttttctgggaaaattcgttaaaaaatcctaaaattcaaaaaccaaaaaaccgttttttaggcctagctcgaaaaattttgaaaattttagaaattttaaaatctggaaaaatcgagctcaccgagctctacaataagtctgctggcaaccctgcgctcagctcaaggcctaatgagttattcaacggggactgaactgggcaaagttggtactgaaaagttgccaatttctgcagcccttccaagtataggtagaggcctggaattttttttgaaaattagaaaacacttcaacttagtttcctaccagcaagcattttttgatcagagttttagaaaaaaagttacgggccttcaaacgcaagcaaaagtgagaaattagccgccgggactcagttggccaccggagcggaatgccgatagttttcctgaatgcgcctcaaaaagttgtaagacccttccaccactttcagacccctcccgacagccgttcgactcaaattagtttttaagacgaaaccccctttttctctatatatatataaactagcggggtgtgcttacgtgtttctggggtgcttaaagcgcttcgcgctttcggagcttcgctacctagattagctctggttgtggagatttggaatttttaaaaaattatctgggacttttaggccgcttcgcgccctcgatcggacgctttgcgcccgttttttaaattttgttggcctcatacgggcgcttcgcgcccgtttctaaatttgttgggctattaaggcagcttcgaggcctcagacgggcgcttcgcgcccgtttctaaatttgttgggctattaaggccgcttcgcggcctcagacgggcgcttcgcgcccgtttctaaatttgttgggctattaaggcagcttcgaggcctcagacgggcgcttcgcgcccgtttctaaatttgttgg

SEQ ID NO: 44199 - DNA, 1115 bp, Heterodera glycines
aaagggttaaagtatgcgcataaaggccttaattaaacacttgaacatattcacatattttgtgtaattctatctcggactccctcctgctcaaaataatgagtttaatgcaaaatagatttgactagcggatactacgaagatagtttaaaattttcatctcttaattattttcatttaaaagtagttatactttttctgtctgcagctgtttgactttgaatactgcggagtaaaaaaaggaatttttcttttcactaattcaagacaatttttgtcctttcttgattagctaataattttgaaaattactcaccaattaaaatatacttgcatttttcaaaagaggtattcataattttaaaataagcacatatttatagtgagactgttttcaactcgcttctattattaaagggttaaaggatgcgcataaaggccttaattaaacacaagaacatattcacatattttgtgtaattctatatcggactccctcctgctcaaaataatgagtttaatgcaaaaaagatttgagtagcagatactacgaagatattttaaaattttcatctcttaaaattattttcatttaaaagtagttatactttttctgtctgcagctgtttgactttgaatactgctgagtaaaaataggaattttttcttttcactaatagaggacaatttttggcctttcttgattagctaataattttgaaaattactcaccaattaaaatatacttgcatttttcaaaagaggtattcataattttaaaataatcacatatttatagtgagactgttttcaactcgcttctattattaaagggttaaagtatgcgcataaaggccttaattaaacacaagaacatattcacatattttgtgtaattctatctcggactccctcctgctcaaaataatgagtttaatgcaaaatagatttgactagcggatactacgaagatagtttaaaattttcatctcttaattattttcatttaaaagtagttatactttttctgtctgcagctgtttgactttgatactgcggagtaaaaaaaagatttttcttttcactaattcagacaatttttgtcttttcttgat

SEQ ID NO: 44200 - DNA, 1417 bp, Heterodera glycines
  unsure (1)..(1417): unsure at all n locations
atggccatgccaaattcgctgacaatttcactgccctgcgaatgggatgaactgtaggccaagtcgaccagtgccaagtacagctgcacattgtcctggaaacgaatccaaaaaatatattaaaaacattgggccgattgtgcgttatccgaaggatttatccgaaaatcggccaattttaggggattttttcagtaaactttaatgagcgatgggaagccgacgccaaattttgttaatgctcgtacaattcttgcctctccccttttaaatcatgattaaatttcgagaaaaatattttttagtgttatgaaaaatttcatggcattcaacttttgtgatttcttaaaaattcccgaataaaaactggcgggaacctttaaaaatatttcttcaaaatacattcctgagaatgggcttttttcgagaatagctgctgctggtgctgcttatggcttcttttttccaccatttgccttttcctaatggtttattttatccgcaccattcatgaggcatatcctatcacttgctgattgttgttactgctggcattggtctactgatttctctcattgttgttatcacctcgccattttcaggctttacgaaaaattaaactaaaaatacacacctaagatatgacccgaaaattttcagaaattacattacaaataaatgaaaaactttcaaaattcatcccctaacatttattctattttatttgtttatttatgttttttctgacttttcgcgatttttatgagaatatttgttgttgcaattttgtggaaataaaataatgaattaattacatgaaatgtgtgaattcaattctttttttgcaatgggactccaaatctgtgcgttttgaacaaacaaaatgttattcacctgaaagggcaaaagagacgagcagcggctcaactgaacaaataaaatttacttcccgaatcgaccatttaaaatgaattaactaacaaaaatattcaatgagaatcattggcattgcttaaaaagaaaatggagggcagagaaggtcaaaaaccagggaaaacagtacataggaaaggaaagggaaaattgaaaagacgtgataaagtggagggggaacagagtggtcaaagatcactaagagtggtcagtcaacagagaagacagtgaaaattgagaaatagttgtacaatttgtacaattccctgaccctcctccaccaatttataaaacatacaaaaattgcaaattctcaccgcatatgaaaaccccngttttaccacagttctttggctctgcccatcantggataagatcattcaatggatcccgtccgtgattatcgcaatttttgacagagctaagnaaatgtgncgtgaggcgtcgcgccaggccaggtaccgagaatcggtccctgcgctga

SEQ ID NO: 44201 - DNA, 846 bp, Heterodera glycines
agggtgtgcgtgcctgggagtggctcagcctgagatagggatgttgcgcccgtaaagcaccgcggttcctgtggtgtctcgtgcgctccacacggcccttgaaaatgcgagggaagctatttgaatctcctgcctgatcgtaccgatatccgcagcaggtctccaaggtgaacagcctctagtcgatagaataatgtaggtaagggaagtcggcaaattagattcgtaacttcgggaaaagaattggctctaaaggtcgggtcagccgggctgttgcgtgaaacaggcggcttttgcccgtggctgcgtgctgttctttcggggatggtgcgtggactagtggtgagagctgcttgtggagcgcttcagctgcgtgtatgctcgtcagggtatgcacttcggttggcgctgaacgaccagtttagaactggcacgaactcggggaatccgactgtctaattaaaacagaggagacggatggtccttgtggacgttgaccgtgtctgatttctgcccagtgctctgaatgttaagccaaggaaacttgattaagcgcgggtaaacggcgggagtaactatgactctcttaaggtagccaaatgcctcgtcggctaaatatagacgcgcacgaatggatcaacgagattcccactgtccttatgtgctatctagcaaatcctctgacaaaggaacgtgcttgacaaatttatcgggtaatgaagaacccgggggcgaaggcccaccacgaggccgcgaagagaaaagagtgagtaccttcggtgcaggaaaattattaaattttaaaaattttttaattgctttttaaatatgccaaaaaaaatgtag

SEQ ID NO: 44202 - DNA, 1380 bp, Heterodera glycines
  unsure (1)..(1380): unsure at all n locations
atcggctgtccgccttggtgatgtgttgtttcgcccgttgcaccgcgatggtccgatcggcgtttttgcactgcctcgggcgtccttcacgcggagaaggcgccacatccgctttttatcgctttccttcccctcattcacgtgctcgcctgctgccgtccctcccttcgccccctttttgtcctcccttcccttcatcatttcccgtttgccctatttttcccatctttccatccatttatcactccttgttcgcaacttcattcactcctccccgtcctcctcatttgtccgctcaacggacattcgcggctgtcgttcagccgcgacataatttatacaaaatttgagcataactctattttaatgtacataaaaaaagttaataattttaaaaatgaataacagttataaaagtaaaaataaaattgctaaattggataaacaacctgtaactaatctgtgttctttgccgatgcatacaacaagggaatattaatgaaaaaataaaaagaaaatataaacatttattcaaaattaagaaatttaataaataaaaattcaacattaataattatatatttttatattgaaaaaatgattaatgatttttttccattttttaagtttttgtattttttaaatctaattttttgcattttttccatatgaattgccgcaataaattgacgaatatcgctgaacgttttgcgttttgcatactcctcatttaataaatgagaaaattgaattattgttatggaatcataattttagtatactttattagtgaatttaatggctaattatttaataatatttatttaattttataattaattgagtaaattatgtctgattaatgcttattttctatttattttcacaataggtaaagaaattttttaaatcaaacatatcatatattattattcaaagttaaataatatacaatggcaaaaatgtatgaaaatacaaaagaaaacgcaaagagtgaaaagtcaaaaatggaaaaagcaattgaaaatgcgccaaataaaaatgaattgattactttatttttttttaaaagagcgactctaaaaaacatttattgttatttatcatggagaaataaatatttttcatttaaatatctaaatattaaaaaaaatatgaattaaattattttataatcaaatactgagaattcaaaataaataaaataataaattatcttaaaagtctaaatggaaatgaagaagttaacattaattaatcagaacacaaactcaaaaacacaacaattgcataacgagaaatttttattaatgaaatctgtgcaaataaaataacaattcattgaanaacatatttatacaaatactaaaaataaaataa

SEQ ID NO: 44203 - DNA, 1578 bp, Heterodera glycines
  unsure (1)..(1578): unsure at all n locations
gaggccgatgagcaaaaaaggctgtaactcgggggtaagggctcgctcatatctcaccctcgacaactttttaaaaattttcaaccttagaaaatttcaaaaaaattcaaaaaaagatgaaaaatttttagggaatgtttggtacacccacgcccttgcggttatactataataattacttcggacgtgacgaaatcgtcaatgtgaaaaagatttgatccggcatgaaaaatgtgaaagaatttgcgcgtgtaatccttctcaaccacttgcgagaccaaacggacagtcacggaacatgggcatgaccaggtcgagtaatccctttccgaatgcatcggtgtgctgctgaccaacacctcgtcatttgggttcttatgataacgagcggtgaggaatttttagtgacacaaaatctcaaaataattgtctaaatagcgccaaaaaatgccaaaatagtatctaaaataatgacaaaaagttccgaaataatgatgaaaagtgacaaaattttcagccaaaaattgagcaaaaattctttatccactggttgctaatgagattatccttcctttaacattttttaaaccaaaaattaaagaatgctttttgtgtcatcaaaataatgcagcagaaaaaatagttaaaaaattaaaaatcctcgccctaataataactagagtaggctgggtccaggtatttgggcaaaaaacgggtccgggtccgggtagtgaaaaaaccgggtatccgggtctgggacccggtcgggtacccggaacccgcgccctttccccctaatttattgtggaatttaaaaatgacaaaattaatatttcattagtcaaaaaattctgaaaaactaggttagtatgcttttgatgctgatcaaatctttacaccaactagatcagatccctggtgatctgggcacccaaaacnccactgaaaacgtggaaatttttgaaaaaaattcgtaaagggttggaaaatttttccggaaaaaattatcaggctcattgttaagaacacaaaatactataaaaaaagtccgcaaaattgttttaattgaaattaaatattaattaaaaatcgaactgatggctggaaaagccgggaatttcccggtcccggtcaaaactggtcaaaaccgggaccttggtactcagttgtccgtgttttggtcccggtcccgtcctaccctagtataaaatattgggaatttcttttttaccaatagtgttgttattgcagtagaatgcgtttttctttatttgcattttatctgtttgggattattactttttgctaaattgccttttcaattactttttgttagtaaaatgcgagaacaacttaattaaaatgagcctcatgaaaaataatttaagataattgtcgttattttttttatctctagttcatattaataattgtaaattaataataaataaattatttttaattttatttcacaaaatagtttaaaataattttctattaaccattttgatgcttaatgatttgttcttttaaagaataataattcaaaattttcttttaatgtttttcanatttaaa

SEQ ID NO: 44204 - DNA, 1273 bp, Heterodera glycines
aggccgcgaagaggccgagtgagtaccttcggtgcaggaaaattattaaattttaaaaattttttaattgctttttaaatatgccaaaaaatgtaggcttaacttttttagtgaaaattcgatcactcatattttttgctaattgagcagaagcgtaccaaactttgcagggatactccccggtaaaggactaacttacactgaaatgagcgccgagctagctggctcaaaacaattttcgaaaatctgagtctttcgtttttatttattttttgcaaaattaattcttaaatattttttcagaaagggttctgaaacgcaccaaattttatttacatgttagtttaggcactctgatgctttttctatcaaaaagggagatgaataaaatttttaaaaatttttaattcctttttaaacaggccaaaaagtttaggcttaacttttttttcagaaactgatcagaagcgcaccaaactttgcagggatactgaaaggaagagaaataacctattttaaatattatctagtcagttcatttaaataatttttatccaaaaaattttttttgggttttcggggcagtccccctgaaccgatgcgcccagatttatggggagaaaattttcagaattctgagtctcctattattttatttttttttcaaaatttgaagggaggcggggggggaaagtataatttaaatagtataccaatgctcgtgcaaaatattatttcgattatattttgttgaaatattcaaaaaatacaaatatagaaaaaaaaaataaaattgaaaaaccaaaaatttaaggataacctatcgactatttgaattaaaaaaacaaaaaaaaatatgttaatttaatatttggctatattaaaatatttattaaatgttaaaaaaaatcttaagataatttttcattcataaaatttttttgaatataaaaataactaattcatcaattcagatatctttacgggttagtccaagttatcatatttatctacttttctaatttttattattaatttttttttgggtttttggcccaaaatctaactataaaataatttaatctttttttcatttttattcaaaaattaatgaatttttaaatattataaaaataaaagaaatgccttcagagtgtttgcctgtgcttcaatcagttgttcattgcctttcaattcgaccattaaacgatgttttgttatatccaaaaaatccaacattttcttatcaattcgctccgatacaaattccaac

SEQ ID NO: 44205 - DNA, 1057 bp, Heterodera glycines
  unsure (1)..(1057): unsure at all n locations
atatantttccgcatcccaaacatgggatggaaaataggcaccttctcgacaaatattttcaagttttgccatgctatttatctttcgggactcaatttatgacgaaaatatcgggctccaattattttttattttctactaacacttttctagtggatcaatttatagattcaggaaattcatcgcatgaattgaaaagtatttatttttattaaaatttgctcgcttattttccgtaagaaagtttttgggaggaatttcacaaccttgccataggaaaaactcatatctgactcgtataaaacataactcgaacagtaggtatatttgttgtgcaattttatagtccagccatcgctagggctctcaccgcggtgtattttaggtgtgtctttgatgtatcaaaatttctctcggccgcgttgttgactgaaaaataaaaagaacttaaattattgcaatattgtttatacgaagtcttttaatattattctgacgacttccatgataataaatacttatacaaagtttatctttttatatatttccgcatcccaaacatggatggaaaataggcaataaatcgacaaatattttcaagttttgccatgctatttatctttcgggactcaatttatgacgaaaatatgggctccaattattttttattttctactaacgcttttctagtggatcaatttatagattcaagaaattccttgcatgaattgaaaagtatttatttttattaaaatttgctgcttattttccgtaagaaagtttttgggaggaatttgacaaccttgccatagaaaaaactcatatctgactcgtaaaaacataatccaaacatggatggaaaataggcaataaatcgacaaatattttcaagttttgccatgctatttatctttcgggactcaatttatgacgaaaatatgggctccaattattttttattttctactaacacttttctagtggatcaatttatagattcaggaaattcattgcgtgaattgaaaagtatttatttttattaaaatttgctgctta

SEQ ID NO: 44206 - DNA, 1041 bp, Heterodera glycines
  unsure (1)..(1041): unsure at all n locations
aattacgctcaaaaagcttttcaaacnaatttagcgcttccaattccttctacaatcgcctttatacatcccattatgagcgctaaaattatcagagtgccgaaaatcgcatgtgatctacgcctagcaaaaaatggtgtaagtaaaaatcgtaattacgctcaaaaagctcctcaaacaattttagcgcttccaattacttctacaatcgcctttatacatcccattatgagcgctaaaattatcagagtgccgaaaatcgcatgtgatctaagcctagcaaaaaatggtgtaagtaaaaatcgtaattacgctcaaaaagcttctcaaacaattttagcgcttccaattccttctacaatcgcctttatacattccattatgagcgctaaaattatcagagtgccgaaaaccgcatgtgatctaagcctagcaaaaaatggtgtaagtaaaaatcgtaattacgcttaaaaagcttctcaaacaattttagcgcttccaattccttctacaaacgcctttatacatcccattatgagcgctaaaattatcagagtgccgaaaatcgcatgtgatctaagcctagcaaaaaatggtgtaagtaaaaatcgtaattacgctcaaaaagcttctcaaacaattttagcgcatccaattccttctacaatcgcctttatacatcccattatgaacgctaaaattatcagagtgccgaaaatcgcatgtgatctaagcctagcaaaaaatggtgtaagtaaaaatcgtaattacgctcaaaaagcttttcaaacaattttagcgcttccaattccttctacaatcgcctttatacatcccattatgagcgctaaaattatcagagtgccgaaaatcgcatgtgatctaagcctagcaaaaaatggtgtaagtaaaaatcgtaattacgctcaaaaagcttctcnaacaattntagcgcatccaattcctttctacatcgcctntatacatcccattatgagcgctaaaattatcagagtgcccgaaatcgcatgtgatctaagc

SEQ ID NO: 44207 - DNA, 909 bp, Heterodera glycines
gtgattaataataaaatagtaaaaaatgatttcttaaaaaaagacttttggaatttctgctaaaatcttcccccatttcggttcattcgttgctgggacacattaaaatagaaattcataatttttgttaatttattttgaataaatttgttaacgaaattttactcaaccataatttttcggaaaactaatcgttttattgagaataagcttgaattatgttcggtattataggtttttggatataaaataattttggtatttttcaaaaatttggcttcgaattcgtctgtaaaaaatccctctaaatgtgtgccttcaaaatcgaaagtgttgctcgagtctctgaaaattggttggaactcgagaatcggcaccgtactttgaccaccaaatgtgcccctttgaacctctaattttgagttgctaatgagctgtttttgttgccaaagacaacatggaaaatatttttaattaaattgttaagaaatgattaattgtaagaatttgaaaaatttggacaaataaaaatattgcaaaaaaaaaaaaggaaattgtacctgaaaagtgtatatgtagtcaagcatttttaacaattatgatttttggtacatatttatttcaattagccttttcactcctgcgccgtggttgggaaaagtctgagccgcgatttccgaaggaacagacagaagtctccggaaaaaattaattgaaatgaggagaattttgggtgccgataggcgccgcggaaaatttcactttccatgtttttcaagattttagctgagattttcacgaaataagaaccatttaaatgtattttgtggaaaataattaattagcaaaatgaacaaaaatgtcgggtcggactctcaactttatatgtggctatatgccgagtgttgc

SEQ ID NO: 44208 - DNA, 958 bp, Heterodera glycines
ttgttaatgctaatgcttacacacctggagtaggcgaatctccttgcaccgacgtaattttattaaataaataagtaaattctcttaggctagaacaaaaaggatttttactttggcactttttttgggaaagataattaattcaatattttctttctcgttttcccgtgaattcagcaaattttaatctcataaaaattcaaacacctaaaaatagcaagattttacggttttgagccaatgctttgagaaaatgcgggttttgaaggcaccgccgatgaaaaaagaaataactcaatttcataaaattatttaatttttgtataaaattgccgaaatatggttttgttgaaatatttaaatttttgactttacgaaatcgcctctctcttattccatcgtcttttttctcaatagcctctgacgctgttctaccaaaaatgggcgggagagccatcgaaaaactgtacgttgccgaacactgaggaaaactcgacaacgccggaaccaacgcctgaaccaacgccggaaccaacgcctgaaccaacgctggaactaacgccggaatcaaaaccagagccggaaccaacgccgcaaaccaagaagccaatgacggctcaaatgttaaacgggttgctttacgtgagcgtggtcgtcgctttccgattgttcttgcgacttttgtgcccacgaattcggtcatggtgagaatgacaacagtttctttccccacgcttatcaattccgcttggcttataactcatcctgtcgaaggttactaaaataaaaacaacaattttgcctaaataattatacataatccaattattctgacaaaataggcaaatggcgccgggacataacttcgccgcaaaactttttttcaaatttcaagaaaatttcgactttatcttttttgaaaacctaacaagagaacattcccagccgtatgtcagaa

SEQ ID NO: 44209 - DNA, 1686 bp, Heterodera glycines
  unsure (1)..(1686): unsure at all n locations
gaccatgtacagcatgggtgggagtaccgcccgaaaagcattggtttactaaaaaaaaagattaaaacgtgaaacgaaaaaacggtctcagatatccggccgttttctcagagccgaaccggtcgcgaaattgagaaaattaaaaaaaaaggaaatttcagtttttaaaatttacgaaatccaattttgtaaacaattacgaaataggaaaagtgaatgaattttgtaagtgctttttcgtttaacgctgaaaattttacaaaattggctcggacccctgtataatcaaaacccaccggttgctgttggtgctgttgcgtgccgaccacaacactgcctccacaggtgctgcttgccatcatcgtcattttggccattgtcgccgggccgccgttgttcgggaaaaacgccgccggcacatgggcaggcgaaatttgggcggacgttggcgcactgctcgtcaccgctgctgaagttggcgaagcatttgcggaaatgatgccggcaccggcagtggttgtggacgtctgttgtgccatcgcttggtgatgctgggccgacggtaacatgacggcgtacggagagacggctaaaaatggggggggggngaaggaggatgaaaatccattgaacccgtacataaattcggattcggcacggttttagggagtcttaatggtcccgaatggtccagctatcgaacaagacgcgaaaaaccaaaatattcgggattttcgaacccgaaatttcgcgctcccaagccctggtggtccccaaggccaattgaatctggcgccctcctacatttcttggcataatttaccataggcaaaaagtgttgttggccatcgacgttccgccgaccatgtgcccatccatcatggccatcattgtgtgaattgcggggtcacttcgtgctcttaaaaaaatcgtagaaaatttacaaaattcacacaggcaaaatgcatttaatttccttagatttttcaaaatcttacacaaaaacactgaaaactggttattttggatacaaaaaactatcaacaatagccataaaatgctattttggcttctaacgacgtcttattttgcgtttggaatgaaaggtgtccgatttcgccaaaaatgttttttggaaccgtgacaattttcttcccgagtaaatgccaatttgcgccctccaaaatgccaatttgtgccctccaaaatgccaatttgtgccctcttctggcgcccactttggccatgccgcgtccggcagttggagatgcgccgccgctgccgccatgccaccgccgccgtgcgacatgcgctggtggtggtaacgctgctgcagcgattgttgttgctgttgctgctgtagctgttgctggtggttgtgttgttgttgttcgtgcctcgtcgccacgcccgggccaccgttggcgccgccgccaatggtcgccgcgttgggcgacccgccgccgttgcgacagtacgggtggaaatggtgcggcgacgcgccgggcgaccgcgtccgggccatcatttgctaaacataaaaatgaattggatttgaagaaagcaatttttcggcacaattttctgatttatggccaaccaaaattgcaattcattatcgataataaaatagaaattttaaaaaaaagataaattttttgggtattaaaaaaccatgttacactc

SEQ ID NO: 44210 - DNA, 971 bp, Heterodera glycines
  unsure (1)..(971): unsure at all n locations
cacaaaattntcggttaaatatcaaatttaatcaattgacagaattgctagagaccaaccaacccctttcgataaataaatataatgaactttttgagcaatatattttataaattttataattcttagagtattaacggtttttgacaattaaaaaatgaaatggaacttttgagtgccagcggtgccggtaggcgccgccgggaaaatttttttaaatttgagtgtaatttgttaacagatttacaccaaaaaatgaccaaattttgcaactttgagctacttttttaaataaaataaatttttagggtccggtggtgtcgatgggcgccgccggtgaaaaactttaaatttttagtcattttgttaacagatttaatccaaaaataaaaacatttttcgatttgaattgttaaatttatattgaatttccgtcgaaaataggaataactttgaaaaattgaagaaaaacaactactttgatgagaactgatccaaaggaaacataatgaaaaatgccaagagcactcactaccaatcgaccatgcatgcgaataaacaaaagaaagcaaaaagttaatatatatatatatataattactcccgcggaatctcgtcccgcataaaaattgagttccaatcccgcagcgagacccgcaaattttcaattttttgtgcgccgcgcattgcatttttttgtcaaacgtaatcccaaaatattttctattactaaatttaaataaattgatattaaattgagcaaacgacaacaacaatgaacgttatgaagactggagaagaacatgacatcaccaatttcaaacttgggaaaactcaaaaggtatgcatttgtctttggtccgaagggaaaaacttgttaaaaaataaagtcaaccttttaattaagtcttccggtatgggattgaaaaaatctgtggactgccacgctgacagtcattgcttgatggcgt

SEQ ID NO: 44211 - DNA, 650 bp, Heterodera glycines
caccaacatttcaatctacgggactcaatccaccagcatttcaatcattgggactcaatccaccaacatttcaatcaatgggactcaacccaccagcatttcaatcatcgggactcaatccgccagcattcaatcaatgggactcaattctccagcatttcaattactgggactcaattctcctgcatttcaatcacggggactcaaccctcaagcatttcaatcgcagggactcaaaccaccaacattccgatcaacgggactcaatccaccagcatttcaatcactgggactcaacccaccaacattccaatcaacgggactcaatccaccagcatttcaatcactgggactcaatccaccaacatttcaatcactgggactcaacccaccagcatttcaatcaacgggactcaatccaccagcattcaatcactgggactcaattcatcagcatttcaattactgggactcaattcaccgacatttcaatcactgggactcaacccaccaacattccaatcaacgggactcaatccaccaacatttcaatcactgggactcaacccaccagcatttcaatcaacgggactcaatccaccagcattcaatcactgggactcaattcttctgcatttcaattactggga

SEQ ID NO: 44212 - DNA, 538 bp, Heterodera glycines
cattgcgggattggaactcaaatttttttgtgggacgggatcccgcgtggattcatcccgcaacttttggattgcggactgggatcccgcgaaatcccatcccgcgtggggtcccagtttctaaccagagtagacgtgaacttgccttctttttcgtctcgagatttttgctatatacttctgtgagactcgaaaaaagtcaaattttttgttgttgtttcgagtcagtctcgagttttttcatgttttcaatgtcaattttttttttgagattccagaaaactgggtgctttaattctcaagtcttgggacagcggagataactcaattgtttgaaattgtttgccgttttttaaatcgaaggaacttttcgcgaaaattttaaactgacagggattactaggaatacgattttttaaagtttttacttattcaaaaagcaagaaaaaaaatgttttttttgtagttgttaagctagttttcgagttattagcaactattttctagttttttattttttagcacctaaaaacttaaa

SEQ ID NO: 44213 - DNA, 1634 bp, Heterodera glycines
  unsure (1)..(1634): unsure at all n locations
taaaattataaaaaatacnttgaaagcattcatcgaatgtgaatantttcgtctaaacaaaaacataaataaacaattgtcattttcgcccttttctcaatgcctttttccgttgcgtatggcctaagtcgacaaaggtcctaacaaaaatatttattattttttggcattttcccatttccccgttggcattctctcccccccctttcccccctagcgttgtgccatcactcacattggtcctaccgcttcacctgaatggtgcagtctttgcctgcgcaaatgatcacgtccagcagttcgcgcagcgacgcaaggcggcggccctcggcgaattcggcgcccaattcggtgacaaaggcatcgtggaaaatgcgaagggcgtcggcaccgccacgcgcatactccgcgggcaaaagacagtccatttttccggtactttggagcaaaggcgatggcacacgtcgaagggggcgaaaggtgaaaaagtgcctggattgccaagccgaaggaaattcgcactgacaattatttaatgacccctcggggaaaatccccaccccccccgccaatcattcatcatttgtttcccattcttcaccatcttccttttttggcgtggcgttcatttcctcgccatttttcagctcgtcgtcgtccgggcaacccccgccctttttggcgatgctttacaataacatcaaaagatgaacggtgatttttggcaatttgttgttgaatttgcgtacaattcgtagggcaaaagtctattggaagaaaagaaaaaaggacaaacggacgaatgagagaagcgaagaacggattatcagattatgcaacatttgaaaatggtaaaaaaacaattgaaaaaagtgataaacggagaaagggaagaaaagcagcggataattgggcggcttttgcctttaaagcggctgatcagtgattaattcgatttgttaatttgccattgtgcctatgctatttaatctcgttttgtgctccttttcatctcttattcctcggcctccatctttgttcgcgtcatttcacctccactttcccacttccttctcatttccccttcaaaagtcgtctcaaatttcggaatgcccccgggggataaaagggcaaaaaacagacggacaaagtgagcagctgttgccgatcaccgaatgatgatgggtcagtcgccttttgttcttcctttttcacttttgtttttctttttacttttctcattttgaataaatttaatggaagtcctttttttttgattttccgtttcacttttcaaatagaaaaacaaacagtgaattggccacatttgtctaatgggtggcgtcggtgcgattggccgaggcattgcccccggggaggggcccatctggcacattgtttttctgccctccgcttcataaatttggtccaaattaccaccattttctcactttgtgtggccctttggccgctctgtcatttattttccaaaaattccattanatgtgccaatgccncgcgaatgagtgaatttggatgngtcaccccaggggggggcgggtggccccttttattaaaaaacttgccaagttgtaggaaaataaaaaaatgtaagacatataaaattcgtatct

SEQ ID NO: 44214 - DNA, 667 bp, Heterodera glycines
tatttctaatatttatattcaaaaattaatttaaatatattttttttaattacaaattaaaataaagcgtcaaaaatacttgcgcaatggattagagcccttttcagaccaaaataacgagttcgaacaaaatgtcgaaaagtcgaacattgttcgaactctacaaaaatgatcaggaagacatttccagacagggggttactccaaggggggtcgaaatgttgttatttttgctcaaaaacgacgtttagacccactttttggagttcgaacaaatttcatttgttattttcgctcacagagcacttgtaagacctcaaaagagactttaaatgtttgtacagtgactgggagccctgggttattgaaaataaaaagttcgaacaaaaggtcgaaaagtcgaacattgttcgaactctaccaaaatgatcaggaagacatttccagacagggggttactccaaggggggtcgaaatgttgttatttttgatctctgtcaaataaaacccgtaataactttactaaaagctatcatacagacttgtgttatagtacatgcaatagcggatattctctaaaacaatccttcatgaacatattttttttttacgatatattttaaaaattacgttctttctttgtgagaggagcaaaactcattttttt

SEQ ID NO: 44215 - DNA, 1219 bp, Heterodera glycines
  unsure (1)..(1219): unsure at all n locations
tgtgtttcatatttttgcctgaaatatgaattttttattttggtaagaatgggagtgaagtctgagaaaaaattatttggaaactgtgagaaagtaaaaattttattgaaaaaaattaatctatcccttttaagttttgttaatttttatgcaaaacaaattaatttcgctgatgatcaattttaatgtgttttcttaaagtttctgttaagacaataatttaatgcttgtttgttatgctttacaatttaatatttaaatattttagaaattatttcaatttcatttttttcattatttattatttgttattttattctaatttattaagtattttactcatgttgatgcagctgcattttttattcagagcttgccaatagttaggtttgataaaaattaattaattaattttcgtagtaatttatataaattttatttttcttgaattatgcaaatattttatttttataattaaatagtgccaatttataaacaattaatgaaatattataatataactaaatttttatgagggttttattgttactttatttgcaatttgaatgatttctagataaagatacccattcttgggcttttaattaattttaagtgaatttttgttttttttatttaaataaaagtgagtttactttactgaagtattatttattaatcatacttttagtggtaaatataaataaatctgttaattagagaatttaattaaaagcataaagacagtcagaggcaggggaaatggcacataattagaaaagaaaaataatatagagagccaaattatcccccatttaacacacttatttattagacattttttatagaatattcaaaaatttaaaaaatgagttgttaataatagagagtgaaatattttcttatttttggtttggaatttgtgtaaaattttataaattaattcaaccttatattaatattattattttaggatggttaaatgtgtcgacatttttaaagataaatttattatacactttcgtaattcttgatccgaagtgatatattttgtattttaattgaatttcaaaacaaaatttttaagcagattaaaaaaaaaagttgtttgaattattaatgccttcaacacattttttataattccaatttatatgaaatattatttatatttactcgagatgcanataattacttaataaaaattttatacattgaa

SEQ ID NO: 44216 - DNA, 1252 bp, Heterodera glycines
catccacgggtacaatgggcgagcttcacataggcatcaggggtgacagtgcacacttcgctccattcccgtggtttgcacattgacaaaaagttgggccgaatgcgaccgatcaagcatttaaaagcgtcgatggccaaagtcatcagccagaaagcgatgcagtagttcaaatactcgagagtggaacggttgatgacctctaaagcgtatttgaaatttagtattatacaataagaaagaaagcataaatcttaactacaaaagtaaaagaaaagtaagggaattattcagccgtcaaaatgaaaaggatttaaattatgcaacagttaaaatgaaaatctaaaagtaaaggcaatgtttaaacaggtggccaaacccacgagttatattcctcctgcgaggcctcgtagtacgcatcaaatcggcaagaaaaatgaagaagaacggtgcgcccaaagtgattgcgataagaagggacgttgaaacagtgttggggactaagggctctctgatgctttgatcattgcaataaaaacctaaatcaaaaagaatccaaaaaagaattaattagaattaacaacctcgttcaaagggagtgaagaaagtccaaaccaacagtttgtagctcagaaatgtcaatgcaacccaaatgacaatgtccaaagccatataaattaagcatttgagcaagaatagcaatgtggtcgctctgccttcaccaacgtcgaacagccggcccgtgaatgtgatttgtctccacggaacatactgaaaaccgaaaaagaatttaaaacgtacaaataaatgattaaaacctgaagcattattgtgagacttctttcctaattataagtacaacaaccacgttacaaacgaataacaaccttaattgtctgatttaatgaaactgaataccacaaataagtactttttaaaaataattaggcccaaagcccacaaagagaaaatgactgacaatgaatgaggaatggtcatgtggcttatcttgtgctcgtttctttggcaaaagaacttgttccccaaaaaataataaaatttaaatcatataaaaaaaattttaatacctaaatgcaataaaaagaataaaatggttgctggctttggcttatatgttttggtagggataaagggataagacaatgcttcggtgtgcctaccactaccactgtcggtgaatgggaatgtctgattgataaaacagtgcaaggacaaacatacatacaactat

SEQ ID NO: 44217 - DNA, 1372 bp, Heterodera glycines
  unsure (1)..(1372): unsure at all n locations
tatgagtgatagtcaattctgaagaaagaagaagtaatgtgtttttgaaaagaaaaagagaacgcgaaagattgagaagagcaaacgagtcacaagaccaaagaattatgcgcttagaacagatgagaaatagaaataatagtcaatgatctgaagaaagtgtgttagagcgacagctacgcttagaacagatgatttgaaagcctgagaattgagtctcagagattgaaatgctggtgggttgagtcccaagattggaatgccggagatttgagtcccacagattgaaatgctggtgggttgagtccccgtgtttggaatgccggagatttgagtcccacagattgaaatgctggtgggttgagtcccagtgattggaaagcctgacaattgagtctcagagattgaaatgctggtggattgagtcccagagattggaatgtcattgaaagttggtgggttgagtcccagtgtttggaatgcgggagatttgagtcccattgtttggaatgccggagaattgagtctcagagattgaaatgctggtggattgagtcccagagattggaatgtcattgaaagttggtgggttgagtcccagtgtttggaatgccggagatttgagtcccagagattgaaatgccggagaattgagtcccagagattgaaatgctggtgggttgagtcccagtgtttggaatgccggagatttgagtcccattgtttggaatgccggagaattgagtcccagtgattggaaagcctgagaattgagtctcagagattgaaatgctggtgggttgagtcccagagattggaatgtcattgaaagttggtgggttggtcccaatgtttagaatgccgcagatttgagttccagtgtttggaatgccggaggtttgagtcccagagattggaatgccggagatttgagtcccagtgattgaaatgctggtgggttgagtccccgtgtttggaaagcctgacaattgagtcccagagattgaaatgctggtgggttgagtcccagtatttggaatgccggagatttgagtcccacagattgaaatgctggtgggttgagtccccgtgtttggaatgccggagatttgagtcccacagattgaaatgctggtgggttgagtcccagtgataagaaagcctgagaattgagtctcagagattgaaatgctggtgggttgagtcccagagattggaatgccggagatttgagtcccacagattgaaatgctggtgggttgagtccccgtgtttggaatgccggagatttgagtcccacagattgnaatgctggtgngttgagtccccgtgtttggaaatgccgagatttgagtcccacagattgaaatgc

SEQ ID NO: 44218 - DNA, 844 bp, Heterodera glycines
aagacaaagtgctgaaaaaattcgggattctggacgaaaagccgaaaattgtccgttcaaaatcagctccggaaactggcattgttaaagtgccaatcaatgaattggttgtggtcgaacgggcgattgttggatcaaagcgcggtaagtgtgaaatactaattcacaataaaagttgcgaacggatttgcctagaaccgaatatgaaggtggcacaagccgaattaattgagagagtgttcgatccttttccgaactaatgcccaaaagttttgatcaattgcttcttccacacattttcataagaaacctttccaaaattgattcaaaaaacagaatcaatgatcttttttctattctcgatccgaaaacaggcccactttccgagtacgaacaggaacaaatgcacaatctttggagtgaatttaatgaaattttggcattggatgagtcggaattaacccaaaccgatcttataagccacaacataaacaccggaaactcaaatccaattaaaagtgctccaaggccgattccctttggcgtaagagcaaaagttaccgaaatgatcaaggattacctggacaggggaattattcggcaatcatcttccccgtgggcatccccaatagttttggtcacgaaaaaggatggaagtgttagattttgtgtggattacaggaaattgaatgcggtaacagtgaaagattcttacccactcccaaacattgagcaaattcttatgtatttggggaaccgaaaatttttctcggttttggacttaatctcaggcttttggcaagtaaaagttaatgcggaggacgaacccaaaacggcatttact

SEQ ID NO: 44219 - DNA, 1016 bp, Heterodera glycines
aggaagatagcaatattcttgctccccggtgtcgggctttctacttatgcgccgcttgcggtgcagcacaaatgccccagcatctggcccgatgtgcgtgcttaattgctcgcacattgccaaagccgtagcactcgtgtgccatggtggaacgtcggggctttgcttttttttccatttatttcaatcggctagtgctttaaggttttgtgttttgactttgcttttttttccatttatttcaatcggctagtgctttaaggttttgtctttgactttgcttttttttccatttattccaatcgaccacgttaattcattctctatacatttagtgtcttatttcatgaaattatattaatttaattttaaataaagaggcaaatttttacagaaaataaatagacgctgactaattagctaacatttataaagaaagtagaaatttgattaaatgcatatacaatatacaaaatattacttttttaaatttgtataaagttcctattttgtctttgactttgcttttttttccatttatttcaatcggctagtgctttaaggttttgtctttgactttgcttttttttccatttatttcaatcggctagtgctttaaggttttgtctttgactttgctttttttccatttattccaatcgaccacgttaattcattctctatacatttagtgtcttatgtcatgaaattatattaatttaattttaaataaagaggcaaatttttacagaaaataaatagacgctgactaattagctaacatttataaagaaagtagaaatttgattaaatgcatatacaatatacaaaatattacttttttaaatttgtataaagttcctattttgtctttgattttgctttttttccattttatttcaatcggctagtgctttaaagggttttgcttttgactttgcttttttttccatttatttcaattcgggctaagggctttaagggttttgcttttgactttgcttttttggccattt

SEQ ID NO: 44220 - DNA, 855 bp, Heterodera glycines
attttggtttttatttctcaacttagcgagaagtgcacgctgttctcaaccggacgcgtgcaaatccatcctgcgcgggtgctcagcagaaacaatacgaccaaaggcaacggcgtgggtcttgaataagaaaaaataattgtcagtggcgttccgagtgcgtattatattccagagaattagattcttttaatttgtacaggcccaaagtcaggaaaaaaagttctcaaatgtggtgaatacgtatttttttaggccgaaagttcataaaaaaaacttatctcataagatattctgagaatttgatatttctggccaaaaactgctcactaacgtctaatacctttcagaggctaacaagtctatttgtggagttgtacggaaatgagagaataaagcgtttacggattagtacttcataaatagcgcatattggaataccataattatggatatgttcgtcgctgaatatttaaaatccatttttgtctaccagagttggtattgatttgtaatagaatatagtaattatcagtcagctctctaggtctccaagcagttcttcctcccattcggtgtgcgatggcgccaccgcttcaacaagcaatattggagcgtgaacgctattcgcattttcaccctcataggattggacagtgcgtcagccctgctaactcctatccttcaatgggccccctacagctgtagcggactccatatcatcgagagtccgtactacacactcgtggatccccccccccccctagtgggccccttcacccataccccccccccttttaacatcacgtatacaacatttactcttttttcttcaacgactagtggccgaatggt

SEQ ID NO: 44221 - DNA, 964 bp, Heterodera glycines
  unsure (1)..(964): unsure at all n locations
aagagctgcggaaaatgtgaaattaattctcagaaaaatggctatctctttttaggacaatattctatctcgtaaccccgatgctaatccgttccgcagagcctcttcaaaattttntccattaccgcaagagctgcggaaattgtgaattaattctcagaaaaatggctatctctttttaggacaattttctatctcgtaaccccgatgctaatccgttccgcagagcctcttcaaaattttttccattaccctaagagctgcggaaattgtgaattaattctcagaaaaatggctatctctttttaggacaattttctatctcgtaaccccgatgctaatccgttccgcagagcctcttcaaaattttttccattaccccaagagctgcggaaattgtgaattaattctcagaaaaatggctatctctttttaggacaattttctatctcgtaaccccgatgctaatccgttccgcagagcctcttcaaaattttttccattaccgcaagagctgcggaaattgtgaattaattctcagaaaaatggctatctctttttaggacaattttctatctcgtaaccccgatgctaatccgttccgcagagcctcttcaaaattttttccattaccgcaagagttgcggaaattgtgaattaattctcagaaaaatggctatctctttttaggacaattttctatctcgtaaccccgatgctaatccgttccgcagagcctcttcaaaattttttccattaccgcaagagttgcggaaattgtgaattaattctcagaaaaatggctatctctttttaggacaattttctatctcgtaaccccgatgctaatccgttccgcagagcctcttcaaaattttttccattaccgcaagagctgcggaaaatgtgaattaattctcagaaaaatggctatctctttttaggacaattttctatctcgtaa

SEQ ID NO: 44222 - DNA, 1029 bp, Heterodera glycines
ttccctcgagggcgcctccttcactttttgccttccttttgccaaattgaattttcgttcgttcggcacaaattatgagtgatgatggaatggcgcggcacacacaatgttattaccatcacaagcagcagaagcgaggcgagcaaagctttctgactttttgtcctcctcaatttttgaggacccaaaatccattgaaatgccattcaaatttgctgtcccccccccattacaaccaccgacaattcacaaaatgtgccattatttgtgcccttttaccggaatggaaatgccgtgggcaatttagcataaataaaagcgttttttttggcatttggaaatatttaacagccttaggcaattttgaccggtgcatttaactgtgcctttttacttaatattccaaagaataattaatttaaaaagcaataaaaccaaatcaattttatatgaattaatcattttctattaaattttaaattaatgaaaaatggcactgcaaaaattgcgctatttttttctgttgttttgttgcaaaatccaattttccacgtcggcctggcaacacaaatcggctgaactgttggaccagttcatggagcagcagcagcagacgaaccagtgtgatcaggaggcggagaaggaagttagacactgcctgcaggtgggcagaattggatttgataaattttaaaatttgtgggttttctcaataattagtcgcttgtcaaagaaattaatggatgaaaataaattatgcaaaaaaataatctgaagcttttttaagcaaatagtaaatgattaaaaacattaacaaaagttctacctaattatcgtgaaaaagtgagaatttttgtgatttcttcagaaattttggttttgattcgtttatttgacttgatttttaatggttaatagtagagatcgacattttgaaaaaagcctggacctggatttggattccatgttggacctggacctagatccgggaaaaatccaggcctggatccaggtccaggtcgatctcta

SEQ ID NO: 44223 - DNA, 1027 bp, Heterodera glycines
  unsure (1)..(1027): unsure at all n locations
ttgctgcatgttctttgacacttcttcaaaaataacctatgccctttatcgttcaaaacagcatctttgttgttcgcttgagattgacaagcccngatgataaatagctcgagcgcaaaacgncgtgcatgtttggaaagtatcgttcataccaataattgagggtttatttttaaatgaaattttatgataaaccttattatctcagaagctatttaattgattcggatgtttttatcgcggttaattagagcaccgaaaactggtnttgaatcgtgaagtttatcatttctaactcacttctcaaaattgttgataaattgcaaatatatttttccaaaagtctgttgacactttctgaaaataaattctatactcaggtattttccacttattagattttgcaggcttattgctgcatgttctttgacacttcttcaaaataacctatgccctttattcgttcaaaacaccatctttgttgtttcgctttagattgacaagcccgatgataaatagctcgagcgcaaaacgcgtgcatgtttggaaagtatcgttcataccaataattgagggtttatttttaaatgaaattttatgataaaccttattatctcagaagctatttaattgattcgaatgtttttatcgcggttaattagagcaacgaaaactggtttgaatcgtgaagttttctaactcacttctcaaaattgttgataaattgcaaatatatattccaaaagtctgttgacactttttgaaaataaattctatactcatgtattttccacttattagattttgcaggcttattgctgcatgttctttgacacttcttcaaaataacctatgccctttattcgttcaaaacagcatctttgttgtttcgctttggattgacaagcccgatgataaatagctcgagcgcaaaacgcgtgcatgtttggaaagtatcgttcataccaataattgagggtttataaaagaatgaaattttatgataaaccttattatctcagaagct

SEQ ID NO: 44224 - DNA, 1157 bp, Heterodera glycines
agtgatttttctgggattaggccggagaaataaaaaattaccagctatttgaaatgcagtgggcaagcacagcgagtcgcttaaatgcacaccctttgacacgtaaaatattccaaaaaaagagatagtgattttttctggattaggccggagaaataaaaattaccagctatttgaaatgcagtgggcaagcacagcgagtcgcttaaatgcacaccctttgacacgtaaaatattccaaaaaaaaagagatagtgattttttctggattaggccggagaaataaaaattaccagctatttgaaatgcagtgggcaagcacagcgagtcgcttaaatgcacaccctttgacacgtaaaatattccaaaaaaaaagagatagtgattttttctggattaggccggagaaataaaaattaccagctatttgaaatgcagtgggcaagcacagcgagtcgcttaaatgcacaccctttgacacgtaaaatattccaaaaaaagagatagtgattttttctggattaggccggagaaataaaaattaccagctatttgaaatgcagtgggcaagcacagcgagtcgcttaaatgcacaccctttgacacgtaaaatattccaaaaaaagagatagtgattttttctggattaggccggacaaataaaaattaccagctatttgaaatgcagtgggcaagcacagcgagtcgcttaaatgcacaccctttgacacgtaaaatattccaaaaaaagagatagtgattttttctggattaggccggagaaataaaaattaccagctatttgaaatgcagtgggcaagcacagcgagtcgcttaaatgcacaccctttgacacgtaaaatattccaaaaaaagagatagtgattttttctggattaggccggagaaaataaaaattaccagctatttgaaatgcagtgggcaagcacagcgagtcgcttaaatgcacaccctttgacccctaaaattattccaaaaaaagagatagtgattttttctggattaagccggagaaataaaaaattaccacctatttcgaaatgcaatggggaagcaacagcgaggtcggcttaaaatggcaccccctttgacccctaaaaaattcccaaaaaaatagaaaaggggattttttctgg

SEQ ID NO: 44225 - DNA, 1162 bp, Heterodera glycines
tgaaaattcaaataaatatataagaaattttaaaacatattgcggatatatgaaataaaacttttgcttcaataattttgaatgcatgtgcaaaatatattttggcgaaaagcaacaaaaattatattcccccccccccaaaaattttcaggcgtagggcgattccatgggtctcattttggctttaaaggaaatatcccgcaatggctataactaatcattgatgcgcctcggtctataatgcaagaatccgaatttttgtggagaatatgcactctgggtcgagttattaacccagaactaaagtgaccaaatgctttatggactgaactgtccagtacatcaaaacagacaaaagttaataaaattaatatcaaatcgattccttatccttaataaaataacatcggaaaaccaatcccggcttcataactctgtgcgccccccacaaaacctttcggattattgcagtacataacgagaaatgtcgaaataggtatatattttttcatcaatttaccaaaatataggtatctcaacattacaagtgcccgaaattagtcccatcaaatttgaaaatagtattttaacctttttaattggattcaaagctatccttgatttttttgctttgtgaaaattatttctaagggtaggggaatttgatacgctaagcgcgaatgttccgcacccctcagatggtaattgtaagtttgtccccccccccttttttcgaaaaattttttaatgtttccaaaagtcatgaaaacaggtttccagggctttccggtggttcgttcatacaggtcttcggctgtccttccacctgccaatttttgttgtctgtcgttagcgtaacacgtggggcaacctttaagcatttttttttgttcggttgaaaagggcgaccttttttttttaccatgataaaagcaacccatgtattcaatggcaaggttgcgttgagggggttcacgtgtgactaatccatcaaggcggtagccagtgtcttcgacgttagcctcaccaattgaccattgggcagaccgaacatgtactcccggatgtgtcatttcataataacgaatgtatcgtgccgattcagcagatgctcgccgcccccttaggtagccaccttctggcgcattaacaagcttgttca

SEQ ID NO: 44226 - DNA, 1163 bp, Heterodera glycines
aatatgaatgaattttactgatccgacaatttgcgcttcgtcccttttttctcctcttccacagtgatgtcaacggccaatgtcactttgtccccgtctttgtcataaaatcctctgcttgggtccattaattgcttaattatgctcatttattaaatgagggtttacgaatggaaaaagctcaccgcaaaagtgatgaaagtggggaatcccaaattgttcaatttattgttgaaaatacggccattgaattgcccaattaaattctccgccccgcccttttgtgagacaatttgaattgtggccgaacatttgcaactccaattttcaccttaattgccaatttgatttaatgggataaattcccattttgtgccattttttgagccggcacacaaaaggtaaaatgccaaacacttttcactgcttttattattctgattgattaacagtgccaatatcttccacgaaagtccctttatttgtttgatttcgctgctccgttcactcaaacaaatctctcgcgaaaattccgccaatttgccaatttccatcacaattttcccgtttgttttgtttggatttgaataatccaatttatccgcattttcttccttcacaataacatcgatggccaatgtcactttgtccccgtctttgtcataaaatcctctgctcgggtccatcaattccttaattatacttaactataaaaaaatacatcacttaattgcttcttatataaaaggaaatactatttcataaaaccaatatgtaataatttgttgcatatttatggaagaaaatccaaataaaacccataaaattctcctgatttttctctattttaaaggttttattcctcgaaaattgttcaacccttaggctagatatgaatttttgaatatgcgaccaaatttctgagggccaataaattgcaaaatattttcgaattcttaaaaaattctaacaattatgatacgaaaaacaaaggtcatattcgtattcagcatttcaaaataccacagaaaaaaaattcttcaccccccttttttaacccaaaaaaaaatttcttaaattttctaggttgcctatctcgaaaacccttgaaaattttccaatatgtattacaccattctataccatttaaaaagccctacaat

SEQ ID NO: 44227 - DNA, 1484 bp, Heterodera glycines
  unsure (1)..(1484): unsure at all n locations
gatggttttttgagtaacgacccgggctccctaaaaactgcaaataaataaataaaaaaatgtaatttgtgatttttcgccagttatttattcaacattttaaatttatatgctttgaaaaatatgtattattattaaatgatttcattccttctncaattcgttcncaaattgttttttccctttaaaaatggtcgatttatcaattttcaaaatttttgcaggggatccaagaaattaattttacattaatttacaataacaaaaatatgaatataaaattcatatccacaggacaaacgtgaaaaatcaagacatacaaaactagtttattcgcttttaaaggtaattttgtggattttaggaaaaatttagtgaaatttttaaggaatttgtgagttagttagatcttggaggtgctaggtcgaaccggaaattgtctcagtttcaataaaaataattaaatttaattatattaaagcaatatttttaaaatttaatattaataataattaaaaaattttcaaataacaataatataatttaattcaagttttcttcaatattttttcttcaaagattccgctcgaatatttggcataaggcaaggcaagattaaaaaaataattgcaaaaaattaataaaaaaatttctaaaaataaaaatatgcttatcaaactttggttattaaaccgttgattattttaatgaatttttaattacatacttattttatcgatcaaaaggtgtgcggttgttgacttcattttaatgatttccggccatttgctgaatgaatccaccactaccagatatttgttaccatctgcacatggaccagcgaaatccatgtgaagcctttcatagacttgagtggatgcaggccaaggttgaagcggcactttgggtggcgctttggatgctaaggcacactcttcacaatttctaacccacccatcaacgtcgagatcaattttgggccagtacacaaattgtttggccaaatttttcattcggacaattccaggatgggtgaaatgtagtgtggtgaggatgcgctgtcgtagtttggctgggatcacgactcggtcgcccatgagcaagcagcctttgatttcgctgagtctgttgcggtgagtgaaatatgcggccaaagttgacgaatgtgcggttttgggccaatgtgtgcgacactgatgaagcacttgctgcaattcgtcatcttcttgcgtccgtggagcaacctcttcggcagtgatcggcagttgatcaagtgttgtttggaacacataatcgacggctgccacttcgagttcactgctttcttccatgtccattttggcgatgactttgtcctcattttgctgtgactcgcggtgttggctgatcaaacgaaaaagtacatctacctgaccaaaatttttcgtggaaatgtatttgatattaaaatcataattcgatagagtcaacgcccatctttgcaa

SEQ ID NO: 44228 - DNA, 1150 bp, Heterodera glycines
catttcaggggcccacagatttcctggcgcggcttttccccccgccgaggtgccattcgctgtccatttctcgtcggtcctcaaaagtaccaatggattcacaatcgttccccattttatttcattgcttcacctccaattttgatggctatttcgccgacttttctcgccgtttgttcggcatttgctgctcggccggtcgcattttggcgaatgccaccggccggtcgatgggcaaccatcgccccggggatttggggttaaaaggcacaacgaaacaaaaaatggctgaattatctgtaggatggcattaataaaattattgataaagaaggcttaaaatagaaccatattaaataaaataccaatatcaatcagttgcccattaaaaatacaaagaaagtgacactatcgaacaataaatgccaccgcagtcgcttaataattatcgctaattgccctttccaatcaataatttatgaatgggaatgaatgaatggattaattggattaatggctttgatcgcccccctttttccatttcattcattcttttcaatccgttcttcgtccgccccttctgctgctctggtcagatcactcataataaaagaaacattgcccaatgtgttgtcttatcgcgcgaaaagaaaaacgaacgaatgaatgggcgacaatcgttgcgcgacggagtcggaaaagaatggaaaacagcgaatgatcaaaagcggaggagagattggtgaaagatggcacaaaaagcggaataatacagaagaagaagaagaaaaaagaagcaaaaggaagacgaaaaggagaggaagggaaagaaggaagaaaagagaaaaaggagagcaaaagataaggggaggaagagaagagagaaagacagaaaaggaaaagaaaatgagagaaagaaaagaaaaatagggagaaaagaagaagcacagcagcagcagaacggagtaggacaaaacgtcgtcagccgaaacgtcgtcgaacgaatttttcgaccataacttttttctttctcaaccaaattaaacattcttggtattattcgaaagcattcgaaaaatgctattagcctgcaaattttcaaaaatttttatctatgcacaaaaaaatcagagcaaaaaaagttcgaatt

SEQ ID NO: 44229 - DNA, 1033 bp, Heterodera glycines
aaaatgtgcgcgaatttacagcttttttttctcattaaaaaatgtattataaatgaatgaaaattgcttattatttattctaatacaaaaatatttatttcaaatgattattttattaattttctttttgtattttcttgccattcccagcaaatgcttataacacatatgatgggtaatgttataaccattattataaaaataatagaaattttataatattttcacagacaaaaaaacaaattattttaaaatatccaaatttattattcaaattttataataattaacaaaatctaaaatcattttttaattatgctaaccatgagatcaaatataaattttgagattacaaaaatatttttttgttttaatgaaattcacgcattgatgataaattggataaatataatttttccaaaaacataacactcgcgaaaaatagaattctgtggccaaaaataattaaatttaaaaaaacaattcaaccgataattttgcattttcaatttgagtccggcggagcctcggataatttggggaattggcttgatttgttgttaacagttcacctgaaattgccaatttcttcagggatttttgcttaaaattttgaaattttcaaggaatttgtgaagagggctgggttgagtgagggtcggcactctattaaaaaacgaaaatttttacgcctaaatttttttctcagttataaagtgattcgcgcaatcccaacgaatgacagccaagtgttggcattgcgtcatttcgcaaatttgatggagtcgtcaaacagtcgcaaaggcactgtccaattctggcaacatgcgtacacgttgcattcaaatgcggacatttttgccgattctgacagtgccaaaaaggtgagtgccgaaagagtcataaccaaatgaatcaaaagttttcgttccctcccttattaaaattcccgaactttaaggaacataaatttaattagatatactattaaaatatatattgaatttaaattttaatcagaaatttggttata

SEQ ID NO: 44230 - DNA, 1752 bp, Heterodera glycines
  unsure (1)..(1752): unsure at all n locations
aaaataaatcagttttttaaacgaatattgaaaactaaaaattataaagtctaaaattcaaaaagatcaactaataaaataggaaatttnttcttaaatttaataaaatagttatgnaaagaaaatgagcaaaatttaaataataatcaacaaatatataataaaaattttcttaaacattttaaaatcaagatagcttttacattcagctaaatttatttatgtttgtcagctaaaaaattttgactaggagttacttgacgtctacaatcatgcaaatgtaccagaggaccttacaagggatattgcgaatcgaaaaataaaatgcgaaataagaaacacgaaaaatacgaaactcaaataaaatacgaaacactaaagatgaaacacgaaatttttttactgaaaaaaatatcatacaattaataataaaaaatcaaaattagaatagaagaatatttgtaaaagtttatttatccgcattttaaaacaatttaaaattgggcatattttgctttacaataacaattattatggggtttaataaattatctcaaaaattctctacaattgaatttttggtcatatctgttaatcaattcgtaaaatctaaaaaatttcccacccgcgcaaaaaatattattagcaatttataatattcaattaagaaaattaggcattaaaatacatgaaagattgctggaattttaaatgttaattttcatagaaagccttaaaaattaatcgaatttcgatttagttaactatacgcgtttggtaattgaaaaatttttgatcaaaaacgaaatagttgatatgaaaaagacatttataatccataaaattgatacgtataaagtcgtgttatgaaatcatcgagacactttaatcgaaatgttcaaatatatttaaaaataattaagtttcaaacaaataatatggggacgtgaacatttgattggtttctgaagtaaattgaaatctaatgaatttatataaaaaaaattatttaaatttttttttaaatatttcttaattttctattaatatactcacatttttaaattgtattatgctgatttatcatcattttatgtttttcatgttaagtataaatgttaaaaatacccaaattttcaaaggcaaaaaagccaaaaatttacaattgcaaacgaaattctctacacaaattaaaattgcaatagaagatcatttataccatttttagatcctcattaacgaataatattatattgtcatagaaattaaatttatttagcaaatgttttttattttattgtcgttttgtaagcaattattattttgtcattaaacaaatttaggtttcaattttcattttattttttatcctttttttttgtattttatttttttgttaaattaaaaaaagataataatacaatgttgtcacgaagtcttaatgtttttattttttattgtttaataattaatattttgatcaaaaataactcttaatatttcatcaaaattctatttttttaattttgattttttgttctttttatgatttcattaaatttcttttttttacattatttctccaaaaataaatattctattaatttaccatacattaaatctgtttaagaataaattattaaacttttttaacattaatttaattttttttataaatcaacagcttattattttgtatattataaagatagtgatcactattactctattaccaacactaaatttttgaaa

SEQ ID NO: 44231 - DNA, 268 bp, Heterodera glycines
ttaagttatataaaatcacgccgttatagatacgattagccgagggcgtattcatatatattacaaaattccgccctttatattatatttttccacatatttttcagtttttttttttggctgaaaaattcttattttcgaaaactttgtaaatttagtctggatttactaacagatttatacaaaaatgactgattttttgatgaatttgattaaattttgaaaaaattatcaatttgattttggttgtcgaagaaatctttaaaaa

SEQ ID NO: 44232 - DNA, 958 bp, Heterodera glycines
ttcacagaggatttttatatttagagttatcccagaaaaatggatatctctttttttgataaattttatacacatacaaatgctctcgagcatgatagggagggcggtgcgcaatagaccttttatttttgagggaatttttaaatttatactctatcccagaaaaatgtctatctctttttttgataaattttatacacatacaaatgctctcgagtatgatagggagggcggtgcacaatagcccttttatttcacagaggatttttatatttataggttatcccagaaaaatggctatctctttttttgataaattttatacacatacaaatgctctcgagcatgatagggagggcggtgcgcaatagaccttttatttttgagggaatttttaaatttatactctatcccagaaaaatggctatctctttttttgagaaattttatacctcacaaaagcgcttgcgtatgagacggagggctgtgcacaatcgccattttatttcacagaggatttttatatttagaggttatcccagaaaaatggctatctctttttttgataaattttatacacatacaaatgctctcgagcatgatagggagggcggtgcgcaatagaccttttatttttgagggaatttttaaatttatactctatcccagaaaaatggctatctctttttttgataaattttatacacatacaaatgctctcgcgcatgatagggagggcggtgcgcaatagaccttttatttttgagggaatttttaaatttatactctatcccagaaaaatggctatctctttttttgagaaattttatacctcacaaaagcgcttgcgtatgagacggagggctgtgcacaatcgccattttatttcacagaggatttttatatttagaggttatcccagaaaaatggctatctctttttttgataaattttatac

SEQ ID NO: 44233 - DNA, 1403 bp, Heterodera glycines
ttcggttttttacggggggggcggggtccgctctaattttaaaatcgtgggtttatcatgtttcgccatcctacttatacatctccccccccccctagggaccagacagccggaatcggtggtatcccgaccgaatcccggtcccgataatcccgaagaatttcgaaaagcgatccggacagataataactcgggatcccgatcgaatcccgataccgatctatcccgtagatttttgaaaagcaaccgggacagatacccgggatcccgaccgaatcccgatcaatcccaaatattttttcgggatcacacgggatttgctttgaaactcatttttttctataaaggccagtttttgggattttgagccatatggcgacgacctttttaccgcttttggcgatccttttccaagaacatttggggaacaacacatgggagtccggcagcgccgataggccccgtctggaaaattttagtaatttttaatgcaatctgattttgcccaaaaatttataagaaaaaattttcaaaaaaattttacttataatttttgaaaaattttaaaaaaatttcgcgggggggggacgacctgctctgtcgtgcagcatgagaactcgaaatgatcggcacaacatgggaccgtgcacatgtggcgacattgccggccttcttttgcgtcaattgccaatccgcatttcatgcaaagcagttcattaaatcttatgccaaaaggaaagtttatcacatgttaaaacccttgaatgtagacttcgttttatttattgttcaccatttgtcactaataaactcattaaccatgaatacttgatcaacgcatttttgatcagtgacactattggcatatacataccaggtttccgatacattcatcaagttgttgatccgtacaagtcgaagattattattccatttttggcattccagtgaactatttctgaatatttttaaacatttatttattatattattctatgcattttattattttcataaacacgaatgtgttgggatggaaaagtgggatggaattagtgggccatcggtggaatggaaaatgaatcacatcgcaaagaccgagtcggactggcttattgttaattatgtaaaaaaaaaattgagaataagaaataatcaaaaaaaaaaagtaaattaaatatgttaggataattatccgacctttcggggtgagaaaaacgaattgttaatttattaaactaagtgaaggacttttaagtcaatgtgatcagattactgaaatgtttcatctttgtccgaccaacttttctttttgacttcattttattattcaaaaaattctttctttaatttcaaatttaaatagtaaaatttgaaattgattgtacagaaatagtttttgg

SEQ ID NO: 44234 - DNA, 919 bp, Heterodera glycines
tcgggggcaaaacggagacgggtgggtttcggactccatctcttctctcatctaaatctaaatcatcctctcactccaggtaatcattcaaacaattcatagttatcaactcaaacgccgagatctttcatcttcaaaagtaccgtttcgatcggcgtaattcgctctcaggcgtatctactctcccccccccccccccccaccgcaacgctttccccttgaaataattctaatttttttgctataaatagactctctcttaaaaaacctaaaaacttcatttaaaaaaaacttgactataaaattttctttgaaacttgttaaaaaatttgaaaaaaaatactttttcaaatttttattgttttttgtttggaagaacctctaacaaaaaataaaaataaaacttaacggaggcgtggaaccaattcatgtgggggagaataagctacttttaaattcggttttccctttttaagttgactgatcagttcctctccttcatttcgcttgaagatgacctcttcatgctcagccgttacacaaaaagcagcccattctctttttacggttcataaatcaaattctttacaattattattcacagtgccggtttttatagcaattaatgacccgtcgataaccgccgatcaaattgacgcgttggtcgccgacattgccaatggactgttcgccgtctgtgtgacgcttggtgttgtgccggtgatcaaatgtccgaaaaacaacgcggcggagagagtggccgaagttggcacggcacgggaaatccctcctcttttccattttttaatatttttttttctactaattcttttcaaaaagacactttttgttgacaaatcttggaaacactttgaatttggtacattaaattggattacacatttgatttttatatgat

SEQ ID NO: 44235 - DNA, 973 bp, Heterodera glycines
gtggtgtaagaagaagagaaggactaataacacagagaacatgtaattaaataacaatgatatcatataagtacatggaaaacgagaactgaatcgacagacaatgaaataacagataacagaacggatcaacacaacaacaaaaagagcagagaattgtaattgtatcatgatcaaacatcattcaaaaatacactggcaaaaatattaacaacacactcaatttttcacctttacgtactgaaaataaagacactaagatccaaatacaatttagaggatctcaaaaaacacgaactaagaatttttgagaataagattcttcccaatccaaatttatagggcggcaaaaaggccccccccccgaggccgcgaaagaggccgaagtgaagtactcttcggtgccgaggaaaaattattaaattttaaaaattttttaattgctttttaaatatgcccaaaaaatgtaggcttaacttttttagtgaaaaatttcgatcactcatattttttgctaattgaggagaaagcgtaccaaactttgcggggaatactccccggtaaaggactaacttacactgaaaatgagcgccgagctagctggcacgaaaaaaattttcgaaaatctgagtctttcgtttttatttattttttgcgataattaatttcttaaatattttttcggaaagggtttctgaaacgccaccgaaattttatttacgtgtctagtttaggcgctctgatgcttttctatcgaaagaggggagaatgaagaaaatttttaaaaatttttaattccattttaaacgggccgaaaagtttaggcttaacatttttttcggaaactgatcggagagcgctcccaaacattgggggattactgaaaaggaaagagaaaataactctattttaaaatattatcgtagtcagttcctatttaaaataatttttatcctaaaaaaatgaccctgca

SEQ ID NO: 44236 - DNA, 767 bp, Heterodera glycines
taaaccgaccgaccgattctcgtttcgaatcctctcgcgcgaggccccgagatttttcttcacatcttaaaaataaaaaacgccaaaaaaaagttttcggggtcgtcggtcgcaaatccgacatcctccatcttcgacctctttcggacccccgacccaaattcgaacaaaagtgaaattcgttgtccttttcggctcgagttgtcctcagtaggggcgcaatttatagttgctaaaaactcgccaaaatagataaatttttcgggaaaatttttcaattcataggggtgtttttttcgttgaaatttttcggggttgattcttaggtgtgtatttttcttttatattgcaattttgttaatacttttggacaaaacgccaaatagctagctcaccacgataagcttttcaaaaaatttttaggctctaaaaataaaaacctaactcgaaaagtagcttaacaaaagccgaaaaaattgattttcgtgcgtttcaggccatagcgagctgaggaaaaaaggctaaaacctaaaagttgtatatgtacctagtcctcacagtttactaataacaattttctatatttttgacttttaaacaaaaaagggtgccgatggatttcgcgacaagttggcgccggcagtgcgcaattgtttcaacacactaaaagcatatgttcaagacccgaagaatcattgagaaaaggcaaggatttgtgggaggaagtggcttataataatataaataaataataataaaattaagca

SEQ ID NO: 44237 - DNA, 955 bp, Heterodera glycines
gcccggaacggtgccggcgatttccgacgaacgacaccaaatccccaattcgctcccgacagacgggccacggacatctggcaaatcgtcaaggctaaccaaacggcaccattcgcgtggaccgactcgccgaacggtctcgcttccgtcctttaaacggctttttatttttcaaataatcctttagccctttttcagatgttaaattggaatgggagtcgggcgatgctgaaaattcggatgaattgttgcgcaaccgcgacatttcttatctgccagccaacaatgatggttaccattattgtgtgccctttttggacgggcgccagcgcgttttgctcgtaatcatttttaatatttacgataattccttatttctttttgtttagttcactgctgacgaaaaagtttctttcattgctcaccaagcgtatgaagtgagtggacagaggggcagaaccatttatcttgttttcacattccatcggtttttcaatcattaaaatttcacagatggaacagccggacatcgaattggagctgcacttgcacgggctgggcatctccctggtcaacaacttgaaaagcattgaagtcctttacatggtcattgattcattcactagtacatatttaattcaatatcaaaatttaggccatttctgcaggaaaacagaagaaaagtgacgaagagtcgctcaaaatggccaccggtttctggtgtcaatatcgtcagaccactcatcagcagacgcttcacgtgaaattgcacaatttccaaatggacaaccaattgcccgcctccaccttcccctcattgctcgccatggtaccacagccgaaatcagtggtcaaaaatggttgcttttttatttagaactaaaatgtccatttctttccgtgtccaatttttaaattgtgaacagagtcattttctttttaatttccccattta

SEQ ID NO: 44238 - DNA, 642 bp, Heterodera glycines
cttacacatgcctaaagagtcaatttcaccccggggcagtgaggggcggggggggggggaccacttaccgagtcggccttcgccccaagcaacccccgagagggaaggcattacaattttgcttgttatttttccaatggcacaaacactacgcatttaacgaaataaacacatatgcacacctttttgctgtatcgcaagtcccacttcctttaagaggaaaagaagaatgccagtgccatccccgctttctcccaatccccgcctccccgaattgtcgcccaattattcgtccatccataagcagaagcaccgaagggtgtgcccttcggcctgctcttccgcgactttcctattgcttttacccttcccccgccttttccgattttttcacccctttctttggctagtgccagccgcagtctgtccgccgcccatcctcttacttccaaccggcttctcttctgtgttgcctccgccgccgtcgtcattcgttgcccatttgcccccccccccgggtccttccccaagggcacaatccattccggcatcctctcttcccctctttccccggccagccctttcctcgtttccgcttttccccccggctcggttggcgccactcgcctccccccgggggat

SEQ ID NO: 44239 - DNA, 744 bp, Heterodera glycines
acgacgggtaacggaggaaagggttcgacttccggagatggggcccgagaaaacggccactccgtctaaggacggcagcaggcgcgcaaattcacccactctcaacgcgaggaggtagtgacgagaaataacgagaccgatctcttctcgaggccggtcatcggaacgggtacaatttaaaccctttaacgagtatctatgagagggcaagtctcggtgccagcagccgcggtaattccagctctcaaaatgcatagaattattgctgcggttaaaaagctcgtagttggatctgtgctagccgtccggtgcacactttgtgtgttactggtttggttggcttttctgccggtctttccccggcgttggcctttaccggtcggcgtcggtgggctggcgagtttactttgaacaaatcagagtgcttcaaacaggcgtttcgcttgaatgttcgtgcatggaataatagaagaggatttcggtccgattttattggttttgctgaccgagataatggttaacagagacaaacggggccattcgtattgctacgtgagaggtgaaattcttggaccgtagcaagacggactaacagcgaaagcatttggcaagaatgtcttcattaatcaagaacgaaagtcaaaggttcgaaggcgatcagataccgccctaattctgaccgtaaacgattgcaactaacgatccgccggcggatttttcgccctggtggggagcttcccggaa

SEQ ID NO: 44240 - DNA, 999 bp, Heterodera glycines
aaaatttaggctttctttttagtgaaagtttgatcactcatattttttgctaattgagcagaagcataccaaactttgcagggatactccccggtaaaggactaacttacactgaaatgagcgccgagctagcttgctctaaaaaatttttcgaaaatctgagtctttcgtttttatttattttttgcaaaattaattcttaaatattttttcagaaagggttctgaaacgcaccaaattttatttacatgttagtttaggcactctgatgctttttctatcaaaaagggagatgaataaaatttttaaaaatttttaattcctttttaaacaggccaaaaagtttaggcttaacttttttttcagaaactgatcagaagcgcaccaaactttgcagggatactgaaaggaagagaaaaacctattttaaatattatctagtcagttcatttaaataatttttatccaaaaaatttttttttgggttttcggggcagtccccccgaaccgatgcgcccagatttatggggagaccgaatccttccggaatagcttcactatagcctgtactttaattctgcgttggatttttgctccccataattgtttgagtaccccaaacggacacttgaaaaaatcgatttatttttgttttcggggcagtccccccgaaccgatgcgcccagatttatggggagaccgaatccttcgggaatagcttccctatagcctgtactttaattctgcgttggatttttgctccccataattgtttgagtaccccaaacggacacttgaaaaaatcgatttttttgttttcggggcagtccccccgaaccgatgcgcccagatttatggggagaccgaatccttcgggaatagcttccctatagcctgtactttaattctgcgttggatttttgctccccataattgttttgagtaccccaaacggacacttgaaaaaatcgatttttttggttttcggggcagtccccc

SEQ ID NO: 44241 - DNA, 1000 bp, Heterodera glycines
tcccttctcccaggggtatttattttgtaagtcttttttttaaataaacttttcaaaccccatttttcgcaccgtgaatgttatttttattgaactctgaaccgttttgagtagattagactagaaaacattgaaaattttgaaatcatgtttcccactcccttctcccaggggtattattttgtaaagtctttttttccccaataaacttgtcaaaccccatttttcgcaccgtgaatgttatttttattgaattctgaaccgttttgagtagattagactagaaaaaattgaaaattttgaaatcatgtttcccactcccttctcccaggggtattattttgtaaagtctttttttccccaataaacttttcaaaccccatttttcgcaccgtgaatgttatttttattgaattctgaaccggtttgagtagattagactataaaaaattgaaaattttgaaatcatgtttcccactcccttctcccaggggtattattttgtaaagtctttttttcaaaataaacttttcaaaccccatttttcgcaccgtgaatgttatttttattgaattctgaaccgttttgagtagattagactagaaaaaattgaaaattttgaaatcatgtttcccactcccttctcccaggggtattattttgtaaagtctttttttccccaataaacttttcataccccatttttcgcaccgtgaatgttatttttattgaattctgaaccgttttgagtagattagactagaaaaaattgaaaattttgaaatcatgtttcccactcccttctcccaggggtattattttgtaaagtctttttttccccaataaacttgtcaaaccccatttttcgcaccgtgaatgttatttttattgaattctgaaccgttttgagtagattagactagaaaaaattgaaaaattttgaaatcatgttttcccactcccttctcccaggggtattaatttttgaaagtcttttttt

SEQ ID NO: 44242 - DNA, 1538 bp, Heterodera glycines
  unsure (1)..(1538): unsure at all n locations
aacttttattacattttttgtacaatacatatttaggaattcaacttctgttattggtgttttaatgctaattatttttgagtaaacaattagagtgtttgactatcacaaattaattacatttagtgttgagttctttattaaatttgagaaattctgtaaattagatgagtatttaagaaaaaagtcatatactggcctgatgtcctttaaaattcttaaatttcagaaattctgtaaattagatgggtaatttaacaaaacgacctgctgtcctttaaacaataaatttaattaccattttctcccttataatttttttcacattaaatttaattatacgtttattacattttttttatttgttcacattaagaaagtctggcttctgttgctgatgttttcatgcttttttattttcaatgtaattaatttttaggtacgttcaaagaattaaattttattatttttttataaaagctataatatttcagaaatccatcattacggggaagaatttaaatcagttggatagggagcgattatgcgatgaggcaatcaaatcgacattttaaaactgtttttttatgtttgtcgttgctttatttttataatttggtgcgccaaatgttttttattacgcttgatgatttgctttctaattagtctatttattcttttgcatatagctctcgacaaagaaaacacaaaaaagtttttgttcaaaaacatgggctggcgccgacacgactctttccccgttgaaacagttaagaaaatctaggttgctaaaaaatagcctagacatggacctagatccaagaaaaatcaaggcctgggttcaggtccaggtcgagctctaattaaaataattgatattggagcattgttgaaatttaatttccacatctttaatataaacataaaaagcattgaacttcccgtaaaactttatgcgaatgaataaataatataaataaagaaacataacagtgaaagaattaataaaaattacaaaaaaaaaaagacagaaaaacaaaatataaaaaatctaaccaaaataaccaaagttagaaaaaaaagaaagacagagaaatgtgtataagagagaatggacaaaatgaaaagtcgataagaattgttgtataaaaaaggcttaaaaatgccgaaaaatttagtatgattcttgttttttatagagaaatttaaaaactaaatttggcaaaaatcattagtaacacttaaaagaacccgctcaaatttgcctaaatatgggattttttttttttgcaaagtgcttagcattaaatttttatgctaaatttggcattttgatatttagccaaaagcaaaatttcttttttatttctgttttttanatgtacttttctctgtgatcatttgttcttagcattttcgcgtttttttttaccatttttacgcttagttaaatgcttaattatcatttcggttttttatattttaanaaaaatcccggtcccctgtcaatatatcaaaaatgctcgaaaaattgtgcc

SEQ ID NO: 44243 - DNA, 1262 bp, Heterodera glycines
gaaattcgatgaatgaactttcgatcaacgaagacctccccagaaaagtgaactattaattttacaaaattaattatttatatttaattaaaaattcaaccaattaagaaaggctcatcaacttcagcttcacatccctctgatttgtccaccaatttgacaattcatgttgatgaacagtcacaaatgcttatgattcatccaatgactgaaccatcggttgacggttaatgaatgctttaatttttttattattaaaaaattaaaaataaatctgacacaatttaaaaaataaaattcatttttaatattgaaatctttttcatatggatgggataaaaaaactcagagtcgtccgaaaattttgaaaaaactagaccatgaccatatttagagttggatccgggtcaggatttcggattaaagttaccctgacccaaatacattttttttcataaacctatgtttaaaaagcatatgaaaatttattatatagttgctcaaaatttaagcccaaatccacttaaacataaatattaaaattcctttttaaatactaccgtcttcttcgacaccaaatcttttggaattttcgaattaccaattttgttggctttaaatgtaaatcattttaaaattaacattaaaaatcattgctaaaaagcattaatttttatttatttgtaggcaaaagtcaacaaaaaagtacggcttcagcaccagcggaatttcagcgtgccaaatgtttagctgaaagtgaagtgattaaggaaaagccgagcattcgaactcggctcattgtttgtgtggtatgtggtgcgatcattgcgttctgtttgatcaaacttttcatatggaaatgattattttgttcaaaaaatgaagaaaaaaaaataaatatttaattttaagaataaatttaaaattttgaattatttatttatttattcaaaaataaaaataaccaaaagaagggcattgctgccgcttacaattgaggtgggaagacgggtcaaataggtagtagtgatagaagacaaataacatttggtaatgacgaagtgaggtcaatgggtagttgtgatagagtttgaatttaaagaagcagaagagtcagaggcctccagcaaagggaaatttggtttttataggaatttgagaaaaattttggggagcatttggatgagaaatttgtagtagaaatatatttttttgaatatgttggaggtgtgcagaactatttatcgaagcactgggggaat

SEQ ID NO: 44244 - DNA, 713 bp, Heterodera glycines
gagagagagagaaagagagagagagaagagagagagaagagagagagagagagaaagagagagagagagaaagagagagagagaaagagagagagagaagagagagaagagagagagagagagaaagagagagagagagagagagcgagagagagagagagagagcagagagagagagagagaaaaaaagaaagagagagagagaagagagatagagagaaaaagaaagagagagagagaagagagagagaagagagagagagagagagaaagagagagagaatagagagaaagagagagagaagagagagagagagaaaaagagagagagaagagagagagagaaaaagaaagagagagcgacgtgcgattgacggaacggagaaagaaaaggcaggtcacggcatttgttgaaaacaattaaacaaaaaaagagcaattaaaatcagtcgatggatcaaacgattgaagctaaagaatggacagacactgtagaagagacgaacgaactgatcagacagacaggggaacgaacatctcaaactgcgagtgccctaatcgagttctaacatcgatttgctattgtttatacactccgtaacatgagtagtgatatggtcgagaccgaattctcccgagaattaaaatatccatttaaactgtctataaaataaaaaacaatttgtgggggctttctctaacaatttattttt

SEQ ID NO: 44245 - DNA, 621 bp, Heterodera glycines
aaaattttgtttttctcttcttatttatgggataatttttgttacgtgcactattggagggatagaattattttaaaaataatttattttaaagaattttgaaaaagtggtaaattggctcaaaaaattaccaccaattgattattgagaaaaataattttatagaggtctttttagttaattctttgttattttcataaaattatttttctctctaaaattttttttgtcgagttttgactacctttgtaaaaagtggttttaaaaatacttaacattaagatatattttttattttggtatcagatgaaagagcacacttcaattaataagaaacttatttttgtttatttttatctcacaattttccgtgtcaaaaggctcatggtaaatattgcaaccatgggtatgatggtggtagcttttctaaccaccaactcccgtgaaatgaccacgaactaccttcttattctgcgggttaaaaagagggtcatggtcatggttaaatgaccaccaacttcatggtcatttgcccaaagttcgtggtagctcttattctgcgggttttaccaccaacttcgtggtcatttaaccataaccacgttcttattctacgggccc

SEQ ID NO: 44246 - DNA, 856 bp, Heterodera glycines
tagggtgtttgactcacttcaaaaaataattccatacccaaaagtttttacaaccacatattgccaatctaatttcttgcagatttaaagctatccattgcctgccggtctcggcacagcaaagcactaatagggtgtttgactcacttcaaaaaataattcattacccaaaagttttttacaaccacatattgccaatctaatttcttgcagattgaaagccatccattgcctgccggttctcggcacagcaaagcactaatagggtgtttgactcacttcaaaaaataattcattacccaaaagttttttacaaccacttattgccaatctaatttcttgcagatttaaagctatccattgcctgccggttctcggcacagcaaagcactaatagggtgtttgactcacttcaaaaaataattccatacccaaaagttttttacaaccacatattgccaatctaatttcttgcagattgaaagccatccattgcctgccggttctcggcacagcaaagcactaatagggtatttgactcacttcaaaaaataattctatacccaaaagttttttacaaccacatattgccaatctaatttcttgcagattgaaagccatccattgcctgccggttctcggcacagcaaagcactaatagggtgtttgattcacttcaaaaaataattccttacacaagttttttacaaccacttattgccaatttaatttcttgcagatttaaagccgatccgttgcctgccggttctcggcacgccaaagcactaagagggtgtttgactcacttcgaaaaataattcacatacacgaaagtattttacaaccacatattgcc

SEQ ID NO: 44247 - DNA, 904 bp, Heterodera glycines
aattattatcagttatttatctttctattatcatctcatgtccagtacagaatcttgttcttgtaaatacttcctctgtacattttaaatatttattggtaattaatattttttaaatataaattagatttaatattttcctcattattattgattggctacttaaatttttaaagagagttgaccttatttaattggaaatgtttttagattcttaatattttttcttcatttcatgtatacaatacgcgtttttggtgcgtttctcgtttttctatttctgttaaattttgtaaaatgagatctaataaaaagaaaaaaaatatttcgacaacacaggcatttgtatgaaacactgaaggcatttaaaaaattaacaaaattatttaataaatctcttgttcaaaagtgaaatgacaattaattatattttatatttattaaattatatttttgaaaaaaataattatttataataaatattatatatacagttagtttgtaattgtttttttttaattatatttaatttactgctcaattaagatgtggaaaatggtagatctttaaatttttagataaattttaaaatcattattaagaataactttgtttttaaacttttatctataatggtaatcatttttaaatattcacgcaaacattttatattttattatttttttaaattttaacttcatgagctctgagcaatttttattagaagattatggtttcctctataaattatttgtcaactcttataattttgtcttttttttctttctgttattattatttcacgttacaaaacaagcattagttgaaattaaaaaatttaataagaaactttttaatttttcgaatacatttagctattattatgagctgtcataaactgaaa

SEQ ID NO: 44248 - DNA, 936 bp, Heterodera glycines
tcaattattcaataattattttatttttaatgccaattttttttttaacagacaacttcggtttcatattaaaattgtcggaattcactttgacacatttcgacatttataaattgcttgaaacaattttgaatgaatcaccatcatcaaacaaaaaagacacaaaaagtgccaaaaacaaaaacaaaactgcttccgcgccatcgccaccgaaaatttacacatttttgatggacaattttatcgcttcatcacattataaaaaacatttggaaacgagcaaaaaaattgacaaatttgtgaaatgtgcttttgtcaattttggccaacttttgcttttgcgcgggaaattcaatttcccggaattcaaaaaatttgctgatgaaagagaaaaggaatgtggcaaattgccatttaaagatgacattgacatcgataatacacctttatcagggtaggaaatctgtaaataccaccggacctcaaacttttttaaaaattcatcgaaatttgccgcgtttaaataaaagctatacaaaattgaaaaatttcattattttcaccaccaccacaaatgcaatacttaacaattttcagatgcaaacaatttgcgttgcaattgtttaatgatgaacctttgtggaattatgctagagcaattaaaattgagcaaaatgaatgcaaaagtaaaatgaactgattgcctaattaattattaattaatgcctaactttttaatccttttaggcgtgttacaatttgctgatgccttatgtacaattgttgaaatggtcaaaaatgatcagaaacattcaaacacaaacattagaaaagtgaatgagtacaaatttttgaaacaaatcttggaaagaattggtgacacagaaaattatgaacaattaaaatttgtttcgcataaatttggtaaagaaatgc

SEQ ID NO: 44249 - DNA, 848 bp, Heterodera glycines
  unsure (1)..(848): unsure at all n locations
atcttttcttccccaccccgcatcttttttcttaaatacttattttatatcttcgggatctatctttaaatatcaaatctttcgccctagtcattaacgtcgtcctctccggcttaaatcaaaatttaattttattaaaaactaaagaacgcattctcatctatcaagcagggctcgggcgtaactcgggatttcgattacgaaaatcgcatcaaccactcgggccaaattacgccataattaaaatcgaatttttcgcaattttttattccaattttctttatcttttttcccttttatttttcgctctaaaaaagtgaatttgatgaaaaaaggagatggcaacaaaaaatgaaaattaaataataaaatggagttcatttctcgcataatgagacgaacacgtaaagaagcacataaaaatcctgaaaattttttgggatttctaaaaaatctcttgcttacatagcacgccttcaacacagaaattgcccaaatttgaagaggaatttgcgaggcaaatgcgccgagctaaaaatgttcacattccgaccattaaatattgtgaataattaccaacaacacattttcccacgaccacttctcagggccctccgaatttaaggcgaacagaaagaggaaaaaaacgatggcattgaatccgagggcgaaaaagtcgaagcgccaatgcattttaacaaatattcttttaaaagaataaatgccatagaagaggcagaaagacatgaacaaagtgatcaggtcgaaaaggccgagcaaatacagcgaaaaccgatgagtgatctgacaaatgagggacgggagattgggggggggggnggggggag

SEQ ID NO: 44250 - DNA, 766 bp, Heterodera glycines
atttaaaattttgagtttttgttcgaatttgggttcggggttcggaattttgcaaattaaaggtcatattcgtgttcagcgccacaatttaccctagaaaaattatttataatgtcttttgggtgctttttatagtgcggtcacttgagtcccagctgagttaggcactccattttcggcacttttcatcctggaaaagggcaagcgcgcccctaattctatttttccaacccatttcaaacctttttacatcgattctgaccgtttttaagcatttttgagtttggggcctatgatcaatatttaccaaatttttttttgactttttcgcccaatttcctttgtcacattaaatggcaacggtcttgctcatacgcagaacgtagaatcaatgtggaagaaattgaaacggaatttcaagcaacaatttggaaataagaccgacacatatgatacttactttccagagatagtgtggcgtcagcgctttggagaacgcgagaatgtgtttttcaatttttggtcgcatgtatctgagatttacccatgccaataaaatgttgctgacgcaaaaaactcaaaatttttattgaaaattagaaatttaaaaaatggtcaaattcgggttcggggctcgaaattgggcggaatggatgtcacaatcgtgatcagcgacctcgaaaacacctagaaacctgttttgaacgaattataaattttgacaattgccgccaaaaaatggggggctaccatcttatctattacc

SEQ ID NO: 44251 - DNA, 798 bp, Heterodera glycines
cggggcagtccccctgaaccgatgcgcccagatttatggggagaccgaatccttcgggaatagcttccctatagcctgtactttaattctgcgttggatttttgctccccataattgtttgagtaccccaaacagacacttgaaaaaatcgatttttttgttttcggggcagtccccccgaaccgacgcgcccagatttatggggagaccgaatccttcgggagtagcttccctatagcctgtactttaattctgcgttggatttttgctccccataattgtttgagtaccccaaacggacacttgaaaaaatcgatttttttgttttcggggcagtccccccgaaccgatgcgcccagatttatggggagaccgaatccttcgggaatagcttccctatagcctgtactttaattctgcgttggatttttgctccccataattgtttgagtaccccaaacggacacttgaaaaaatcgatttttttgttttcggggcagtccccccgaaccgatgcgcccagatttatggggagaccgaatccttcgggaatagcttccctatagcctgtactttaattctgcgttggatttttgctccccataattgtttgagtaccccaaacggacacttgaaaaaatcgatttttttgttttcggggcagtccccccgaaacgatgcgcccagatttatggggagaccgaatccttcgggagtagctttcctatagcctgtactttaattctgcgttggatttttgctccccataattgtttgagtaccccaaacggacacttg

SEQ ID NO: 44252 - DNA, 1489 bp, Heterodera glycines
  unsure (1)..(1489): unsure at all n locations
tttgagcacacttcagttagccaagcgtgcaggccagggggtggctctaataaaaaaataaaaaatanccagcatgtagaggacagttgtggggagtgccctcacagcgggcactttttgatccgagttttagaaaaaagttacgggccctaaactgcaagaaaaagtgagaaatcggtccccgggactcagtcgtccgcgcagaatttttctctataattttcccagatgcgcctcaaaaagttgtaagacccttcccactactttcagggcgctcccggccttcggccgggagattttgtttttgcaaacgaaactccttgtcaatataacgtatatagtaactagcgggtgcgtgaaccgtcggctatttagctgggaaaaagcgcttcgcgctttgggagcttcgctacctagattagctatcgggttgtgaaaagatttggaatttttaaaaaattatcagcgatttttaggccgcttcgcggcctcagacgggcgcttcgcgcccgtttctaattttgttgtgcttttcggccgcttcgtggccgttttttaaattgtgttgagtcggacgggcgcttcgcgcccgttattaaatttgatggactcagacgggtgcttcgcgcccgtttctaatttttgttgtgcttttcggccgcttcgcggccgtttttaaaattgtgttagtcggacgggcgcttcgcgcccgttattaaattttgatggactcagacgggcgattcgtgccctttttatggcctttttaggccgatttgcggcctcgaacggccgcttcgcgccgttttttaaattttagaacagatacaaaagtgattagaagaggtagaactgtgattagaagaggtacaaaatgagatgagaagaggtacaacagtgatttgaagaggtacaacagtgattagcagaggtacaacagtgaaaaagtgatagaaaagtgattagaagaggtgcaaccacagaagggaaaggcacaacagtgatttgaagaggtacaacagtgattagaagaggtgcaacagtgattagaagaggtgcaaccacggaagggaaaggcacaacagtgatttgaagaggtacaacagggattagaagagattatctgggacttttaggccgcttcgctgcctcgaacgggcgcttcgcgcccgttttttaaattttgttgggcttatacgggcgcttcgcgcccgtttctaaatttgttgggctattaaggcagcttcgagacctcagacgggcgcttcgcgcacgtttctaaatttgttgggccgcttcacggcctcagtcgggcgcttcgcgccggtttttcaatttttgttggccttgaacgggcgcttcgcgcccgttttttaaatccgttgaactcatacgggcgcttcgcgcctgttttttagcttgttaggccgcttcgcggcctcagtcgggcgcttcgcgcccgtttttcaatttttgttggccttggacg

SEQ ID NO: 44253 - DNA, 1084 bp, Heterodera glycines
  unsure (1)..(1084): unsure at all n locations
agatagaatattgtcctaaaaagagatagccatttttctgagaattaattcacaatttccgcagctcttgcggtaatggaaaaaattttgaagaggctctgcggaacggattagcatcggggttacgagatagaaaattgtcctaaaaagagatagccatttttctgagaattaattcacaatttccgcagctcttgcggtaatggaaaaaattttgaagaggctctgcggaacagattagcatcggggttacgagatagaatattgtcctaaaaagagatagccatttttctgagaattaattcacaatttccgcagctcttgcggtaatggaaaaaattttgaagaggctctgcggaacagattagcatcggggttacgagatagaaaattgtcctaaaaagagatagccatttttctgagaattaattcacaatttccgcagctcttgcggtaatggaaaaaattttgaagaggctctgcggaacagattagcatcggggttacgagatagaatattgtcctaaaaagagatagccatttttctgagaattaattcacaatttccgcagctcttgcggtaatggaaaaaattttgaagaggctctgcggaacagattagcatcggggttacgagatagaatattgtcctaaaaagagatagccatttttctgagaattaattcacaatttccgcagctcttgcggtaatggaaaaaattttgaagaggctctgcggaacagattagcatcggggttacgagatagaaaattgtcctaaaaagagatagccatttttctgagaattaattcacaatttccgcagctcttgcggtaatggaaaaaattttgaagaggctctgcggaacagattagcatcggggttacgagatagaatattgtcctaaaaagagatagccatttttctgagaattaattcacaattttcgcagctcttgccggaatggaaaaaattttgaagaggctctgcgggacagattagcatncggggtacgagatagaaaattgtcctaaaacgagataggcantttttctgagaataaattcacaatttccgcagctc

SEQ ID NO: 44254 - DNA, 1185 bp, Heterodera glycines
tttgtagacgtgaggtggatggaggagggcggagaccggcttatcagtgcttggggtaggcggcggctgaggagaggtcgcttttgatgtttttacagtttcgttttgcgtttctacctaacgaggcggcgaatccgcaatcacaccttcataatcttcattgtatgatgagggaaagacaattgttacagtctcgtttccttcataatgacgcggggactcagaaattatcccttcctcctcctcatcctctttatctccattgtaagacgggggagagccatactcgttcccactctcacctcaaactggaggtgactcatctcttataaaagcgctcagccggagagggagggcggagagcaatcgcccttaacttctcagagaattttaaatttatctgatatccaagaaaaatgactatctcttattttgagaaattttatacgttacaaaagcgctcgagcgtgagagggagggcggtgcgcaatcgccatttaatttctcagagaatttttaaatttatcttatatccaagaaaaatgactatctcttcttttgagaaattttatacgttacaaaagcgctcgagcgtgagagggagggcggtgcgcaatcgccatttaatttctcagagaatttttaaatttatcttatatccaagaaaaatgactatctcttattttgagaaattttatacgttacaaaagcgctcgagcgtgagagggagggcggtgcgcaatcgccatttaatttcacagagaatttttaaatttatcttatatccaagaaaaatgactatctcttattttgagaaattttatacgttacaaaagcgctcgagcgtgagagggagggcggtgcgcaatcgccatttaatttctcagagaatttttaaatttatcttatatccaagaaaaatgactatctcttatttttagaaattttatacgttacaaaagcgctcgagcgtgagagggagggcggtgcgcaatcgccatttaatttctcagagaatttttaaatttatcttatatccaagaaaaatgactatctcttattttgagaaattttatacgttacaaatgctctcgagcatgataggaagtgcggtgcgcaatcgccatttaatttcacagagaatttttaaatttatcttatatccaagaaaaatgactatctctt

SEQ ID NO: 44255 - DNA, 859 bp, Heterodera glycines
ggccaatgcttttacacggataaagcgcctttatcaattataaaatgcccgtatttactttaatagtgcccctgcgggctctattttcaaccccccccccctccaaaatgcattcaaatttctggccaaaaaaattttttgcgtgaacgtaaaaccactgctgtgaccgagacctgagactgaaaggtggtggcgcttaatttccctcatcgctcttatctcggcgccaaacaatttgtgtcacaactgatcagagaggtgagaatgattgattgatcagttttggcagagagcagccccacttttcgccactctgttctctgtgttgtgatgggccaatattaggagaagcagcggcaagaaaaagcacaaagatcactccactcactcacccatcgctccgctggtctgatcagatcagctcagcccattagggctactatcattttcaattgggattgtattacataatgggcggggactttttgtcgcccccccccgtccccgcatttttaaggaggattaagcgatgggccatcccaacaaattttccttctgtcatccaagccattcattcattcatccatccaatccatcaacaatccgccgaaaatgttgcaaaatgaatttttttggggaatttgtctcggctttagccaccttaatttagggctttccatcatttatagacccaatttccagttcacacctatgtatttttgcctgttttttatataagtaattaaatttttttttcaaatttctgttagaaatatatttttgaatttttttttaccgtctattttggcatttttcaaaatttcttcatgaaaattcagtaaaaaatccaaatatatcc

SEQ ID NO: 44256 - DNA, 667 bp, Heterodera glycines
ccccccatctctctctcatttccttcccccccctcccttctctctctctcaatttcttatcgctctctctaatcatttctctctctcttttcctttctctctttctctctcatcacttcactctctctcgcttcctctcctttctctcctcattatctctcttcccccatctctctctcatttcctttccccctcccttctctctctctcaatttcttatcgctctcttttcatttctctctctctctcttcctttctctccctctccctcctttttctccctcttcttcttttctctctctctctcaatttcttctctctctctatcatcacttcactctctctcgtttccttcttttctctctctctctccacccttattctctctctcgattcctctcttttctcctcctttctctttctctcacacacacacaaaacaaaaacgaaaaacagaaatgaatagatattttgaaatatgcatgctgtgaagcaaaaaaaatatatatttgtttttcattataattaagtctgactcttcttctttttctttttcttgtgttcttttttattttcacttctttttattaaaagaacgaatcgccataaaagaacgccaatttaactcaaccaaaaaaggggcggagcttcctctcgcttattatat

SEQ ID NO: 44257 - DNA, 1347 bp, Heterodera glycines
ttcgccttgttcgttcttggcgtcaaaacggaacattgcctcaaatacgtcggaagccaacttcaaaatgggtttatgagctgagagaaccttaagattgtagacgtaaaaaataattatttaaaaaattaatacttttgaattaagtggagatcggtattttgcgaaaatactgatcaggactaaggactaggcacccatacggattacggactaaaaatccggaaactccgggcttcgtaaaaattcgttttatccaggaaaaatacggatgcgtataaggataaggatttttttaatttttttcttttttgattaaaatctgcccaaaaaaactacggattacggactacggatccgtaaaaatccgtatacggatagatccgtacccgatttctagaattaacaaatgaaatgaaattaataaacaaattactcgcctttttcccgtctccgtcccccaccaaaaagtgcacatccgcgtactctcccgtgctcagcatcaaatttaggaaagcaattcccgctttagacatgacaatttcaatgaaaaattttcgtcctttaccaatggcaagtaaaaagcaaattttaataatttttagagttaataggctccgattaaaagtgattaaaaatgaacattggggcaaatttatttggaagggcaataaaataatatatatatatatatatgatgttgaggcaaaataatgacctaaaaatgaacagaaagcaaagaaactttgcaatgtaacattttgtttcagggaattgcgaaaagcaaaataaaatcaaaaaacgacaagaaaagcactgaaacgacgagaatatgagatataaaatttattaataaaattttgaaacaagtccgggcccggcgggcgcccagacaaaattttggaccgtgtccgggccgcccgtttaaacgagcttttttgaccgggcggcccgggcccggccaattgtcgaagcccgagcccggtcccggcattttcaaaattccggtctcaaagcacaatatcattgccattgacactatttgtgccacaatattactgcatttacaccagcagatcggaacggaatgtcaaaagtaatgccaaaggcggaagataataggtagaaaaaatatgggattatgaaggttccgattttgcccaaattccctgtcctgcttgattaattttacgtgaaaaccaaattagcttttgaattaggtttccgcccccccccacctaccaaaaatgacaaaatattttataagatgatcaaaaagggacacaaaaaatttatgatgtcttaatagagtgaaatttaattagaaattctgctgctgaagcttca

SEQ ID NO: 44258 - DNA, 935 bp, Heterodera glycines
tgtgaccaaaaatgtctgaaaacctggttccttggtcctcttaggccataattttgttcaaactcgacgaaatttgtcctaaatttagatgagcttgtagcgaattctatataaaaacatagtagtccaaaaaagtagttattggaatttgtatgatttcacatacatctaaatgaaaaagaaatatccgagaaggaaatttgccttttttgaaatggacatttactcgcaatgattttttgtcaagaggtgatttttttgctaatttaaaaatggcaaaagctttttccatgacaatgagaatgatcatctgatgattcccacagttaaagtgggcttaaatgattgagcgttaatggcatttaaatgataaaaggcaccacatcacctgttggtttttagttattcccttaagggaattgtaagtaatttaaggtgaaataacggcttttggctttgaagttttattagtgctgatatcatttcgtaaaacacttttttaattattattgagtaaatgagtcataataaatgaaaaatatttgggaaatgagcgatgcattaaagaagcaatcacttcaatgatttaatgtcagccgaactgatttaatgatgggatcgagttgatccttttataatgagaagataattaggaaataaaaatctatttaacaatgaataaaaattaaatatcacaagccttcattcttttttggttttatttcagcttattctcgaatttccaataatcattgaatttttacaataaattttataagggattttcgatagaaccgctttaattgagcccattttgccccccccccccgcccgccgcccttcccatcgcccaattgtccccggcgtggaacggttggccaaataagcaaacagaaaatatttttgggctttttaggcttttgcccccccccccg

SEQ ID NO: 44259 - DNA, 1045 bp, Heterodera glycines
  unsure (1)..(1045): unsure at all n locations
aaaaagagataccctttttccaaaatttcccgttcaaatgcgctgagaaaaaatttccagaccaattagttcggcgtcattatgctgagaatgcggtggaatttcccttgactgtaggacagaaaaagagatagccatttttccaaatttttcacgatcaaatgcgctgagaaaaaaattccagaacaattagtatcggcgtcattatgctgagaatgcggttggaattcccttgactgtagaccagaaaaagagatagccatttttccaaatttttcacgatcaaatgcgctgagaaaaaaattccagaacaattagtatcggcgtcattatgctgagaatgcggttggaattcccttgactgtagaccagaaaaagagatagccatttttccaaatttttcacgatcaaatgcgctgagaaaaaaattccagaacaattagtatcggcgtcattatgctgagaatgcggttggaattcccttgactgtagaccagaaaaagagatagccatttttccaaaattttcacgatcaaatgcgctgagaaaataattccagaacaattagtatcggcgtcattatgctgagaatgcggttggaattcccttgactgtagaccagaaaaagagatagccattttccaaaattttcacgatcaaatgcgctgagaaaaaaattccagaacaattagtatcggcgtcattatgctgagaatgcggttggaattcccttgactgtagaccagaaaaagagatagccatttttccaaaattttcacgatcaaatgcgctgagaaaaaaattccagaacaattagtatcggcgtcattatgctgagaatgcggttggaattcccttgactgtagaccagaaaaagagatagccatttttccaaaattttcacgatcaaatgcgctgagaaaaaaattccagaacaattagtatcggcgtcattatgctgagagtgcggttggaattcccttgactgtagaccagaaaaagagatagccatttttccaanaattttcacgatcaaatgnncgct

SEQ ID NO: 44260 - DNA, 1170 bp, Heterodera glycines
  unsure (1)..(1170): unsure at all n locations
ggagtgatctgataatgagtaaagcaaaataaaattttgttataaacatatgaccaccgaaaaatggagtataatggtcctaccaatgtcacttcagtgtcaaagaatattttcgtcaatgagtgatactattagaaagcccacaaaaaaaatgctacaaacaaatgccaaaatattttagtcatccttaaacgtttaaccttttatcgattgaaatttcaaaaaattaaaagtggttataaacatatgacatgactgtataccttgttaagatgtttctaatttaatattatcaaatttgctttctttaattaataaatttggttttcgattgcactaaaaacaatgggaaaaatgcaatttttgtaattttatttatttttttaaagcttttcattaaagtgactgtaagtcatcttttattaaaaaaaaattccactcatggagttctttgattgtttggcgatattgtaggtgcagtttcgtccgtttcacaacttgtttattcttaaaattataaattattataaatcgtagttataatctagtttataaattatttaaattttatgctcatatattatatttttgatcccaaatgcgattaggtgaattccgtagacttcgtcattcttatcttttatagtaagcttaagaaaaaattttaaaaaaactgtctaacaataagcttaattattccattgtgggttgtactcctcatcttaatttttaataaatcttttttataatttttaatccaactcgtgtcccagattcttccaaaatcattatggtctttgtgtgtatattataatatattattttataaaacaataatgctaatgaaattttctatatcattttaatttagttttattgtattatgttcttttgttttaatttcaaatgaaagatggaatataaagggtaaatttaaatagatttgtttaatttaatataaattaaatttggcaaaggtttaagtgcagtttgatggtgtcgaacgagcttaacagataattttattatacaagataatcttcaaattactgcctanattttganagcttattagaatataattttcatattttatttattttccataatttttttagatttagttaaatcagcaaaactaaaacaacttccaaattattattgaggcag

SEQ ID NO: 44261 - DNA, 1051 bp, Heterodera glycines
ctttaattttgcgtgggattttgctcccccatattggttgagtaccccaaacggacccttgaaaaaatcgtttatttttgttttcgggcagtccccccgaaccgatgcgcccagatttagggggagaccgaatctttcggggatagcttccctatagcctgtactttaattctgcgttggatttttgctccccataattgtttgagtaccccaaacggacacttgaaaaaatcgatttatttttgttttcggggcagtccccctgaaccgatgcgcccagatttatggggagaccgaatccttcgggaatagcttccctatagtctgtactttaattctgcgttggatttttgctccccataattgtttgagtaccccaaacggacacttgaaaaaatcgatttatttttgttttcggggcagtccccccgaaccgatgcgcccagatttatggggagaccgaatccttccggaatagcttccctatagcctgtactttaattctgcgttggatttttgctccccataattgtttgagtaccccaaacggacacttgaaaaaatcgatttttttgttttcggggcagtccccccgaaccgatgcgcccagatttatggggagaccgaatccttccggaatagcttccctatagcctgtactttaattctgcgttggatttttgctccccataattgtttgagtaccccaaacggacacttgaaaaaatcgatttttttgttttcggggcagtccccccgaaccgatgcgcccagatttatggggagaccgaatccttccggaatagcttccctatagcctgtactttaattctgcgttggatttttgctccccataattgtttgagtaccccaaacggacacttgaaaaaatcgatttttttgttttcggggcagtccccccgaaccgatgcgcccagatttatggggagaccgaatccttcgggaatagcttccctatagtctgtactttaattctgcggtggatttttgctccccataattgtttgagtaccccaaacggacacttgaa

SEQ ID NO: 44262 - DNA, 1146 bp, Heterodera glycines
ccttttttgaaaatcaaaatttttacaacatattttagggtttgaattcgctgatcacgaatcagcacacattatggaccatgacaatcaggctgtataagccaattttaaattaaaaagcaaataaattttgttttaaatttttatttttcagcaggggaagggttaagaaagtacaaattttttgtttttgtaatgtttatgtgaaataaatttcttttgcttcttcatggggacgcatttgcgtttctgcttttgaagaattgatggatctgttcctcgttcaagtgccaaccgtcgcttgcctccaaatgctcggccaggtctttcacttcgtcctgaaatcatttgcaccattcacaatttaatgttttattatactcaatttaacctttttgttattcactaatttctccactcgtgccacacattcattcaatttccggtccacaaatttgtccaatttgtttttcagtgccggtcctggtggggcaacctcaaaaaggaattgttttaagacatagagaagtaacatttttacagtaaattcgcgcaggcccaattcgtcgtaaaacattccgctgtttaccatgtctaatatcatctaaaaaataattattcagacggtgaacaggattcgtgtgttttcgaatgaaaaaaaacaaaatcaaatatccccttgatccattgaaaaacattttttcttaccctcgttgccttgcgaagatcatcggttgaaccgtcatgttttttaccaaacataattttttcgccaattgtcgccgaaattcggaaatctatctcgaagatcatctgttctttggtcttgaccgaagggcacaagaatcgccgttttgtctgaattaggtaattacgattattattataataggtatgcgtgtttaatgacttaatttgaaaatgatgtaacagtggtcccataaaaaggaaaaaatgccgaaattccgaccccaaaacgtttaaaatcatatttctttatttgctcgacaaaattaatctgatttcttcattaatcttttttttgtttgcgctgtcaataggcaccgcttggtattttttgaaaataccagtgcaaatttttaacagaatttgtacaaattttgaaaaaaaattttcaaccatatc

SEQ ID NO: 44263 - DNA, 1618 bp, Heterodera glycines
  unsure (1)..(1618): unsure at all n locations
ggcaagtctgtgccagcagcgcgggtaattccagctctcaanatgcatagaattatgctgcggtaaaaagctcgtagttggatctgtgctagccgtccggtgcacactttgtgtgttactggtttggttggcttttctgccggtctctccccggcgttggcctttaccggtcggcgtcggtgggctggcgagtttactttgaacaaatcagagtgcttcaaacaggcgtttcgcttgaatgttcgtgcatggaataatagaagaggatttcggtccgattttattggttttgctgaccgagataatggttaacagagacaaacggggccattcgtattgctacgtgagaggtgaaattcttggaccgtagcaagacggactacagcgaaagcatttggcaagaatgtcttcattaatcaagaacgaaagtcagaggttcgaaggcgatcagataccgccctagttctgaccgtaaacgatgccaactagcgatccgccggcggatttattcgccctggtggggagcttcccggaaacgaaagtcttccggttccgggggaagtatggttgcaaagctgaaacttaaaggaattgacggaagggcaccaccaggagtggagcctgcggcttaatttgactcaacacggggaaactcacccggcccggacaccgtaaggattgacagattgatagctttttcatgattcggtggatggtggtgcatggccgttcttagttcgtggagcgatttgtctggtttattccgataacgagcgagactctagcctactaaatagttggctcattgcttctgtgggcacaacttcttagagggattttcggtgttcagccgcacgaaattgagcaataacaggtctgtgatgcccttagatgtccggggctgcacgcgcgctacactggcaaaatcagcgtgcttgtccttccccgaaaggggttggtaaaccggtgaaaatttgccgtgattgggatcggacaattgcaattattgtccgagaacgaagaattccttgtaggggcgagtcatcaactcgctctgaatacatccctgccctttgtacacaccgcccgtggctgcccgggactgacccatttcgagaaattcagggacggatagagtaccggcttcggacggtatgcatactgtaacctatttaatcgcagtggtttgaaccgagcagaagacgaaaccaagtaactgtaagtgaacctgctgctgtatcattaccctagtgattcctattcaccacctacctgctgacctgttgcgctagcgatggcaccaccaaatgcccccgaccgctgatgagcacaggtcgtacgagatgacttgtggacgctgcccaacattacgggatagctgcctcacaagacatggttttggggtgcttccatacgttggagctgtggtataccgctcagtgctgcacatgtgaaagcctgtgtatggctgctgcgtggcaatgtgtcggtggcgggccgcctcgcttggctggttcgctgcgccaatgtgggatgcacgctcgtggggcgacctaacggctgtgctggcgtctgtgcgtcgttgagcggttgttgtggcaggcacataacacactga

SEQ ID NO: 44264 - DNA, 627 bp, Heterodera glycines
cttttcgagttttaaaccagtttaattgcttctgatcaccttctttcacccctagaccgatttctctcatcgttactttcaattgaagaaacggaactgcttccatttcagtgcgctgtttacacaattacggaggcgcagctgaaagcgtatctgaagatgaacttcactgaggcggtgatgctggcgagggaaaggccgccgtatttggtgcaaaggtgcaaacagtgggaatatgacagaagcataatgaaaggcaagcgaaggggagacaaatggacacggacaaacgaacaaatgggcacacagacaaacggacaatccaccaattgaattttaagactcagtggtcacacaatgggacagagtgtgcgacgacaattggagcagaggtgagcacgaatagagtaaattatgcctgggaatcaagggcgtatctagggggggggggtggaaatgaagtcagagttgcttgactctgaacccaggcgttgaatgttatgagctacaggtgggccatttttggtaagcagaactggcgatgtgggatgaaccaaacgagcagttaaggtgccaaagtgcccgctcattagaccccataagaggtgttggatgatatagacagca

SEQ ID NO: 44265 - DNA, 568 bp, Heterodera glycines
ccccccccccccgcccttcaaaattttgaaaaataaataaaataataggagactcagaattttgaaaattttttataaaaactgatgacaagctaatgtgataaaacaggttaattcttttcctttcagtatccctgcaaagtttggggcgcttctgataagtttctgaaaaaaaagataagcctaaactttttggcctgtttaaaaaggattaaaaatttttaaaatttattcatctccctttttgatagaaaaagcatcagagtgcctaaactagcatgtaaataaaatttggtgcgtttcagagcattttctgaaaaaaatatttatgaattaattatgcaaaaaacaaataaaaacgaaagactcagattttcgaaaatttttttgagccagctagctcggcgctcatttcagtgtaagttagtcctttaccggggagtatccctgcaaagtttggtacgcttctgctcaattagcaaaaaatatgagtgatcgaattttcactaaaaaagttaagcctacattttttggcatatttaaaaagcaattaaaaaatttttaaaat

SEQ ID NO: 44266 - DNA, 917 bp, Heterodera glycines
aagttttttacaaccacttattgccaatttaatttcttgcagattgaaagccatccattgcctgccggttctcggcacagtaaagcactaatagggtgtttgattcacttcaaaaaataattccttacacaagttttttacaaccacttattgccaatttaatttcttgcagatttaaagccatccattgcctgccggttctcggcacagtaaagcactaatagggtgtttgactcacttcaaaaaataattccatacccaaaagttttttacaaccacatattgccaatctaatttcttgcagattgaaagccatccattgcctgccggttctcggcacagcaaagcactaatagggtgtttgactcacttcaaaaaataattcattacccaaaagttttttacaaccacttattgccaatctaatttcttgcagatttaaagctatccattgcctgccggttctcggcacagcaaagcactaatacggtgtttgactcacttcaaaaaataattcattacccaaaagttttttacaaccacatattgccaatctaatttcttgcagtcacttcaaaaaataattcattacccaaaagttttttacaaccacttattgccaatctaatttcttgcagatttaaagctatccattgcctgccggttctcggcacagcaaagcactaatacggtgtttgactcacttcaaaaaataattcattacacaaaagttttttacaaccacatattgccaatctaatttcttgcagattgaaagccatccattgcataccggttctcggcacagcaaagcactaatagggtgtttgactcacttcaaaaaataattcattacccaaaagttttttacaaccacttattgccaatctaatttcttgcagatttaaagctatcca

SEQ ID NO: 44267 - DNA, 992 bp, Heterodera glycines
attaggtgctgggacaaatgctgcttcttggggacccgcaagtggaagcaatatgatgatgtggactttacaaaattcattcaaaatgaggtaggatggtaatattatgatccatccctagatgggataactaaaaataaatatctggctgacacggcagcaaaaccagatcttgaactaatgagcagatgatgaaaaataattatgaaattcggacagcagtaaaaatggaaacctaaattaaactcttataaaattagaatgagcaatttgtaattaaagcaaaaaatataattgaatgctctaattcttcaaaatcttttttggtccaattttattagccgccccaaaaacgtttcgattggtgggctctgccgaagggaactgctccgttggatagtgctcgtctgtttgccaaagataaaaaatgcattggcaaaatggtaagacgacgcattcatcgtgagcaggatcttgctgaaaatgagttggatatgtcctgcaaggcaatttgtagccgagatcgattttggcacggtgccaaggatgaacaacaaggggagcaggatgagaaggagcatgacaattgcccaatggcacaaatacgaacagtgtacaaggcgggatatggccgaaacgagcggcgccgaaacgagggtgtcccttaaaaagaggacctttttgaaaattttttcactttttttgtctaattttttttgtttaaaaagtcctgaagccaagtacccgggagttttagaggtcgctgatcacgaatatgacaattatttgggcctattaatcaaatttggcgctagttataaagtctcagaatttgaacaaaagggggacccttttgttttgcaaaaattttttgagataaaaaatcgtgaatatactttttattcaccataattgtgcttaatgctcatcattatatgtaaataaacaaaaaaaaaaaattttttcaaaaaaaattgaaaaaattttcaaaa

SEQ ID NO: 44268 - DNA, 770 bp, Heterodera glycines
agatataatttattacaaaaaatagaaattttatttcccttaaaaatccgctcgggtatgggggcgcgcgctaacattctcatttcggagatggtccctttattagatgacaaaggaaaagagaaaaataacccgaaaatttttgaaatttgaagaaaaagaaaataaaaaattataattataattataaataattgtttaaatattttttatgagaatgtgaaaaaaagaatattcaaaattgtttgagttttgagaaaattattcattttgcctcccgttataatttagttcttgtcgacttttttcgacacccctcccataataaaatcgaaaagttttctgaaatgaatctcaccaataaaatacttatccacctaaattgaattagagtgcccacgtgcatcgtgaggtggtaaagagtagcaaattagcacacgcattgtcggctcacaatcagttgctttttcaaacacttcccaactaccggaaagtgaaaagagtgagtaaaatatttcagtaaataaaaataacaaaaatttgaaaatggaaaaaatcgatgactaattgacaaactgccatcgcgcaaatttggttgcaaaaacaaatatatttcagttttaaatcagactgataaaaatgttttgtggtaaggtaaataaaatgagttacaaaaaaaagaaaactcagggatttttaggggattgttgagttcactgtaaaaaagtttttcttttgcattcaaaattcaaagttcgcgccttttttga

SEQ ID NO: 44269 - DNA, 861 bp, Heterodera glycines
attgacaacaaatttaaaaaagtgaaatttctattaaatcgctaaaaatttaactaaattctatattcttaaaatagtattaggtatattaattgtatttatattttaatgtgatttacataaaccagaccctctgtttcttgaaaaaaaaattaagatttttcaaagcatctttcgcttaaaatatttttccgatttttctttcagtttttaaggaaaaaatttaaaaaatttggaaaaaccactaaaaaattataaaaatttatatttgtagatacaaatttggacatcccattgcatttggtggacaattcgtttgaggacaatttggcgcttggccatggtcaccaatacatggaacgattcggttaccatgacggcaatgaacgcgacgaatttttgacaaaacgtccgaaacgacaggcggtgataataataaaaacaactaattattccttttattatttttaaataatcatttataaacattttcacataataatttcttgtaaagcaaatttgattataatttcgcttcataccaaccatggacggtcccaggatttcggcttggggggggcggagtaggacaaaacgtcgtcggacgaatttttggaccataacttttttcttacttaaccaaattagacaatcttggtaatatttgaaagcttttgaaaaatgctattagcctgcaaatttccaaaattttttatccatacacaaaaaaatcagagagaaaaaaaagttcgaaatactaggtttttgagttccttctggccataacttttttgctaacgaaaatttttgaaattttgcaaataaataataaacacacagagctgtcgaaccacaccaaca

SEQ ID NO: 44270 - DNA, 889 bp, Heterodera glycines
cttgcctaattcaacgtaaaaaaattctaattataataaggaacgatttccacctccatggcataagtaatatgcgagggaacaagagacaatagacaatcgagaatctaagactgaaccgagaatagaaagtaggtgcgaaatgcagctgactgacagtatgagacgagaaagggcagataagggctaaatgtatgcgacaagcacgtctagtaataggaataaatagaaatcatatgaagatatggtagtgcaccatcggatcaaggacaattaataatgggtgtaagagaaagagatagagagctcaagaatgtaggagaagagagtcaaaattccatagtgagaagataatacgagttagtaagacaaacagtaggtaatgtatagggaagagaatagttagataaagaacacgaataccaacacttggaagataacgcttgtgagaactaagcatagacttggaagaaaagatactgaataatagcaaacggatatagctcaccctcccaatatgtagtatctatctcaatacgcaatctccgttacctttctcccttacctttgaatctctccctccccttctcttttctctttctccacccccttctctcttctctttctcccttccctttctatctctccctccccttctctcttccctttctccctcccctttctatctctccctccccttctctcttctctttctctttctcactttctcccttccctttctcccttccctttctatctctccctccccttctcttttctctttctccctccccttctctcttctctttctctcttccctttctccctccccgttcgatatgtgccctcagccttctccctccccttctctcttgtctttctcccttga

SEQ ID NO: 44271 - DNA, 993 bp, Heterodera glycines
atatatcaaaggaattgataatcagcataaaatgggcatttggtcatccatttggccacaaattattttgccaggaattttcgcattggtctccgttttgttcaatttttcgttaattttggtcacttttacgaaaatgtgagatttaaattttaaatttaattcatttttgatttttaagaaaggatcacaaggtgtgcaattggctgttggccttcgattcgttttgccaattgtttttcgtcgctcctttccttgtcaattttttggcccagattttacagtacaccacagttgattaccgtatttgtactggtagtcttatggcatcaactgtggcatcgtatgcctcttttttggcactttttttgatctctgccgaacgtttattaattgttttgttcccaatcaagtaaatattttttaaacaaatttaattatcttgtatatatttttttagaatgaattggatcaaagaacaaacaattcgacgattttctttgttttttctttattttctatcctttttggcgttatgatgatggtctacatattgtatgaattgactattatcactgtgccctttgaaaggcatacaattttttattttaaattttacagtaataattaaattaattacaaattcgttattaaatttttttattcattttaagatttgttttctgcaactctggtctttattcggacgtattgaatacaacaatttcaaaaatcattctttcgctgtgtgttctcaattatgttggcatttctttcaaaattttatggcgttatgtcaaacttcaactaaaaaagaccaataatttagcgacaattgttccaagtaaaatattagaaaacaaataattcatgtaaatatacaaccattctaagcatctgatcattcaatgcgcagaatgttacggtcagttttttttgttgtcttttgtcattttgatcggttggctaattgcgacggtttttcgtaatcaa

SEQ ID NO: 44272 - DNA, 933 bp, Heterodera glycines
tgtcaagtttaaatgcgtcaggatttctcacctccgtttgggcgtggcctccaaatggcatcagttttaagcatttccaacaatttgtcctgcttggaatatttctggacctgaatttgaaccattgatttagaaattaaaatgtcgccttacttcaatgaattgttggtcaatcgtttcgacggccgagttgagtttgccgaccgttatgaaaatgtaattgttgcgaaggaaattgctggcggtgttttgcacggtgatgtcgaaagtggcactgaacatcagaacacggtgacttggattctaaaacagagagaggagaaggataagggaaaaggttggaaatgtacacaccaaacagcccaaaaaacagggggggggggggagtggcggttattttgtttttaccaaccccaatttggtaaatggcattaataaatgtccctttttccgaatacgggtcgaaatgactcacaatggtcggactgcccttgagttgcgcaatgcattggttgaaatgatcacactaaaagcaatcaattgccccttttcaacaattcatcttcaaatcgcacagtgagcagtttgtccgcttcgtccaaaaccaaaaaacgcaaattttccaattttatggtgccctccatgacaaaatgcaaaagacggccgcaggtgacagcgcaaatgtcacagcccgacgcgatcagtcttcggctttctctcattggcatgtcaccttcaaaacgcaaaagaatgaatttattactctttcaacaataagcaatgaataaattaaaaaaataatggccaaaacatacaaaattgaacctcagttttccaagaaaacaattctcaaagaaacactacttttgataaatttaataaatatgcaaaaatttaatgaaatttcttgactttgtgtttttactttgaaaa

SEQ ID NO: 44273 - DNA, 1537 bp, Heterodera glycines
  unsure (1)..(1537): unsure at all n locations
aatgttgggctccaagtacaattaagttggatttttcatcttagtggtctgtgagttagtcatcaaaagagggtctcaggttaaaatcctccttgtgtttgtgtataaatttcaattttttaaagcaaataaataaatatacctaatcaattacagaacgccaaaataaaataaaaatacaaaaataaaagatagcactatgttttaccaatgattttataaatttttttagtttatatcttggtaaatactagaccaaataaaaccattttatgctcattttgaagggaaaattctgaagaatattataaatagggcttttagttttttaactatttttctgcggctttatttcgacgagaaatgcacgaaaaacacatttttagctcggaaattcttcgttttaacgccactattcatcactaggaatcactattttggagctttgccactaaaaaaaattattttggaagttggccactaaaataattttttgccactattttgacattttttggaaaatttcccaaaaatgcaataaaaatgaaaaatataccccaagaatcgacctaaaaaattcaaaaaatacaccccaaagaatcgaactaaaaattttcaaaattacacccctaaaaattggaaaattttctcaaaaattcgtccccccttttttttcttgctcaatatttgctaagaaaatgttttgtaactgtaatcagtgaataaatttgtttgccttaattttatattattttcaaatttaaaaaatagcaatttaaaaaattacacccccaaatttagaaattttcgccactatttttgccactattttgccattttttttgtcagtatttagttaattattttggggttttttgccactaaaaatcccagccctaattataagttagtcaaaagtttaaaaaaaaattgtctattggcaaataaatgattcatgtgttattttatatgttagtgacagggaaatagtacgccaaantgagagaaaaaaattctgtccagttgaaaaattaaaaccgataatgggaggtgaaaaatacaaaatttgatactatacttaattgcttaaattgttacactagccgatttaaagcaattttgcaaaatgttaagattttcgaccccaaaatctggttttttaacagttttttattttgaaaattacattggattacttaatgaaatttgaacaaaagaatgcgatgaagataaacatagaacctcagctgtttttacatatttaaagaaaaatacaccaatggttaattaatttgattttttacttaattagtttttttactatttattccctaaaaacaacgaaactgaaagattaacaaatgaaatgaacttcttgattctttaacagatttcttctatgataaaatataatagcaaatttctttttattaatattgcatataaatttttttattaactcttttatataacaaaaacacacaaccaattaatattggttatactttccccactggaaaggaannatgccttcctt

SEQ ID NO: 44274 - DNA, 878 bp, Heterodera glycines
ttcttcgagcataaatttctataaaaaaaaatagtgccatagttggacagagaatatttgttattcagtatttacaaatatacaataatatacatatatggtatgtacaaatcacaacaaaattcacacaaaatcgtatggcattttaacttcgttttgctcatttttctcctccgtccgtccgttcctttctttttccgtcgccgttcgtcacttacagcagcagcagttaatgcatttgaccaaacaaatcacgaggcgaacaaccaggcaaaaggcgagaagcgacaccagcacaatgaaccacgtgttcagtctgaggcaacaatctgaaaaatgttgggaacggcattcgaaaatggcacttttatattcaaaataacggcacttttccattcagaatggcacttttcatttcaaaatggcacttttccattcaaaatggcacttttcatttcaaaatggcacttttccattcgaaaatggcacttttcatttcaaaatggcacttttcatttcaaaatggcacttttcatttcaaaatggcacttttccattcaaaatggcacttttccattcaaaatggcacttttccattcaaaatggcacttttcatttcaaaatggcacttttccattcaaaatggcacttttcatttcaaaatggcacttttccattcgaaatggcacttttcatttcaaaatggcacttttcatttcaaaatggcacttttcatttcaaaatggcacttttcatttcaaaatggcacttttccattcaaaatggcacttttccattcaaaatggcacttttcatttcaaaatggcacttttccattcaaaatggcacttttcatttcaaaatggcacttttccatt

SEQ ID NO: 44275 - DNA, 989 bp, Heterodera glycines
  unsure (1)..(989): unsure at all n locations
ccagaaaattttagacaagaaaaaggtcgagagtaaggagaattttaaccccgagggaatcaattcacattcgaaactgaattatgagccagaatttgactctaaaaattttttaagagccgtaatttggaaatccgaaatttttttgggtctccaattcagcgcctgtttcacaaaaataactcatgaaaaagagttgatgtcgttcatctgccgggatcaagaatttccctcataatccgaaacaaaagagagaatagtctgtcccaaaaggcaaagaataggcatggaaatgtgagaccaaatttccccatttcttgccttgtacactgttcgaatttgtgccattgggtaattggcatgctccttctcatcctgctccccttgttggtcatccttggcaccgtgccaaaatcggtttcggcttcgaattgccttgcaggacatatccaactcattttcagcaggatcctgctcacgatgaatgcgtcgtcttaccattttgccaatgtattttttatctttggcaaacagacgagcacaatccaacggagcagttcccttcggcagagcccaccaatcgaaacgtttttggggcggctaataaaattggaccaaaaaagattttgaagaattagagcattcaattatattttttgctttaattacaaattgctcattctaattttataagagtttaatttaggtttccatttttactgctgtccgaatttcataattatttttcatcatctgctcattagttcaagatctggttttgctgccgtgtcagccagatatttatttttaattatcccattagggatggatcataatattacatctacctcattttgaatgaattttgtanagtcaacatcatcatattgcttcacttgcgggtcccccagaagcagcatttgtccaagcacctaatgagggatttcaaattaatgatttataatccngcaaatatgatggctcatttt

SEQ ID NO: 44276 - DNA, 1149 bp, Heterodera glycines
ctttgacttcgtgatgggccccagcgcccttggcctcttatttcacaatgggccccagcgcccttggcctttgacttcgtgatgggccccagcgcccttggcctttgacttcacaatgggccccagcgcccttggcctttgacttcgtgatgggccccagcgcccttggcctttgacttcacaatgggccccagcgcccttggcctttgacttcacaatgggccccagcgcccttggcctttgacttcacaactgtccgatcatcggacagtcgcggctgaattcgagccgcgacattcccacgcttgaccaacgtgaaggcgaggcgcggaaggcgaggcgcctcgggtcacaaaagacccaaggggccgtatggcgcgcagagggaggcacctcggattacgaaaaacccgaggggccggacgcgcaaggcgccacgggttacaaaaaacccgtggggccctactcccccttccctaccaaatctccaaaaaccccaccaaagtttgtcctgccagggtcgccacttgttgcggctcggcccacaagccgcaacgggacagttcgtcgtccatggttcggggtgggggtaggagaggaaggagcgggggaggggctaccgaatacccaattgctgggtttttttctctttattcggtgtacgatcggagccactgaaatgaacaattcatggggcttaaatacgatcacatttgggttgggcctacatacaaaacatacaaagcaattaattagagaaatgggctgatcaaatgggctgtctttttctcttccttctcttctttcttcgctgtgacttccttcatttgcggcagaacattcacatgcattgcttgatgttgtctcccttcacgtgcactttttgtccccatcggaccatgtttgggcggggagggccggtttctgctgtcgggttggctgtgacagctgtttttcatcgcagcttactgttcattcatgtgcgccgcttggtcgattgagctgttattctctctccaaattgccacttttttgcccattttccatcgtttcatcgcccactgattatttttccccttttttgctctttcgctcattgctctctttccaatcattaactgtccgttccacggacagtcgcggctgaat

SEQ ID NO: 44277 - DNA, 999 bp, Heterodera glycines
caagagaaaaaagagatagccattttttcggcaagaatttttttcgttagcatttcaaatatcgtgtgagtgtttggtagagccagactagagaaggcaaatgttggtaccaagtttgcggtcaaatccccaggagaaaaaagagatagccattttttgggcaagaatttttttcgttagcatttcaaatatcgtgtgagtgtttggtagagccagactagagaaggcaaatgttggtaccaagtttgcggtcaaatccccaggagaaaaaagagatagccattttttgggcaagaatttttttcgttagcatttcaaatatcgtgtgagtgtttggtagagccagactagagaaggcaaatgttggtaccaagtttgcggtcaaatccccaagagaaaaaagagatagccattttttgggcaagaatttttttcgttagcatttcaaatatcgtgtgagtgtttggtagagccagactagagaaggcaaatgttggtaccaagtttgcggtcaaatccccaagagaaaaaagagatagccattttttcggcaagaatttttttcgttagcatttcaaatatcgtgtgagtgtttggtagagccagactagagaaggcaaatgttggtaccaagtttgcggtcaaatccccaagagaaaaaagagatagccattttttcggcaagaatttttttcgttagcatttcaaatatcgtgtgagtgtttggtagagccagactagagaaggcaaatgttggtaccaagtttgcggtcaaatccccaggagaaaaaagagatagccattttttgggcaagaatttttttcgttagcatttcaaatatcgtgtgagtgtttggtagagccagactagagaaggaaaatgttggtaccaagtttgcggtcaaatccccaagagaaaaaagagatagccattttttgggcaagaatttttttcgttagcatttcaaatatcgtgtgagtgtttggtagagccagact

SEQ ID NO: 44278 - DNA, 365 bp, Heterodera glycines
  unsure (1)..(365): unsure at all n locations
gagcatagtaatctcactttttgntttgcccttcactttcctcttcctctcgaattccctcggaaattcccaaaatttcccctctttggtcggaaattctcaaatctccccgtattatttccaaaattcccattccaagtccgaagctcagctatttgttgtttcaattgatccattaatcttcctctcggggaagcttcttcttctctatctcaaggctattgagcatccaggaaaaaaacatgtatttacataaaaaaggaagccctataaatttgtataaaaaaggttaaatgaaaatgtactttatgaaattgttttgtatgattaaacataccaacatgaataagttcataataaatttt

SEQ ID NO: 44279 - DNA, 1469 bp, Heterodera glycines
ttaagttgtaaataaaatttggtgcgctttagagctctttctgaaaaaaatatttatgaaacaaaaaaatcgattttttcaagtgtccgtttagggtactcaaacaattatggggagcaaaaatccaacgcagaattaaagtacaggctatagggaagctattcccgaaggattcggtctccccataaatctgggcgcatcggctcggggggactgccccgaaaacaaaaaaatcgattttttcaagtgtccgtttggggtactcaaacaattatggggagcaaaaatccaacgcagaattaaagtacaggctatagggaagctattcccgaaggattcggtctccccataaatctgggcgcatcggttcagggggactgccccgaaaacccaaaaaaaaatttttttggataaaaattatttaaatgaactgactagataatatttaaaataggttattactcttcctttcagtatccctgcaaagtttggtgcgcttctgatcagtttctgaaaaaaaagttaagcctaaactttttggcctgtttaaaaaggaattaaaaattttattcatctccctttttgatagaaaaagcatcagagtgcctaaactaacctgtaaataaagttttgtgtgtttcagagcactttctgaaaaaatacttatgaattaattttgcaaaaaataaataattaatgaaaaagtcagaatttcgaaaaattttaaaaacaacaagcgttggcattttttcaggttaagttagtcctttacaatggagaaggcctgcaaaattaggagagattatatcgattttagtgcgctaggttcgatgaaactttttaaaatataagcctaaatagggaagctattcccgaaggattcggtctccccataaatctgggcgcatcggttcggggggactgccccgaaaacaaaaaaatcgattttttcaagtgtccgtttggggtactcaaacaattatggggagcaaaaatccaacgcagaattaaagtattaaaaatttttagattttttattcatctccctttttgatattgaaagcatctgagtgcctaaaataacttgtaaataaaatttgatgcgtttcagagcagtttctgaaaaaatatttatgaattaattttgctaaaaaaataaaatagtgaagctttaaaaattaataaaaaattttaaattcagaattactggagttagcatcatagcagtgcttttccttgtctttttgatgctctcgcaaaatctggttcgcttctgataagtttataaaaaaaagttaagcctaaaatttttcgcatatttaaaaagcaattaaaaatttttagattttttattcatctccctttttgatattgaaagcatctgagtgcctaaaataacttgtaattaaaatttgatgcgtttcagagaagtttctgaaaaaatatttatgaattaattttgctaaaaa

SEQ ID NO: 44280 - DNA, 923 bp, Heterodera glycines
aattaaattccatcctttggctactgaccggcattaaccacgggcagttcctgcaacccaattgcggacgcgcggacgaacggagacatcagacccaacttgacaccatgcttcttcgtgaacgcctcttggtactgcttgcgcatccgtaccacgttgtacagatcgacctgaaaagagcaaggaataaaaatgtttaaaaagataattattctatcattcgatttgtttttttattagaatttttgttttgttttttgtgatgcaaacggacaaatcaatttattaagatttttaaaaatagcaagctgtataaatgtgtgactcgctacaaacattcactcatgtcacccgcctcccccccatttgtgttgacctcgttgaacgtggtcagcatggcgctggtgttctgcgcctccttcagccgctccgctattctcagtctcatccggttcatcttcactcgcgtttcgctgcgttgtccagtgatggcggtggagtcgccggcgggagcgtgcggtggctgctgctggaacttgggcacttttatttcggagacgggctttgagctgatcggctcctttggcagtggcggcattttcgactgcatgggaggagctgagaatggaagcactctttaaaaaacaaacgaaaaaagtattggcaataaatcatcatccaattaggccaatgggtcccatttaattttgagtattttctaaattcctcgaaatcttttcaaccattggcattagagatcggataagggccgggcccgtatacgggttttacgggcccctaacccgtatttttttcggccgatacgggtttttacgggttaagggtttttagcccgtaacccgtatcgatgtcaagcccgtaacccttacccttacccgtacaatctgaaaattccgatctct

SEQ ID NO: 44281 - DNA, 1561 bp, Heterodera glycines
  unsure (1)..(1561): unsure at all n locations
ctgaacaatacgattcatttctttctactaatagcacttgataagaagcgagaaaatacaaattgaattaattaattatttcctgtttgttgaaattgaattgaattaatcagtaatgatcagttggcaagtttaaatattcatttcttatctactctaattgcgtaacaaacaattaggttttgattgtgtattccaaacagtcgatcaaaatcaaaagaatgaaaatgtgatcaaacaaaaaaaaaattgctcctggcccttatcagcgagtgacgttacgccaaaaaaacgaaaattttgttttttcttgagttggtttggtttggttgaattgtatttgttcgtcaataaaacgtcaacgaaaaaacaaagcctcaaagaatgacaccgttgtgagaaatttcatgtgacgttgaaatttgaaacttcaatcaacttcttattttaaattaaaaaaaataaatcctctttcatttagggaattttttgtgtgtagataaacactaattactagggccgcaacttttagtgacgaaaaatctcgaaatagttaactaaaatagtgagtaaaaatcccaaaatagtgaagaaacagtgacaaaaagtccgaaatagtgacgatagtgacataattttcagccaaaaattgagcaaaaataatttttattcactgattgcagttgcaaatgagtaggactgggatttttaagaccaaaaacccaaaatagttacctaaaaattttttaaaattaaaaatttttgccaagtaaatttttgagaaaatttttttcatttcataggagttttgaaaaattttagctcgattcttaggggtgtatttttttgaaatttttttacgtagatttttaggggtgtattttttggttttattgcatttttgttaaggaatttttcaaaaaatgtcgaaatagtgaaaaaatagtgacaaaacgccaaaatagtgatttttaactattttagtgacgaagtcgccaaaatagtgatttctagtgacgaaaagtgacgtccaaatgaaaaaattttaatgcagaaatgcgttttttgagctcctttcttcaaaacaattgagcaaaaaaaagttttttcactaaaagttgcggccctagatatcattcagaaaaggactttcgaataataattaaattttcaaccggcatcctcagtagttaaataccggtggctctttcactactcatcctcgttaccgtacccctattatgagtcaaatactttttctttttattttcctgagacaaaaatatttaatataaaaatgtaataatatattttaaaattattaaataatcataaataatcaatatttctgctatattgattttcatatcaataaaacattgtcatgactgaattcattcaaagctttcaaacatattttattgaaaatgcctattgngtatgtattttctaatatccatctattattattataaaaaatgggaaatttttatttgcttttagcgataaaatgattcgcttgtattanttattccattttctgntcatttgtctgacttct

SEQ ID NO: 44282 - DNA, 937 bp, Heterodera glycines
  unsure (1)..(937): unsure at all n locations
aataggcacctaaaaaggcattaaaaaatcgcaaaacactcattaaataggcactaaaataggcaaaaaaaatttttattaacgctttttaggtagcaaaacacaaaaattaatcaaaaaaaatattttgcttatatttcaattgttttaaagtttttttgttacaaataatttttttaaaccaaaaatttttatgaagaaaaaataattaatttttggggaagaatttttgtaaaatttttttcaattcttaggggtgtatcttctgaaaaattttcaagtcgattcttagggggtgtatttttcatttttattgcatttttgttaacgaattttccggaaatcctgaaaaattcgtcaaaaatggcgaaataggcacaaaaataggcaaataggcattaagcacaaaaagtccaaaagtgcgcaaaaattttaggcatttgcctaaaaatcgcatccctagtgatagttttatctgtgtgcttattcgatcccattaaatctttgttgccgattttaattaatcttgccaatctttttattgacgatgatataattcaatttaaaaaataatgactataattttacaccaagattactgtaaaatgcactgaatcacttgacttttgattattttcatttgtttgtttaaattaaattgaatattgaattaattaattaacttatttaaatattttattanaaagagtatacagaattaaaataaatcaaaaaattttttaaatttatttatttttattttctctctctctttttattattacctttttttacttgttgaacattcagcatttgcatgttgagttgcgaggatagctcctctctttattattatacgagacaatttaaaatattaaactagtttaattattttgtatatttactcatttacaaataangtattttctactaatct

SEQ ID NO: 44283 - DNA, 595 bp, Heterodera glycines
aggcaagccaactcgttcatttgtatgtttgtggccctaaagagggccgtttgggatatgaagattggggggggggaagtcgccgtcgccgcgcccgctcagaagttcggaagcgttgggtggggaccacggtacatgtaccgcacctggttgtgcacctgggtgttgcgcatggtcctgaatgagcaaagcatcataaagagagaaagggtaaaagcaaagaacacttaccgccctccggcgccgcgttccggatcgctgctgctcttcgcagacccaacagcgaacccattccttccatctctgccacgaggcgccgcagcagcacctgctcgccgggggtccagcgagtccgcccgtgaattttaggggtgtatttttgcttttttgaaaactagaattagggggtgtatttttacaaaattttcgccaaaaaattattattttttccattttggcctaaattgggggtccggcggtgccgataggcgcgccgggaaaatttttaagtattttaatgcaaatttgttcagaaaattgcttaaaatttcaaaaaatttactgaaaatttttcattttttgggtttcggggggg

SEQ ID NO: 44284 - DNA, 1321 bp, Heterodera glycines
caaaaaaccatttttaattcgttcaaattaaacaacgaactaacaaattaaagagcaattggaatttaaagaagaaatatggaggggatcaaaaacaaagtgactgtgaaacatttgttagacaatatttttgtagaaaaaatattggcaaaatttgaagcaatttcaatcaaaaatcgatgggagtgacgaaatgatcggccaccaaaaaaaaattagttttttgtgtgtcactcaaaatcttggcaaaatgagcaaacatattcaaaattttcttttttgcttcctttttttacctttttcacttttaagacgaatttgaattttagcgaaaaaaaattccgaaaaataagtcaataatattagagagcgataaaaatatttatgccaaaaaatattgaaatgattagcaattatgctaacgaaatggataagaatttctgagaaattcatggcaaaatttggaaaattttggcctttttatggtttttagcaaatattttgggggttttagtagcttaacaaccaccaaaaaacatgcttctttaaaaattcaaggaataaaatttttaataattgcacccctaattttcatgtttttttttgtgcatattttgcgattttgtgcatatttatgcgtatattttggccgccattgttcgtgcatatttttgacagccctgatcattaagtatatgtacataaaacaatcgcaaattaatattttattaggcgtcccaatgtttttttatggaaatttgaacactaatacttatttatgaagttgataaaacggcgaaatatgggaaaatatggaaaacatttgaagctaatgatgggtgggtgagtgattcacagattcatcggagagaattttgttcattttccattcaatcagtcaaatcaaaaagttttaaaatggaattatttttcacattttacattttccaattgtatattctagagttgtaataaattgataagcatttatagggttttcagcagttcccctgcaaaattgggttagctttcgatcaatctacaacgttgggtgataaaatgaaaaaaataatttaaaaaaataatgctggtgcgctaaggtgaagaactttgttcctccaggcaaaattctaagaaaatttataagcatttgtagggttctcagcagattccctgcaaaatttggtgagcttccgatcagtctagaatgttgggtgataaaatgaaaaaaataattgtcgaaaaataatgctgtactggtaagagtgaagaactgtgttcctccaggcaaaaaatttatgaaaatttatatgcatttgta

SEQ ID NO: 44285 - DNA, 1644 bp, Heterodera glycines
  unsure (1)..(1644): unsure at all n locations
ccaaaaatgatcaagnaattcatggaccnaccaccaaccaatttatttatcgagtatntaatgttgttaggcacaataatacaaaacatatgtacaatcagagcagcagcaaatatcgagcgtgacaagcaaaatatcaaaatatacatggcgataaaacatacatatgtagtacgtatccatacatggaaaatgatcgaatataaaatcacatccgtccgattgtttgtgagccgcaattccctctcatcattgtcagtgccgtgtccatctgctgctgctgttggtctgtcgttttgcaatatgaaaatgaattttcttttttttcatttaatcagtcagtgaaaatttttaaaatgtcattttcacccttcaacgttccgccgcctccgttcgttcggctgtcgtggtagtgcgaaaaatgtccatcatttcggcaagtcctccttcttcggccaagtcctgtgcccgtttgccttaaaaatggaggggaaattgtgtacataatcaacaaaagaatgaagttgtttgtgcccaccgtcgggggttacttgggccgctgatcacgaatatggcatccatttcgaccaattcctaaaacaggacccgatttcgaacaaagaatcgaaagttaaattttagaaatttgggttaatgtctcgaaaacgacttaaatgcatgaaaacaaactgaaagtcatctttcctgtaataaaagatcatataagcattttttagacgaaaaattcgaaattcgttgaaatgcgaagttccgattttttgttcgaattctggtccgagtttagaaactggtcgaaatggatgtcatattcatgagcgctttcggtttggttcctttttttatttttgcttccgatttatctttcccagcgaccccgatatgtccataaaagatttttataactataatttaaaaaatgaaaaattactttttgaaaaatcttattagacttgatgaaaaatcacggattagatgaagtcacatgacagatctgatgtcatattcgtgatcagcggcccaagtaacccccgagtgggacaaacaatcgtaaaaaaccgcctgatttattccttttttatgggaccagtaaaagtaaccattaccgaaaatatgcatatagaaacacgggtcgatagcagttcgtaaaatggctgttgcggacgatttggaatgggaatgcacgtaactgatttgcactgctgatgtgcggcgaccacgggatcgacaacatttccgacacagcaatgtgcccccggtgttaaacattcttgatcagggaaccgatctgtacggtgatctttttcggatggtaatcgatccggaagggattaacggaggcagcggcggtggtgcgcaagtcataacatcagacgaggaggaatacggacgatgatagcagcagctggattttgttttttttactcttgattcactggggattctgtttttggcatttataaattgcaaaattggcactttattggtgccaatgcatttaaaaatttgaaattaattaaagaatatttaaaaaatagtttcgaaattttgccaaaaaggaattcctgatcatcctttaattgattgtcttttctcaaaatgattaagatttattaaaattcccat

SEQ ID NO: 44286 - DNA, 1030 bp, Heterodera glycines
ttttgatcaatttagtggaataaagtttgaaaaatagcaaaaaattaggagaattttatgagattcatttggaattgctatcttccaaaataaataagttattccagaatttctggaaaaattcgatttttcagaaaaaaattcagaactctgttctgaaaaagtattttataaaaataataaactcaaaaaatccgcaattttttgctctattttataaattttattttagttttttatcacttttttgaaaaaagttatagaattaaaagtgattttgtaatttgggaccacagtggtgtgaccatgatttttgagtggaaaatttttttcaccaaaaatcttccaaaaatatgattttaggggttatttgggccgctgatcacgaatatgtaatcagattttactttagacatggttaagacctcagaatccccgtgttattggggattctgaggggtgggagcgcccgtcctgaggccgcgaagcggccgaatatcccccaaaaaattagcggccgaatgttccccacaaaattaaaaaacgggcgcgaagcgcccgtcctgaggcagcgaagcgtccgaatgttccccaaaaaattaaaaaacgggcgcgaagctcccgtcctgaggccgcgaagcggccgaatgttccccacaaaattaaaaaacgggcgcgaagcgcccgtccttaggcagcgaagcgtccgaatgttccccacaaaattaaaaaacgggcgcgaagcgcccgtcctgaggccgcgaagcggccgaatgttctcaacaaaattaaaaacgggcgcgaagcgcccgtcctgaggccgcgaagcggccgaatgtttcccacacaattaaaaaaaggacgcgaagcgcccgtcctgaggccgcgaagcggccaaatgtccccaacaaaattaaaagacgggcgcgaatcgcccgtcctgaggccgcgaagcgggcgaatgttctcaacaaaattaaaaacgggcgccaagcgcccgtacctgaggccgctaattggccgaatgtcc

SEQ ID NO: 44287 - DNA, 972 bp, Heterodera glycines
  unsure (1)..(972): unsure at all n locations
attcggtctcccataaatctggggcgcatcggtcggggggactgccccgaaaacaaaaaaatcgatttttcnaagtgtccgtttggggtactcaaacaattatggggagcaaaaatccaacgcagaattaaagtacaggctatagggaagctattcccgaaggattcggtctccccataaatctgggcgcatcggttcggggggactgccccgaaaacaaaaataaatcgattttttcaagtgtccgtttggggtactcaaacaattatggggagcaaaaatccaacgcagaattaaagtacaggctatagtgaagctattccggaaggattcggtctccccataaatctgggcgcatcggttcagggggactgccccgaaaacccaaaaaaaaattttttggataaaaattatttaaatgaactgactagataatatttaaaataggttatttctcttcctttcagtatccctgcaaagtttggtgcgcttctgatcactttctgaaaaaaaagttaagcctaaactttttggcctgtttaaaaagcaattaaaaaattttaaaaattttattcatctcccttattgatagaaaaagcatcagagtgcctaaactaacatgtaaataaaatttggtgcgtttcagaaccctttctgaaaaaatatttaagaattaattttgcaaaaaataaataaaaacgaaagactcagattttcgaaaaatttttttgagcaagctagctcggcgctcatttcagtgtaagttagtcctttaccggggagtatccctgcaaagtttggtatgcttctgctcaattagcaaaaaatatgagtgatcaaactttcactaaaaagttaagcctaaattttttggcatatttaaaaagcaattaaaaaatttttaaaattttattcacctccattattgatagaaaaagcatcagagagccttattaacttgtaaataaaatt

SEQ ID NO: 44288 - DNA, 981 bp, Heterodera glycines
caccccaccaaaagcaaaacgatataaccaaaatataaggaaaaattttttaaaaaattttttctccatcttcctttttgatactaaagcatcggaaggctaaaattaagttgtaaataaaatctgggcgctttaggccttcggggaaaaataccccgaaaacaaaaaaatcgattttttcaagtgtccgtttggggtactcaaacaattatggggagcaaaaatccaacgcagaattaaagtacaggctatagggaagctattcccgaaggattcggtctccccataaatctgggcgcatcggttcggggggactgccccgaaaacaaaaaaatcgattttttcaagtgtccgtttggggtactcaaacaattatggggagcaaaaatccaacgcagaattaaagtacaggctatagggaagctattccggaaggattcggtctccccataaatctgggcgcatcggctcggggggactgccccgaaaacaaaaaaatcgattttttcaagtgtccgtttggggtactcaaacaattatggggagcaaaaatccaacgcagaattaaagtacaggctatagggaagctattccggaaggattcggtctccccataaatctgggcgcatcggctcggggggactgccccgaaaacaaaaaaatcgattttttcaagtgtccgtttggggtactcaaacaattatggggagcaaaaatccaacgcagaattaaagtacaggctatagggaagctattcccgaaggattcggtctccccataaatctgggcgcatcggttcggggggactgccccgaaaacaaaaaaatcgattttttcaagtgtccgtttggggtactcaaacaattatggggagcaaaaatccaacgcagaattatagtacaggctatagggaagctattcccgaaggattcggtctccccataaatctgtgcgcatcggttcagggggactgccccgaaa

SEQ ID NO: 44289 - DNA, 1399 bp, Heterodera glycines
cagcccgtgccgaattagactcaatggatttaccccctgtctctttggatgctgctctagggcatttacagagcagattcgaaaatgagaacacaaagagtatagcgagacaaaacctcgcgatttgcagacaatacccgggagaaaaagtttttgattttgccactcgtttaagtgaggcagttaggactgctttggccggggaaacggagggaaacattaggaaaagactgttggaagaatttttggatcggttaatccccgagctacaatacgaagtgaaatcggagaggccaacggactatagcagggcttacgaattagctcaacattatgagcttctccaggcgtcgcgcaagtcgacttcaaatgtggccatgaatgaacttattgaaaaagtcgaggcgttggccatgcaaaatgtgagacatgccccaaatttttctgatcagcgcgatcaccgggtttgtttttattgtaaaaaagcggggcatgtgataagagattgtgcggcgagaagaagggaagcaaacaatgggccaaattggcgaagagatgaaaacagccgtagaacggaacgcaatgggaattattctcggccattcgggcagggatatgaaaggaaccgagagacgtggagaagcggaaatagccaacaaaatagtcggccaaatcagaactatcggcgatacagagaccaaagtggtactagacgggaatgcgatcaagaaaatcgtttcccaagaacacccacaccaagagtaaaccctaggggaggcagaatagcaggtgcccgagtggcaagcccctactttttggcaataatcgctattttcggcagtgttctctccaacctcaatccttgcaaatgttccaaaacggcagccgatgatctgtttaccggacgctccgtcgagtttatcggaaattcgccagaggagccaatctcgccccacgtggcaaccgactgaaagtccgatcccgatcggaattaacgatttaccggccaaataacacttccaatataaaacaccggctcactgcatggtaaatgtgttaaatccaaaattcaccgcagagtcggagtttttcggagccccattaaaggaggtggaaactgagaatttggatatccctcacctcaacttcgccacagaatgagggatttaaaccatttccccagcgggagagctccagtaaaaatggaacccttccggtccaccattactcatggaagtcggatggcgagtatggcccgtaagaaggttttggcacttgacggaagtcttaaattgttatacctatgatacggttgttttaccaggtacggagttgaaggagtcagtactccttaaataatttgccagggtgtcagtacaaatccggtgcatgtcgttgc

SEQ ID NO: 44290 - DNA, 947 bp, Heterodera glycines
ccccaatctttcagtgttactaaaggcctaattttccctttgatttttttaccctcaccccccccccccccctggttacgtccggccttagagatttcacccctgttttctggttttaaattggtgacttacagcagcatggcacttggcagattttgtgaagcgctggagggggttggatgatgatgggcggttgggggcagcagctaaaatgaattaaatgattgcaatggccaaatgaatttaaaaaaataaattattcgttaattattttaattttttaccagcatttacagcagcatgggcagcagcaacaacttgaatatttaaattttgaatttatttaaaataaattttaaattgtttatattttttttctcaccatgaagcatctgccaacttttcgctgccatagttgatcagcagggccagtgccagtgtgataaatattttaaaaagcattttctttttaaatttatttaactgccttttaaattgcaaaaaaatttaatttaatttttaatcggaattgttaattattaaaatataaatgaatatttgcctcaaatgaatgatgatttgtcaatgaaaattgcaatatttataccattaaatgatttttttgaacaaacaattaattcattaattatccattgtccataaaagagaaaatttcggggaagacagacagacagagagtccattcaaaaaatgcgcaccccccacaatttttcgtcaacaaatttccataaatattttcctctgtttattggacacattctgctgtatttgtatttggtaaccacagaaaagaggaaatgacaacttcttttttttatttgtttgtccattttaacacaaaagattgaagcgaaagcagcagcagtatcagcgacaaaatggacaaaaaactgcaatgaaaattttggaccattaattatgatgag

SEQ ID NO: 44291 - DNA, 872 bp, Heterodera glycines
cccgttcgaggccgcgaagcggccgaaaagcacaacaaaaattagaaacgggcgcaaagcgccgttcgaggacgcgaagggcgcgaagagcccatcttgagcctcgatgtggactaaaaacccataataattttttaaaaattcaaaaaaaaatctccaaccaattcgatcaatttgaatcgcttcacagtctaggtagcgaagctcccaaagcgcgaagcgcttttgcccagctaaatagccgacggttcacgcacccgctagttactatatacgttatattgacaaggagtttcgttgctaaaaccattttctcccggccgaaggccgggagcgccctgaaagtggtggaagggtcttacaactttttgaggagcatccgggaaaaatataggttttccggtccaagggccaactgagtaccagggactgatttctcattttttcgtgcgtttgacggctcgtaactttttttctgaaactctaatcaaaaaatgtccgctgagagggggctaagttgaagtgttgtctaaaagtcaaaaaaaattccaggcctctacctatagtaggaagggctgcagaaaataggagaaattcagtaccaactttgtccacttcagtcccaggtgaataccgtgtcagcgtttgatctgagcgagggggctccagcggacttattgtagagttcaatgagctggatttttccagtttttaaaattttgaaaattttcaaatattttcgagttaggcctaaaaaacggttttcgggtttttgaattttaggaatttttaacgatttttctgggaaaaacggagaccacttccaaaacatcatttttcgagttctatcgactggtaatttttttggaaaa

SEQ ID NO: 44292 - DNA, 1132 bp, Heterodera glycines
aaatcctctgtgaaataaaatggcgattgtgcacagccctcccgtctcatacgcaagcgcttttgtgaggtataaaatttctcaaaaaaagagatagccatttttctgggatagagtataaatttaaaaattccctcaaaaataaaaggtctattgcgcaccgccctccctatcatgctcgagagcatttgtatgtgtataaaatttatcaaaaaaagagatagccatttttttgggataacctctaaatataaaaatcctctgtgaaataaaatggcgattgtgcacagccctccgtctcatacgcaagcgcttttgtgaggtataaaatttctcaaaaaaagagatagccatttttctgggatagagtataaatttaaaaattccctcaaaaataaaaggtctattgcgcaccgccctccctatcatgctcgagagcatttgtatgtgtataaaatttctcaaaaaaagagatagccatttttctgggatagagtataaatttaaaaattccctcaaaaataaaaggtctattgcgcaccgccctccctatcatgctcgagagcatttgtatgtgtataaaatttatcaaaaaaagagatagccatttttctgggatagactataaatataaaaatcctctctgaaataaaatggctattgcgcacagccctccctctcatactcgagcgcttttgtgagtgtataaaatttctcaaaaaaagagatagccatttttctgggataacctctaaatataaaaatcctctgtgaaataaaatggcgattgtgcacagccctccgtctcatacgcaagcgcttttgtgaggtataaaatttctcaaaaaaagagatagacatttttctgggatagagtataaatttaaaaattccctcaaaaataaaaggtctattgcgcaccgccctccctatcatgctcgagagcatttgtatgtgtataaaatttttcaaaaaaagagatagccatttttctgggataacctctaaatataaaaatcctctgtgaaataaaatggcgattgtgcacagccctccgtctcatacgcaagcgcttttgtgaggtataaaatttctcaaaaaagagatagacattttttctgggatagagtat

SEQ ID NO: 44293 - DNA, 971 bp, Heterodera glycines
gagagagggtatcggagagaatggagagagggaagagagaggggatcggagagaatggagagaggggagagggaggggatcggagagaatggagagaggggagagggaggggatcggagagaatggagagaggggagagggaggggatcggagagaatggagagaggggagagggaggcactaaaaattcttccaatttttcccaatccccccttcattttttttctcttaaaattgacttttcagctcaatgttagcattccatgcgaggatgggtcgaaaactgtgcagattccgtccgccacaaattgcagctgtttcgactgttcccgcaagcgccggaggcgataattagaaaaagaggagagaaagaaaggaatacccagcagaaaaaggccaaatgcttctccttttcgtctgtttgtgtacaatcgtaaaaatggccaaacgatggccataaaatgataaataatgtatatttctcattaccacccaaacacatcaaaaatagtgaatgatggaaccaaaggcacacttcttttgcaaatgtttaggcactgatcggcgggggggattgagagaagatcaggaaacattcccttctgatcagtcccctcctcttttatccatgccatgtgatcagtttctcttttctctctctcccattttctgtttttcctctactttagcagtctccaatttaaatccaaagaatttttattttatttaaaaatcgctgatagcatttgaaagtgcgctcgaaattttcggagatttgtttcccactgttccgtcattgcctccgccacttgcgaggtcggaaaacctgaaaataaattctgaaaaacccaaggaaaaattcccatggtgaagtacaaataatcgtccacaatggcggagaagcggctttggtcgagttgtccggtgggcgagtcgccgagcaattcgcggaaaaacaactcagccaattc

SEQ ID NO: 44294 - DNA, 985 bp, Heterodera glycines
ctacaataaacttaccgctcttcccttttcagtggcgttgcctttactgttcggtggggtaataaatgtaagcctttccccggaaaaaagcctccctcaggcgatgggtgggtttaatcctcgaatcctccagaacgggccgtggctttgagaatttctcgccttagtccgtcattacttttgcccatcactctatccaaccccattttgaattacaaattgccccccccccaaatgcatttgtatgcccccaattgtcctcccctttgctgctgctttccaattaactaaattattcatctctctttcctgccgaagttgcctctttctgcgcttctctcccctcttccgctcgttcgcttattgtccgcttttcccatttccctccattcatttgctttccacccaaaggtgatgaatgaatgtcccctctccaaccaatcggccgtcgactgtctccgcagcggtgcttacttttacgatgcttgcacgggtcattgtgagcgtgagatgaggggacaattggtaagttagaatggggtctggatagagagatgggcaaaagtaatttccgcctaagagcaaaattttcaaatccaccacttgttctaggggaatggatgttttaccttccctcccccccccccaattttctttgtaaattgcgtctctttcagcttttccccgtgctagcagtgatggtcgttgctcccaatgtggtggtcgcgttggtcctctcccaacggcccatcctttactcggcaaatttagtgctaaaatacaccccccccccccccctctctttttttcccttccatttttcttttctctccattctcctccctttggtgcccttcccatttgcttattctcttatattttgggtatgtagcagaagatgacgaaagataagattaagcaaaatagagctgggaatggattcggaaaaggcggagggggggaagaaggaacagggggatggaag

SEQ ID NO: 44295 - DNA, 313 bp, Heterodera glycines
ctaacctgtaccattactctaaaaaatttaaattatgaaaatccgcaaagtaatcgccttacaattagcagtttttgaaaatttaatctcccttttccaactccatagaattgctcacattggccgccggcggtgtgccgtcgtcgtcggtgtcggattgtgccgcggcggcagcacgtgcgggcagcagcagtagcggttcgtccgcctcgagcagtattctgaaggagattcggcaacactttcggcggttgggtcgcaaattgtcgctgctttcctcgcgacggcacacgcagcagcagcagcagtacca

SEQ ID NO: 44296 - DNA, 770 bp, Heterodera glycines
cccccccccccccgatggtttatttaagccaacactgcttctcctcccttcccgttccatccgctgcaattccaaattcgcaaattaatcctccccccctttttccccctcgtcatcgttggtcccccctttttggtcccccgtccctccccttttggctgtttgttgttcagctgcttttccatttgtccatctgctcccccccccctcgcccgcttcattcttcaatattatatcagtgcaacaattggtccgtctttcttcccccaaatgtccgcttcatccccatcccccgccgtctttctcccatcgatgccctcctcctcctcgtcgttttggtggacatccgccgttggcaccgcctgttaccatgagccgaaggtgcacgactacgagctgtacttccaactgagcaggtccatctgaacagcggttattccgaattcaggggaaaatgaccaaaatacgaatgaatgcgaattgaaatgattgccacgaacttaaggatttctcttttgtgagctgcttccgcttgcactgctcggagttctggcaacacttgcgacattgatttgtctgagcactccgaccaaaatttcgtccggagagatcatttatctgagggcattgctcgtgctggaccattgccatattatacggctcaatggccaacactttgatccctgaattttgcgagtcacaccgttccccggaagatatcgcttatgagtccgattccatattccgatgaccgacttagtgaaataaag

SEQ ID NO: 44297 - DNA, 1102 bp, Heterodera glycines
tggcggtctgtacattcatcatctgctcggtgtcgccattcacgagagccatttcgggaaaataccggagaaggaatcgtcgcgacgtttcgggtgggaatcgcgggtttttcgcgacggaaatagtacgaaatttcgaaaaatctaaaaaattaattaaattttcgttttttaaataaaattagagagcccgggactcgaaaaaatcatccgaccaccaccctcccccaaagaaacgaatacaattaggaaatggaagaaaacgttcagcacacgcacgcaaaaattttgatggtggtgacacccaaaaacggaaaagggtttttttggggtggtgatggtggtggaggagggagggggacactgcaactccaaagatcaaagaatgttagggcgccaagcaaaaaaaaattgttggcaaaatgccaacaatttttattgggagggtcgggcagaaatttagtgggagcaatgaacaaaaattggggaggggcaagaaaccccaaaaaatggggtgggcggaggaaggaaatgaacgaatgtggaacaattgcatcatctttgtactggccggggggacattttcatatttcaaaaccattggaattcattctttgctgtgcaaaaatgatcaaaaaaatggcagctcggcgctaatgaggattaattagggtcattagaggtggtgaccctaatggactaatgagggagattcgtaaagcaatgccccctccacttaagacaaatctatcaagcaaattaattcatatgtgctaataggaattataaaatgtgatcaacgccaggacgtgattgttttatgctgatcaatagaatggttcaggagggcaatgtaaaaatttgatcccaaaatcatgctaatttcttaaatacgagcaaaattgttgtccctaaattctcctccattactgatcgggattggtttattttgataaaagtaaatttctgatcaaaagattgatctcgatttaacgtgcgtaaacttacagagcagattcacaattactataaattttttgatcattacacagaaacaaaatggtgtccccctgcctatttctaagcgttgctattaataaat

SEQ ID NO: 44298 - DNA, 1194 bp, Heterodera glycines
  unsure (1)..(1194): unsure at all n locations
ccaaaaaaatttcccaaatttttaaaaattgtataaaaatttaaaaaatgagaattcatgcgaggatttttggaaaataagcttaaatagggccttagttaaactgtaaaaaaaaattgggggcgatttgaatgagaatagaaagagccaggttcgatgaagttttggtaagccaaaaaaaaatccaaacatttaaaaatctataaaaaatttaaaaatgagaattcatgcgagattttctggaaataagcttaatagggcctagttaagctgtaaaaaaaatttggggcgatttgaatgagaatagaaagagccaggtttgatgaagttttggtaagccaaaaaaaatccaaacatttaaaaatctataaaaaatttaaaaatgagaattcatgcgagattttctggaaataagcttaatagggcatagttaagctgtaaaaaaatttggggcgatttgaatgagaatagaaagagccaggttcgatgaagttttggtaagccaaaaaaaaatccaaacatttaaaaatctataaaaaatttaaaaatgagaattcatacgagattttcaggaaataagcttaatagggcatagttaagctgtaaaaaaaatttggagcgatttgaatgagaatagaaagagccaggttcgatgaagttttggtaagccaaaaaaatatccaaatatttaaaaatctataaaaaatttaaaaatgagaattcatgcgagattttctggaaataagcttaatagggcctagttaagctgtaaaaaaaatttggggcgatttgaatgagaatagaaagagccaggttcgatgaagttttggtaagccaaaaaaaaatccaaacatttaaaaatctataaaaaatttaaaaatgagaattcatgcgagattttctggaaataagcttaatatggcatagttaagctgtaaaaaaaatttggagcgatttgaatgagaatagaaagagccaggttcgatgaagttttggtaagccaaaaaaatatgcaaatatttaaaaatctataaaaaatttaaaaatgagaattcatgcgagattttctgggaataagcttaatagggcctagnntagctgtaaaaaaaattatagcgatttgaatgagatagaaagagcaggttcgatgaattttggtaagcaaaaaatatccaaatattaaaatctataaaa

SEQ ID NO: 44299 - DNA, 1048 bp, Heterodera glycines
gcatttcaatctctgagactcaattctcaggctttccaatcgctgggactcaacccaccagcatttcaatctctgggactcaaatctctggcattccaaacactgggacttaacccaccaactttcaatggcattccaatctctgggactcaacccaccagcatttcaatctctgggactcaacacaccagcatttcaatctctgggactcaaatctccggcattccagacactgggactcaacccaccaactttcaatggcattccaatctctgggactcaacccaccagcatttcaatctctgagactcaattctcaggctttccaatcgctgggactcaacccaccagcatttcaatctctgggactcaaatctctggcattccaaacactgggacttaacccaccaactttcaatggcattccaatctctgggactcaacccaccagcatttcaatctctgggactcaacccaccagcatttcaatctctgagactcaattctcaggctttccaatcgctgggactcaacccaccagcatttcaatctctgggactcaaatctcctgcattccagacactgggactcaacccaccaactttcaatggcattccaatctctgggactcaacccaccagcatttcaatctctgagactcaattctaaggctttccaatcgctgggactcaacccaccagcatttcaatgtctgggactcaaatctccggcattccagacactgggactcacccaccaactttcaatggcattccaatctctggggctcaacccaccagcatttcaatctctgagactcaacccaccagcatttcaatctctgggactcaacacgccagcatttcaatctctgggactcaaatctccggcattccaaacactgggactcaaccccccagcattttaatttgattccaaatctctgggactcaacccaccagaatttcaaactctgaaactcaattctcagggtttccaattcggtggaacccaacccaccaacatttcaatctctgggactcaaatc

SEQ ID NO: 44300 - DNA, 357 bp, Heterodera glycines
cgaaaatgataaagaatgtgagatctttctgggatttttatgaataaagacaatggattttccaattttaacacatattttggcaatttttttttagcatacatttcagcattttttggcacatattttattgcatatttcaggatttttagtagagtgcgccgggaccgggaccgggccaggaattcccggtcctccgaggtcccggtcccggtagggcaaccgggaaccgggaaaaacaagcactggtaagaatggaggtctgagtgaaaaattagagatgaaaattggagttaaagaaaaaaattttaaaaaatatattaatatattctttaaaagtagcactaccaactgtga

SEQ ID NO: 44301 - DNA, 933 bp, Heterodera glycines
ttccgcaactcaattgtctgtgaccagtaaagctgtcacaacatttttgctcagctgcttgacaaacattgtgctggctgtgaatgggccagtgctttacataatgaagtaaattttagaggaaaaatataaaattgtaaattacaatatttagaattttttttctcttgaaaaattgacgtgagaaatataaaatagtgtataatatttttttagtctacttttaacaatgactaaaattaatcattaaccaaattaaatttttactcataaaaaaattgtaatttcgataaattgcaatgaactagagcttgtcggaaccgggactggttctgaaaaaaacgagtacaactgagtacccagtcccggttttgaccagttttgaccgggaccgggactagtcccggttttttcccggttttcccagccaaaaaatcccggcttttcaatccgaaaattcccggttccagtttttgtcaaaaatcccggtcccgaccagcacgacaatgaactcttaagtgccttattaattattacatgataaattaactttttttaagcatggaatatcggaatgcatttcaaaaagtgttcaaatttcttcaaccaaccaattacaacacaacaatcatcggaacgcaacaacaacaatgggcaattcgcgtagcaacagagaatgttcagaattgaatttaacgattaaatttaattttccaaatttccaatttaaaaattgtttttcatttttatatttttgcaatttaaaataaattatgaaataaatacagaaacggagataaaaggaagggacaaatataattaaaataaaatgaattaaattcattaatttaaataaatgttatccagcagatgctacaataaaagagttttgattaaaaaaataggtttttttaatgatattaactattttta

SEQ ID NO: 44302 - DNA, 1336 bp, Heterodera glycines
  unsure (1)..(1336): unsure at all n locations
gggttgggaattcttaatcatttccctttttctttcactgctgtcatattcctttttcagatggattctgagggtgaattgaagcaattacttgtgaattgtctttccgcttcgttttttccgctgaatgcgtcgccgccggcggtccaatcgcgaaacaccgccccttttgcgatgacaagcgcaagtgacgcgaggggttcgcattgcgaaatgaatttaattgaaaaaagagtcttacgaattaattcggcaaatttccacgattttacccagaaaccttcaaattcattcgttgcccttttcaggcgatgccgtttcactgctcgtcgacaaaatggtgcacaggtgggccacacccattcactcatttgtctaattgggttaattagccaaattccgcttcggtccgcttacattttggcctatgaatttgtggacatttacgctgaccaattgcataccaatcgcaactctttcactggtcccttttcaccattaattgccagtaattaattttttttaattagaaactcaaaaaatcgatgcgtccaattggtgttcggaattgaggggatattttgcgcagtttttgcaacaaattgtggacggntcgcgcccgttgcctcgtctgtcctcctccctttttcgtctcacttttcgtccctttttcagcttcgcttttcgcccattgccgcgtccttccattgtctttttgtgcccagaaaaacagaaagccaaaaatggaggaccgccaccttttgctggtcaattaaattaaaacgggggaaaggggacaatttgcatttcgttcggttcattgtaatcttccatttttattttcttttaagccatcattggacatcgtcgagccggaaatttcgcaaaagctttccaaaaaggtcgacccatcggcggcacttttcgccgttttcgacgggcacaatggcgccgaatgtacgctggccattttttaaattctacattaattggggactaattaattcctcgacaatttccattttaaggcgccacttttgcgagtgcccatttgacggagtgttttttggacgcttttgagcaatcggacgatatcgaaaaaatattgaatgacgcatttgaacgactcgacaaacgcataacagaaaaatgcacgagtgaggttggaattgngaaagggtggggggggaaggaccctccgaccccttccgtctttctttctttctgtccgttccctgccatttgcgatggaatttcattccctccttagaacatcaaaagcggcaccacggttagctgtgtttatttggagggcacaacatctgcttatttggcg

SEQ ID NO: 44303 - DNA, 772 bp, Heterodera glycines
ttcttgaaagtaactctagccgccaaaattattataataatacttatttgaaagcacaaaaaaacgcgattctattgcacattatgagtccaatcaattaatcctacctggttattatattcgaaagcacaaatcataatacgagaaagagaatgctaacatttaagaaaagttacaaacgaaaataatcaacaattacttaatgatcatttatctttttttgcaattgcccaaacgctgagattttatatatattaccttctacagactttgtgctttcgaatgatacccaaaagcttcgaacatgagcaaacttattgtataaaaaccaactatgattaattgattggactcataaagagcaatagagccaaaaaagctacaaaaaatgttaaaacaaaagacagcttttctaggaattacattttattggagaaataaactcgacataagaggtgatcctgttctgcgttcatttcaccaaatttctggtcagaaatactttcaagtatttcattcagcgccgtaatttcgtcaaaaagctcattgtcgttcacttccggatcaatctgttcagccaaactcatcacttcggcgcgagaaacttttttctttgagagaaacccatgccaaatccgttggaaagcgctcaacgcggaaccatttatcgacataggtaagtgttgatttcagaaaagtctaaaaataagaaaagcttaaaaaatctccagattaaaaatgtgcgctgggcaccccaccggaatgaggttgt

SEQ ID NO: 44304 - DNA, 996 bp, Heterodera glycines
aaaattttcaattttttctagtctaatctactcaaaacgggtcagaattcaataaaaataacattcacggtgcgaaaaatggggtatgacaagtttattgggggaaaaaagactttacaaaataatacccctgggagaagggagtgggaaacatgatttcaaaattttcaattttttctagtctaatctactcaaaacggttcagaattcaataaaaataacattcacggtgcgaaaaatggggtttgaaaagtttattggggaaaaaaagactttacaaaacaatacccctgggagaagggagtgggaaacatgatttcaaaattttcaattttttctagtctaatctactcaaaacggttcagaattcaataaaaataacattcacggtgcgaaaaatggggtttgacaagtttattggggaaaaaaagactttacaaaataatacccctgggagaagggagtgggaaacatgatttcaaaattttcaattttttctagtctaatctactcaaaacggttcagaattcaataaaaataacattcacggtgcgaaaaatggggtttgaaaagtttattggggaaaaaaagactttacaaaataatacccctgggagaagggagtgggaaacatgatttcaaaattttcaattttttatagtctaatctactcaaaacggttcagaattcaataaaaataacattcacggtgcgaaaaatggggtttgaaaagtttattggggaaaaaaagactttacaaaataatacccctgggagaagggagtgggaaacatgatttcaaaattttcaatttttttctagtctaatctactcaaaacggttcagaattcaataaaaataacattcacggtgcgaaaaatggggtttgaaaagtttattggggaaaaaaagactttacaaaataatacccctgggagaagggagtgggaaacatgatttcaaaattttcaattttttctagtctaatctactcaa

SEQ ID NO: 44305 - DNA, 1012 bp, Heterodera glycines
tttttgacaaaaaccctcaaatttttcagattctccgtaaaattctcagtttcttttctcttggttttcctgtaaaaatactcgtacataatttacttggatctaatttttcaacaaaaataaaactcacaatcagtcaaactcattggttttagggaaaatcttcaatttttcattggtatttttcctgtaaatttccacttttttttctcttggttttcctgtaaaacctacatatgtatatacattttctcttttaccaacaaatttgatggttgaaaacccgctaaattcataggtttccggcaaatccctcaattttcttgatttttttcccctaaatttcccgacatttctaatttttttttcaaaatgcctcatttctccccccccccccaccccagcagcaaatggtaccagcaacaaatgcccgttgttgcccatgccgtgcacacccaacagcagcagttggagcaaagggatgccgtcgggctgtccatggcctcggctgagccggcggctgacgactcggatggcacaaatgtttttgtgcggatgccaacgcagcggcaccaccaccaacgccaacaacaacaacaccgcctgacagatcccgctgaacagttgaagtttgttgtttttggatggagtttatgtggtccaacaaaaaaccaccctccatacattataattggggaaaaaatttgggaaattttggttggatccatgcggggcggactattttttttttttgaattttttttaaatgggtgcattttttgagaatttttcaccgccgactaccagagacggtcccaggaatccccaatacccctccacacactcgaaatatctaacaataagggaaaaataatatttgttgctgaaaattttcaattttctttgttggtatggcctccaaggtcttcctcacccaacaaaaaattacgtgaatttttttttgaaaatccacaaaattagcaatgtttggtgcaaatatgttttaaaaatg

SEQ ID NO: 44306 - DNA, 1306 bp, Heterodera glycines
aaaaaatggattaaacaaaaatggcaattttatttttaattttaaattcaaatggcaattggacgccgttcatattacggttacgcgttaacggtaattttggagcatttgaattaaatgtgagccacccgcttataattgaatttcatttaaatgatgctataataagagacaataaaatcgcccgaataaaaaataaaacaaaaagttttttttttacaaaataaaattataattaaatttataactaaaaaacaatgcgcttcaattgtatcggtattgtattgcttgctgtatcatgtttgggtcatattgtgtgttctattaaaatacaatcgttattatgtacatacaatatcaggaacatgaatttaacattttgttttaaaatacaaaaaaaaatgaaataaaatttttatcaattttaaataatttttattcgaaaatgttaaaagttttataaaaataaaaacctttttcagattcattgtatggcactaaaattctttggggttcaaaatgtccaaaagaatgcctatttttcaatttccctaaaaatgccggtgccatcgtcatctctctccccctcctcctcttcctcctcggtgaatgttggcaacggcaccaacgggggaaggggtggtcgtcggctgctcatttccatggacggaaaattggacatgtagaacagtgaggtgtcgggatggccaaggggtggcaccgtttcggaccggcgcattgccatcagtccaatttgtgccgggttcgtcgtcgctggcatggaaccgccggtgcaaatgccaccggcggcggcggcagtcgacgacggcacggaaagggaccagcaggaggagggcagcgcagtgtccataaaggacaaatcggggtctgaatatcggcattttccgtcccaaatcccggcatttttccgtcttaaatccaaggcatcttctcaccccaaatcctcgacattttctatccccaagtcttggcattttcagtcccaatcccggcatttgcttgccacgaatcccagacattatttccccaaatcctgcattttctagccccaatttttggcattttctagtcacatatcccggcattttctcgtcctattgcttcaaccctggtcccaaaaatccacccgaattaatgccggatgttgtgctgtccggcagctccgcttcatctgctgttgttgttactgttgttggcaatggtggtaatggatagttatagcatttccgtcgaagcgacgacccatcgccgacgacgggcgcaaggcgcaggcgctgctcatcgt

SEQ ID NO: 44307 - DNA, 952 bp, Heterodera glycines
  unsure (1)..(952): unsure at all n locations
accaanttttgccgtaaaaaaatgagaaaaaagagatacccttttttggtcaagaatttttttgtttgcgtttcaaatatcgtaagattgtttgatagggccagacaagagaaggcaactgttggtaccaattttgcggtaaaaaaatgagaaaaaagagatagacattttttggtcaagaattttttttgtttgcgtttcaaatatcgtaagattgtttgatagggccagacaagagaaggcaactgttggtaccaagtttgcggtaaaaaaatgagaaaaaagagatagccattttttggtcaagaattttttttgtttgcgtttcaaatatcgtaagattgtttgatagggccagacaaaagaaggcaactgttggtaccaagtttgcggtaaaaaaatgagaaaaaagagatagctattttttggtcaagaattttttttgttgcgtttcaaatatcgtaagattgtttgatagggccagacaagagaaggcaactgttggtaccaattttgcggtaaaaaaatgagaaaaaagagataaccattttttggtcaagaatttttttgtttgagtttcaaatatcgtaagattgtttgatagggccagacaagagaaggcaactgttggtaccaattttgcggtaaaaaaatgagaaaaaagagataaccatttttggtcaagaattttttttgtttgcgtttcaaatatcgtaagattgtttgatagggccagacaagagaaggcaactgttggtaccaagtttgcggtaaaaaaatgagaaaaaagagatagccattttttggtcaagaattttttttgtttgcgtttccaatatcgtaagattgtttgatagggccagacaaaaaaaggcaactgttggtaccaagtttgcggtaaaaaaatgaaaaaaaagagatagctattttttggccaagaattttttttgtt

SEQ ID NO: 44308 - DNA, 1094 bp, Heterodera glycines
ttgatttaaagtttgtttttattagttctttatcgcgttgattccataattttgttaccctcccagcaaatggaatgaattttttgcctagtttgtattttgtgttaaatctgtaaaaggggatgttaaagcgtgctgatggattaaatatagaaaatagtttcagatctgttcggccataaacaattttgcgccatgaacagatcaaaaagcttacgcctattctcaagtgttggcagttgcagctattctaaccgattttagtatggaattggtggaaggctacatttaaaaaaacccttttggtgaaatatttttgacacttcaatttttataatatttttttgaagagacggattccaaacctccggagcatattccaataaaggcctaatataagttttatataacgtaatccaaatcttagacgatttggatttaattattctaaacaaggaacgcatacgtaaatacgcattccttgttatttggtttacatgaacggaaaattgtaatttattatcaatgtttactcctaaatccctaattgtatccacagcatttattgtattcccatcaaatttatatgtttcttttgggtttttggaacccaaatatgtataatataaaagttttttgaattgaaacttttatttgcccattcgaataaattgtgcaatgctttatgcatagtttctgtatctgctcttgctttatagcatatataatttaacatcatcagcatataatttaattcttactccagagggcaaagcatcaggaagatcgttaatatagatcaaaaataataaagggcccaggacagagccctggggaacgccagagccaacttttttacttgaggataaagaatccccaattttaactcgaaaagtcctattacttaaaaagtcctttatccacaataaaagtttgccctttataccaattttttccaatttatataaaagtaaattatggggcactgagtcaaatgctttttgaaaatcaatataaatacaatcaacactttttccattaataattgcctcgtagaagcttctacaactgttattagttgacttgttgtagac

SEQ ID NO: 44309 - DNA, 1012 bp, Heterodera glycines
  unsure (1)..(1012): unsure at all n locations
taacgtataaaatttctcaaaataagagatagtcaatttcttggatataagataaatttaaaaattctctgagaaattaaatggcgattgcgcaccgccctccctctcacgctcgagcgcttttgtaacgtataaaatttctcaaaataagagatagtcatttttcttggatataagataaatttaaaaattctctgtgaaattaaatggcgattgcgcgccgcacttcctatcaagctcgagagcatttgtaacgtataaaatttctcaaaataagagatagtcatttttcttggatataagataaatttaaaaattctctgagaaattaaatggcgattgcgcaccgccctccctctcacgctcgagcgcttttgtaacgtataaaatttctcaaaagaagagatagtcatttttcttggatataagataaatttaaaaattctctgtgaaattaaatggcgattgcgcacctcacttcctatcatgctcgagagcatttgtaacgtataaaatttctcaaaataagagatagtcatttttcttggatataagataaatttaaaaattctctgagaaattaaatggcgattgcgcaccgccctccctctcacgctcgagcgcttttgtaacgtataaaatttctcaaaataagagatagtcatttttcttggatataagataaatttaaaaattctctgtgaaattaaatggcgattgcgcaccgcacttcctatcatgctcgagagcatttgtaacgtataaaatttctcaaaataagagatagtcatttttcttggatataagataaatttaaaaattctctgagaaattaaatggcgattgcgcaccgccctccctctcacgctcgagcgcttttgtaacgtataaaatttctcaaaagaagagatagtcatttttcttggatataagataaatttaaaaattctctgtnngaataaatggcgattgcgcaccgcacttcctatcatgctcgagagcatttgtaacg

SEQ ID NO: 44310 - DNA, 999 bp, Heterodera glycines
actaaagcatcagagtgctaaaattaagtgctaaataaaatttggtgcgctgtagagcactgtctgaaaaaaatatttatgaaaaccaaaaaaatcgattttttcaagtgtccgtttggggtactcaaacatttatggggagcaaaaatccaacgcagaattaaagtacaggctatagggaagctattcccgaaggattcggtctccccataaatctgggcgcatcggttcggggggactgccccgaaaacaaaaaaatcgattttttcaagtgtccgtttggggtactcaaacaattatggggagcaaaaatccaacgcagaattaaagtacaggctatagggaagctattccggaaggattcggtctccccataaatctgggcgcatcggttcggggggactgccccgaaaacaaaaaaatcgattttttcaagtgtccgtttggggtactcaaacaattatggggagcaaaaatccaacgcagaattaaagtacaggctatagggaagctattccggaaggattcggtctccccataaatctgggcgcatcggctcggggggactgccccgaaaacaaaaaaatcgattttttcaagtgtccgtttggggtactcaaacaattatggggagcaaaaatccaacgcagaattaaagtacaggctatagggaagctattcccgaaggattcggtctccccataaatctgggcgcatcggttcggggggactgccccgaaaacaaaaaaatcgattttttcaagtgtccgtttggggtactcaaacaattatggggagcaaaaatccaacgcagaattaaagtacaggctatagggaagctattcccgaaggattcggtctccccataaatctgggcgcatcggttcggggggactgccccgaaaacaaaaataaatcgattttttcaagtgtccgtttggggtactcaatcaattaaggggagcaaaaatccaacgcagaaataaagttcaggctata

SEQ ID NO: 44311 - DNA, 1246 bp, Heterodera glycines
tcggaaatatttaagaaattaatacgtgcatccataataagtaattgtgtatcctaaattttgacaactttctggccaaaattagaaaataaccttttgagccttattaataatttttatttatattttacccgggctctaatcgcacaaacgttggtaccgttatttgcattttgggcacattttaagatttttggatttctaggtatatctgagctaattttagagcgtaattaaaacgcatatgtactcgttttgatagtgtacaagaaaattcacttttttttgacaagtatgataaaaaagacatctttcacatttactaattcagcgtaaaaatcaggaaaaaattgtgagcaaaagaaaatccgaccgggagattccgattctaaaccttaccaatgttgtatattatctacaatagttttacccaggttatcgtatttaattgttaaataaacacgataataggatttaattctgagtttattataatacaaatttttctaaatataattttattttaataatgtttgattgtttgtttataatatcactcaactatggtcaggaccatacgcgctcttagacttaaacctagcttcggcatagttttaatttaaagcctaggccgagtacggtacttccaatttttaaattttgtgtataatcatagatatacccatattaaaaaatggctttctcgtttccaaataaaatccacatataaacgcgattctgctggccaatttgctaacccaaaaaacgtctcagacgttaaggcattcaacggggcaggtgcatttattgtacatgcgcttataatcgacctacagtataaactgtatgaagtgagttttatctctgtaatgctacatgcatacattctgtattgtaaaccttaggcttgcccaaccgtagctaaaaatgggctattatgcaaccgtaagctgtccgaacagagactttgttcgagttgcggttttgctaccaaaaatccaacagatgctgttatccttcgacttgaacttcaagatctaatggataaagaatgccgccaaaatacaacaatgttcaccagcagtgctcaaaagtatcttggccgtaaagcaagcgaaatccggatgatggaacaggacggagacggggaagggttggctaggcttttagattccttcattggaaagaagattgtagccaaaataactattaaggtattatgctctataataataatcgactaaat

SEQ ID NO: 44312 - DNA, 1071 bp, Heterodera glycines
cacgctccaagtctcgaggaaatgttgcagtgatccaacgctatcgtccacaggtcggagattgatcagttcggactgaagtgcttcagcgattttccgtggatctccgaagagtcgcctgagtgcggcaacggcatgggcataattctcccctccacggtaggcggttacggcacgagcagcctttccgcgtaggcaaccgtggagatagttgagtttgtcgacgggctcaagggcggcacggtcgacggcactctcgaaactctgccaaaacgcgggccattccattggttcgcccgaaaaaacaggaagactgactgtggaagccgagcagtggcttgaggagcagctgccggcggcaaaattggcatattgtgaacattggcgaccggcactggaggtggcagataggcatgattggcagcagctggctgctgaagatttgcaccagcagcagcattgattgcaaccggtatggctggcatttgtggcatggcttggttcacagcagctactggctgctgtcctcccgctggcatgacttggttgggtggatttgcgagctctgctgctatgtgagccagcagttctcgcgcatcctccaaccaatccgtcagatgacggtcgtctctcacaaagttggcaaatagcgcttcttctgcctctcgtgccgggccttgaagtgcgttcatgattgtaccccatgcatccatttcagcttccatccttgacaggattcggatgatgtggtctcgttcctgcctcagggagatgactgtttgggcatccggatcgtcttcatccagcaagttctcggctgaggtgatgtgctggcgaagacggaaaagtgcagggccgagggccatccggcatcgtgcagaagacattacgaatcgctaacggcaccacttgtcgcacaaaggggatggacaacgaccgggaggggggggtgaccacgagggggcaccgaaagagccaaaaaagggcggcgaacggagagacgtgtgggcgagagactggccaaacgattagggaaaacgagcgagtagacggttagaaaagtgcgcttta

SEQ ID NO: 44313 - DNA, 689 bp, Heterodera glycines
gacacctaaagagattaggttcgtatggaatggcacagtcagacatcaatttcttttagatttttcattgataagttaagacccaaaaatgtcaaaattttcatttggttttccgtcaatttgcccatttctgagtagtttcgtagaatccataagggattacaaaaaatgaaaataaatcataaaattgcttaaagtcaagcaaatgagatgttcttggtatcattcgataatttgatttcttaacctgaaaaaatacgccaaattcaaaaacttcctcttggcgggttttcaaagcgccatgggtggatagcgaaatttaatcaggcactgacgggtctttggcatgacatggaacccaatctcccctctctgctatccacccttttctggttctgatcagtgatcactcctcccaatttccttccgcacagtttgacacgtccaaagcgtcgctactacgaccgggtggaggacttgccgcagaatgttgttgcccggtggcgcaaggagcgcgagcagttccaaccaccgaccgacccatatgttgggaaagaagacgaataatgagcacggaagggagaggattggatgattgataattagtgaccatgaggatggtgttgaacaatattttaatgaattaatgaatgtaaatgctaaaaaaatgcgccacaaaatttaatttt

SEQ ID NO: 44314 - DNA, 1021 bp, Heterodera glycines
taaatgttgcctaaggcacaaatgctgtggggaactcagcactggggatgctgaacctaaagttggtggtggtgttggtatacgagtgagtggcgtattgccatggttgacaagccctatgagttcgtggatcggaactccttgcctggggaccagtgtgcttgcattcgaaaaaacacgagacataagcgcccgaaggcctttggcctgaggaagtgtcctaaccgggaaatccggagtgctcgtgtgagtgcctgtgcactgccctcggagctgtgtccagcggcgagatggttcttcccaagtccgggaagctcggatgcctggccagcgctgtgtcattaccacttgctcggtcgccttcgccgcccatgcgcacgcttgcgctgaacggagttgtttctgctgaaactatccgtctttacaagacggctgtaatagcggcgcttggcaacgctcgctagcagctatctggttgatcctgcctgaactgatgtgttcatttcaaagattaagccatgcatgtgtaagtttaacctgccagacagggaaactgcgtacggctcattacaccagctataatttacttgaccttgacttcttacttggataactgtggtaattctagagctaatacatgcaccaaagctccaatctccccagagcggagcgcatttgttcgccacaaaaccaagcgccctccgggcgtccagtgttgactcagaacaactaagctgatcgcacggtcttgtaccggcgacgtgtctttcaagtgtctgccttatcaactttcgatggtagtgtatctgactaccatggtgatgacgggtaacggaggataagggttcgactccggagaaggggcctgagaaatggccactacgtctaaggatggcagcaggcgcgcaaatacccactctccacgcgaggaggtagtgacgagaaatacgagaccgatctcttatgaggccggtcatcgggatgggtacaattaaaacccttacgagtatctatgagaggg

SEQ ID NO: 44315 - DNA, 1177 bp, Heterodera glycines
tttgcaaaacaaaaggatcccccctttgtttttgatagaattcaaaaggttgctctttgcaaatagcgcccatatttttcggggttcgaaattggttgaaattaatgccatatcatgaccagcgcccctgaaagcaccacaaaaaccgctcataactagggatgcaaatatttgaaatttttccaaaacctctattacttactaaaatttaataaatattataaatttagggagggaaaaattacccctcaattcggaaaatttatgtccatatttttgcatccctactcataagctcataactcccttttttcctctttttatgggtaccttttttacttatttatgtaatattttgtgatttttttgcgtattatttctagcttgtttcttaacaaggctctcgcccagagtttaggccccatatacaaaaatttttacatttcagaaataaaagaagccaatctataggttttcggggtcgcttccggcatcaatttcggccaatcccaaatcccggaccctaattcgaacaagaagtcgtaaaagtaaaatttttttatttttcatttttagtctaaaaatggtttaaatgatttttaattgaagcactgatgactttcaattcaattacgagcatttaaacatttgttgattaattaaaatgatgattatattttcaatgatatgaggtgtagaatatctcatagaatggcgctctacagagatggaaaaagaagggggctttctctactttgttcgttgcagcatgaggaaggaatttgcattatatttaggtatatatcgaaaaaattatcgccaatcaaaaaagaatagagataaatgactagatgaaattataaaaatttacgagaaaaatcgatattggaaattaattttctctcttgttccctatccaatgatagatttatcgattaactttcagactaggctaatactcgcattgattactaaaactatttgatttagcttataaacagatgagccaaaggaacatatattatatgattgtagacggttctaataaaatccccgagggtatggcggtgcccgctgacatcctctattttgacttgctccctttaatctaagacaaaaagaaatttgttggaaaattagatgacacagataaatttatagacgcgaaaattaatgc

SEQ ID NO: 44316 - DNA, 983 bp, Heterodera glycines
  unsure (1)..(983): unsure at all n locations
actagtaaggtttgtatcccccttttgggtaaaattttttcaaaatttttttttcttttttattgtcgcaattgctttaaataacaaataaaaggagatttatgtgtttattgggtacaattcagcgatttgagaccacaaattataaaaaatatccggtcctccaaattgcttacgccacaaaaaatcagaaatgtatgtggaaaaaagtgatctgtgagtgccaaatctcgctttatgttcatgtttgaacttctgccacgtcgattcaattgtattcgtatgctggccagttccaaagcggttgattccggtctttaatccatttgtagctcatttcgttgccacagtcacaaaaacgagtggtgtgtagaagcttaagttctctgagccattcttcgaattctttgtctggtagagccaatactttgaataaatcgtcaagagtgaaatttttaagcttttccattaatctaaaaagcaattgcgacaataaaaaagaaaaaaaaattttgaaaaaattttacccaaaagggggatacaaaccttactagtaccgaattttttaatttattctctatgccagaaaaatggttatctcttttttgcgagaaattttgtaccatacaaatgttcccagcatgggcagaggggcgcggagagcaatggccattctattctacagggaatttttaaatttattctctatgccagaaaaatggttatctcttttttgcgagaaattttgtaccattgccgttcggtcccttcccaagggggtggaatggagagaagggtgggaggcaaacaagaagtgggctgttgtttgaataacggcaccaccgactncaatttgggggaagaagccggtgctcccaggttcaactgcctaagtccgagcactcctgtcangcacttccggcgtgccaactcctgtccgatcgtgggcgctccggagtttcactcccgtttcccctttcgct

SEQ ID NO: 44317 - DNA, 794 bp, Heterodera glycines
  unsure (1)..(794): unsure at all n locations
agcaaattatttttttcatagacaactttcaataatagattttgaaaagaacacgattactttttggaattaaattttattttcactaaatcaaaagcaggaattattagctttttgaaatctatcagaaataaccccaattttgatatgattgacaaatttttcgcagtgttaaaattttttgaaaatttttggcgacaaattaatgaatgaaacaaaataaatattatttcctaataagaaaaaataaatttttaacaattgtccagccttgaacatattaagcgttgtctttcaattccaagtggtggcgcgtggtcagatttagtcgcagtcggaaatacctttagaatatttcttattgaattaccaaggcattaaaatataaaaaaaataaaattactaattaagttaaataattgatcatttatttcttatataatccaaccggtccaacgcccaaataatcaattttatggccaagtcgaatggcatgttccaatgctttttcattgttcactgaatagcccaaaattgcatcggggccaagcagttcacgtgcagactcaaccggcaaatcgttggcacccaaatgcactccgtcagcgcccgaggccaggcaaacatcgacatggtcattgataatcagcggaatcccttttggcctaaatttgngtaattagcacacaaaatggccattgtttttcatttgccggttcattcatttcactgatttcccccattacacccagaaaacttttggggttttgaggctcgctaaaattaaaaaattt

SEQ ID NO: 44318 - DNA, 1079 bp, Heterodera glycines
caaacccgggaccgggaccttttcgggttgaaaaaccgggaatttttggctgggaaaaccgggaaaaaacccgggactggtcccggtcccggtcaaaaccgggacctcggtactcagttgtccgtgttttggtcccggtcccgctctactctactttaaacatatgctatttcaattttggaacggaatacggtattttatcgaaaataatttaacaatgaaaatgccgacaaattccaattcaattttttccccaattatttttctttttttcgttcactttttatttgcatttttttgataaatattttgtttcttattattctcattggttttcaattagtgctgtctttctttcttttctttcgtccgttttcattcgctttttttcgcttcgattttttcccctcccaccgccacgtctttgtagaacaaattgccacgttcgttctgttccgcctcgatgctttcgaataacgctttgaagttgccggcgccaaagccctggggggaattggtcattttggcattggcaacctaacgccgacgacattggcattgtgcccacttgcctggtggttgtgccgttggatgatttccaggaaaagggtggggcggtcttggcatggcttaattattgatcaattagtcctcgttcattcattttcggtttttcccttttcgtaaatttacctttgaaaatatttggagcaaatagccctgctcgtcaaaatcgaccagaatcttcagctccctcagtttctccaagtcctccttcaactccacgcccgcgtcgctcagccgctgcttcagagacgcgtagtaactgtccgggatgctcagaaactccaagccgcgggcgcgcagcgattggatggcgtgaacaatgtccgaagtgttcagagcaatgtgctgcggaaggaaacggggcgggcatcatcaaagggacagatgagacaagaagcagaattttttgaattttctccggccgagcagcgcatttcggcttcttcggaatgccaatcctttgatgtttaaattcctccgctctctctctctctctttctctctcactctca

SEQ ID NO: 44319 - DNA, 1846 bp, Heterodera glycines
  unsure (1)..(1846): unsure at all n locations
cagtcgctttaaccctccgctcgtcatcgttcgtctgaccagtgttgtctcactcgctgcccgggagagagttgcggctgaggggcgcgtgcgccgggtgccgagtcattgacgcgctgcgcgcgtgctgtccgattncgcgtggcacgggcggcggcacttccccnggggggcacgcgggcgggggtgcgggtagcccgcgatgcgcctccctcgtggggcgggcgactgttggtagtgcgccaacagcggcggacagttgggagcctagcggtcgggtcctccactggcctggactgtcccgaccggtgggcacgcactgcgcggctacggccgcggaagtgtccggctctcagtgtgacttggaacgcgcgtttcgcccataaagaagcgcttccgcgcctcgatgaagctggcggtcgatgcatatttttttaattttatgaactgattgatttaaattaaataatttttaaaaggaagtaaaataaatcaaattttattaaattaattcttgcttattgggtattttttaattaaaaaaataaaattttacaaattctgcacaaatgtacttatccgaaggagaagaagcttcgttcgaaggcgatggcggcgccgtcgatccggcagcagcagcagcagaagaagttgattgatttgacatttaaataaattttcgggtctattatcacttaaactcggatttttagtgctaaaaatcatgaaatatgtgttaaaaaatgctgaaatacatatatgtgctaaaaaccaaaaaaaaatgtcaaaaatgtgcgaaaattaaaaaaatcaattgtatttataccagggatgcgatcgaaaatttttcaaaataagaacattgagcccaaaaaatcagattttggggtcgaaaatcaggacattttgcttcattgcttcaaaacagttatttttacaatttattcaatcaaaaatgtattaaatattatattttttcacctcccattaacgattttaacaattttggggaggaaattagcaaatcgtaaattttaatgcaattttttagcggcgtaatttttccaaaaaacttctgaggaatgggcgaggggagagggtccggcggtgccattaggcaccccggaaaattttttttagattttcaccaaaaaaggccaattttttcaattaaattaagtcaagcgacgacttttttgctttaaaacactttttttgcggcgcgtttttaaaaaaattttggaggatggacggagggtccggcggtgcctataggcgccgcagggaaaaatttttgcgatttttaatgcgatttgttaacagatttttgtcaaaataaccaaattttgccacaaatcttatattttcttaataaaatagtgacattatgccatacaatttcaaaaatgtgagtttatttaagaaatcaggacaaaattttcaggacaaatctgataaatcaggacatttttattttatcagatttggaccctccaaatcaggacaaatttgataaatcaggacagatcgcatccctgcagtactatcacatgttactttttggggaacgggaaatggcgttggcattggccaaatgccatcagatgtaaggaataagctgactggcggttaaaatctggaaagcggaatttacgagacaaggaataatttttaatgataaacaacaacccaaacgaagtacattctttaaatcaacattatatatttttaataaggatagaaaaggntgagggggtgtttatgttccctttatataaataatgggatatgcnttntttccctcggcagaagaaattgacaaaaaaaaattgatcgccgatggacg

SEQ ID NO: 44320 - DNA, 1072 bp, Heterodera glycines
  unsure (1)..(1072): unsure at all n locations
taaaaaacttttgggtatggaattattttttgaagtgagtcaaacaccgtattagtgctttgctgtgccgagaaccgacagacaatggatagctttaaatctgcaagaaattagattggcaataagtggttgtaaaaaacttttgggtaatgaattattttttgaagtgagtcaaacacctctattagtgctttgctgtgccgagaaccggcaggcaatggatggctttcaatctgcaagaaattagattggcaatatgtggttgtaaaaaacttttgggtatggaattattttttgaagtgagtcaaccaccttattagtgctttgctgtgccgagaccggcaggcaatggatagctttaaatctgcaagaaattatattggcaataagtggttgtaaaaaacttttgggtaatgaattattttttgaagtgagtcaaacaccctattagtgctttgctgtgccgagaaccggcaggcaatggatggctttcaatctgcaagaaattagattggcaatatgtggttgtaaaaaacttttgggtaatgaattattttttgaagtgagtcaaacaccctattagtgctttgctgtgccgagaccggcaggcaatggatagctttaaatctgcaagaaattagattggcaataagtggttgtaaaaaacttttgggtaatgaattattttttaaagtgagtcaaacaccgtattagtgctttgctgtgccgagaaccggcaggcaatggatggctttaaatctgcaagaaattaaattggcaataagtggttgtaaaaaacttgggtaaggaattattttttgaagtgaatcaaacaccctattagtgctttgctgtgccgagaaccggcaggcaatggatggctttcaatctgcaagaaattagattggcaataagtggttgtaaaaaacttttgggtaatgaattattttttgaagtgagtncaacaccctattagtgctttgctgtgccgagaaccggcaggcaatggatggcttcaatctgcagaaaatagattggcaatatgtggttgtaaaaaacttttgggtaatga

SEQ ID NO: 44321 - DNA, 1006 bp, Heterodera glycines
gatcattacccaagtgattcctattcaccacctacctgctgtcctgttgggctagcgttggcaccaccaaatgcccccgtccgctgatgggcacaggtcgttcgagatgacttgtggacgctgcccaacattacggggcagctgcctcacgagccatgcttttggggtgcttccatacgttggagctgtggtataccgctcagtgctgcacgtgtgaaagcctgtgtatggctgctgcgtggcaatgtgtcggtggcgggccgcctcgcttggctggttcgctgcgccaatgtgggatgcacgctcgtggggcgacctaacggctgtgctggcgtctgtgcgtcgttgagcggttgttgtggcaggcacataacacactgactggggatggtggtttcgttcccggtcttacgtgccgtaactagcggtgtgtttgtgcttgctgctacgtccgtggccgtgatgagacgacgcggtagtgcccgtgcttggcctagcacgtggcttaagactcaatgagtgtcagctcgggcaccgccagctttttctttttttttcattatttttttttacacttctgttgaagaatgaattctagtcttatcggtggatcactcggctcgtggatcgatgaagaacgcagccaactgcgataattagtgcgaactgcagaaaccttgaacacaaaacattcgaatgcacattgcgccattggagttacatccattggcacgcctggttcagggtcgttaccataaaatgcactgcttgtgcgttgcttcgtgggatcatgtacttgtacgtgttctcacgttacttgctcagctcggctgtgggggttttggtgtgctggcgcgaacttgtgagtctaattcgcgttttacggaccgtaactcaagcgcacccatgctttgcatgctgtggcggagtgcctggattactggcattcctgctttgatttttcgacctgaactcagacgtgaacacccgctgaactaaagcatat

SEQ ID NO: 44322 - DNA, 1624 bp, Heterodera glycines
  unsure (1)..(1624): unsure at all n locations
aaattgaatttttttttttattgnttggtatttaaattaattttttaattaaattanaaaatatgtanttaattacaataattacctgctggtcatcacgagaacacgaatgtgtttgcttttgtactgcctattaaaattgaaaaaaataaatcaaatagcaataaaatatttattcattttttttttacttttcgaagtagtcggtgatcgtatcttcgtatgcactgtaaaattgacaaattaaataaaaagtatttattaaattaatttcttaattaaccttatgtcgtcatcggtccacctaaaaattggaaaattaattaggtaatggaaatttgcaaataattaatggagttaattatttttcatcattaattagttaattaattaccctctcgtcttttccgctcggtaccgtatgacgatggactcaattttgtccatgttcccaaacttgggcttgctcgtcttcgacacatgaaccccgtagaaatttggctaaaattttgcaaaaaattttacaaaaatttcaatttttaaccgacctgtaaattgacttttctgcccatgatcaatgaaaatgggtagtcaagtttgatgcggtcattcagcggttcgtgtttcattacccgatcgtactggtcttgaaagccagtctaaaatttttttttttttgaaaatttaattttatgaaaaaaattttttggcttacataaaacaattggacaggttcgctgacgttgcaataaaagttgcaaatcattgaaaatgattcatcacggtcatgtttttgattgtagaaggtcaaattgtgccggacgaggttgtcaacctgaaacaaaaaaaaaaattttttgaaaaattcagcaaaaaaaaacgaaaattttttacatcgacagtttcgcgcaatgattccaaattcatcaaattgttgccctttttcggcaaaatcagcaacaaaattttgactccgagcccagtctgtccgaagaattcatcttggacagcaaattcgttcaatgaacgcgagccatacggtgtgtagccggtgatttgatttttgactctgtttaatgagggggaaaaataattacattaattcttaaaaaataaaacttttttttatttttaaataaaaatgttctttaaatcttaaaatatgttgtttatagataaaattgttatgatcataattatgattacattgatattaaatattatacatataaataattatttatttgaagaaaatgaaataaaaaattatttaattatttatttgcttattttaattaaattataattaatgagaatgaatgaagatattcgaaatttgattaattatatatattaaattaaaaatttttattattaaataatctattaaatttattaaaacaatttttttaaaagtctacttcgtgttcaacattttgaagccacaaattgcggaggcaataaagcagaggaccacaattttccatgtgtgtgccacaacaaaatgtgcccatcggctgtaggcacgtcgaatgtagcgttgtaaaaggtcggaaaggtcttcccttctgcttntttgcgnaagtgaaactgaaattttgaattttaaattttataattgaaa

SEQ ID NO: 44323 - DNA, 892 bp, Heterodera glycines
agcggccgagtgagtaccttcggtgcaggaaaattattaaggaagagagttcattatttatttattttttgcataattaattcataaatatttttttcagaaagggttctgaaacgcaccaaattttatttacatgttagtttaggcactcttatgctttttctatcaaaaagggagatgaataaaatttttaaaaatttttaattcctttttaaacaggccaaaaagtttaggcttaactttttagtgaaaattcaatcactcatttttcgagtagtgatcagaagcgaaccagattttgcaggggcctaaaaaggtcaaggaaaggcgtctctgcgttgatttagcagtagtacctatgaatttaaattttctatgaatttttaaagttttttgaaatttttttaagtgcaaaagtggtggtgtctgcaaaaaattttcattaaggaggagggttcattatttatttatttttttacaaaattaattcataagtatttttacagaaactgctctgaaacgcaccaaattttatttacatgctagtttaggcactctgatgctttttctatcaaaaagggagatgaataaaatttttaaaaatttttaattcctttttaaacaggccaaaaagtttaggcttaacttttttttcagaaacttatcagaagcgcaccaaactttgcagggatactgaaaggaagagaaataacctattttaaatattatctagtcagttcatttaaataatttattcaaaaaaaatttttttttgggttttcggggcagtccccctgaaccgatgcgcccagatttatggggagaaaattttcaaaattctgagtctcctattattttatttttttttcaaaatttgaagggcggggggggg

SEQ ID NO: 44324 - DNA, 945 bp, Heterodera glycines
  unsure (1)..(945): unsure at all n locations
ataagataaatttaaaaatntctctgtgaaattaaatgccgattgcgcaccgcacttcctatcatgctcgagagcatttgtaacgtataaaatttctcaaaataagagatagtcatttttcttggatataagataaatttaaaaattctctgagaaattaaatggcgattgcgcaccgccctccctctcacgctcgagcgcttttgtaacgtataaaatttctcaaaataagagatagtcatttttcttggatataagataaatttaaaaattctctgtgaaattaaatggcgattgcgcaccgcacttcctatcatgctcgagagcatttgtaacgtataaaatttctcaaaataagagatagtcatttttcttggatataagataaatttaaaaattctctgtgaaattaaatggcgattgcgcaccgccctccctctcacgctcgagagcatttgtaacgtataaaatttctcaaaataagagatagtcatttttcttggatataagataaatttaaaaattctctgagaaattaaatggcgattgcgcaccgccctccctctcacgctcgagcgcttttgtaacgtataaaatttctcaaaataagagatagtcatttttcttggatataagataaatttaaaaattctctgtgaaattaaatggcgattgcgcaccgcacttcctatcatgctcgagagcatttgtaacgtataaaatttctcaaaataagagatagtcatttttcttggatataagataaatttaaaaattctctgagaaattaaatggcgattgcgcaccgcacttcctatcatgctcgagagcatttgtaacgtataaaatttctctaaataagagatagtcatttttcttggatataaaattaatttaaaaatctctgagaattaaatggcgattgcgcaccgcacttcctatcat

SEQ ID NO: 44325 - DNA, 894 bp, Heterodera glycines
aaaaagttaagcctaaatttttcggcatatttaaaaagcaattaaaaaatttttaaaattttatctcacctccattatcgatagaaaaagcatcagagagccttcatctaactccgtaaataaaattcggtggcgtttcagaaccctttctgaaaaaatatttaagaattaattttcgcaaaaaataaataaaaacgaaagactcagattttcgaaaatttttttgagccagctagctcggcgctcatttcagtgtaagttagtcctttaccggggagtatccctgcaaagtttggtacgcttctgctcaattagcaaaaaatatgagtgatcgaattttcactaaaaaagttaagcctacattttttggcatatttaaaaagcaattaaaaaatttttaaaatttaataattttcccggcaccgaaggtactcactcggcctcttccgcctcgtggggggccttcgccccccccctcccacgcccttcagagcacgacaaatatttcaacaaaaattttgaaatcatgtttcccactcccttctcccaggggtattattttgtaaagtctttttttccccaataaacttgtcaaaccccatttttcgcaccgtgaatgttatttttattgaattctgaaccgttttgagtagattagactataaaaaattgaaaattttgaaatcatgtttcccactcccttctcccaggggtattattttgtaaagtctttttttcaaaataaacttttcaaaccccttttttcgcaccgtgaatgttatttttattgaattctgaaccggtttgagtagattagactagaaaaaattgaaaattttgaaatcatgttttccactcccttctcccaggggtattattttgtaaagtcttttt

SEQ ID NO: 44326 - DNA, 979 bp, Heterodera glycines
  unsure (1)..(979): unsure at all n locations
tttagcgttcataatgggatgtatatagacgattgtagaaggnaattgatgcgctaaaattgtttgagaagctttttgagcgtagttacgatttttacttacaccattttttgctaggcttagatcacatgcgattttcggcactctgataattttagcgctcataatgggatgtataaaggcgattgtagaaggaattggaagcgctaaaattgtttgagaagctttttgagcgtaattacgatttttacttacaccattttttgctaggcttagatcacatgcgattttcggcactctgataattttagcgctcataatgggatgtataaaggcgattgtagaaggaattggatgcgctaaaattgtttgagaagctttttgagcgtaattacgatttttacttacaccattttttgctaggcttagatcacatgcgattttcggcactctgataattttagcgctcataatgggatgtataaaggcgattgtagaaggaattggatgcgctaaaattgtttgagaagctttttgagcgtaattacgatttttacttacaccattttttgctaggcttagatcacatgcgattttcggcactctgataattttagcgttcataatgggatgtataaaggcgattgtagaaggaattggatgcgctaaaattgtttgagaagctttttgagcgtaattacgatttttacttacaccattttttgctaggcttagatcacatgcgattttcggcactctgataattttagcgctcataatgggatgtataaaggcgattgtagaaggaattggatgcgctaaaattgtttgagaagctttttgagcgtaattacgatttttacttacaccattttttgctaggcttagatcacatgcgattttcggcactctgataattttagcgctcataatgggatgtataaagggcgattgtagaaggaattggaagcgctaaaat

SEQ ID NO: 44327 - DNA, 967 bp, Heterodera glycines
caatggcgaaagaaatgagcaaaacgatcgaaaggaatacaacccaagagatgagcgtcagcttcaaaaacattcatctaaaaagaaaacgacaaatgaaagagacttaatacaatttgagaaaagactgatgtcgagggacaaaactccgaaatttagaaatataaaattaaaggagagagagggagaaaagaccggaccgaaatggggaacaacgtacacaaaaggcgggggcaaacactcatttgagggggggggggggggctgatccagtcggtcactcaaatgtaggctaaaaatggaacttttggtaaacaaagataatccggggaatgggattaggggatggtcgaaaagcattgtaaagggaaagggcgggggaggggggagagatcggcgagtgaccgcccgaaaatcccccaaattcttcgctatgaaatgacagcgactcttttgcttcggttgactgaagtgtttgttccccgtactcccttcttttgttggtgtgtacaaacaaatttgagtataaaaacacttcaggacggatggactcatggaaaatgcgggggaaaagggcgggaggcggggaaatgaacaatttgcgcggaggtgggggtaagtcatgtgttgagatcgttgaaaaacggtagtgcgtcgtgtgcgctgtccacactcaaaggagcggcactccagcgaagagatcactgtgggaatgggccagcctggccaagtccattttgaaggtgcctaaacggcaagggcccattgtgccgagttggcattgcccttcaacagaccgtcctttgcccagcgggccgaccaactgttgaccagcagcaaatattcctgctgtgcgttgatgccatcgctcggcgcatttggacgcctctgacggccccatccgatcactttggcacaatggtcgtacacgtgcaattcgcccgggaacaagtcgaagtcgtaaacc

SEQ ID NO: 44328 - DNA, 1311 bp, Heterodera glycines
aacaggcgggagtcccgcttcagggcgcagattcaacccatcacttcacaggcaagatataaattaagaaaacgaaaaacaggtagggtaaacttcgatgaaaaaaaaacgtagacattttctcgggaaccattcatttcaatactagaaaatttcagggaaacaaatgtagatgagtattcgtggttttcaacataaatctatcgtagccagtaaacggttttcaaaaatcttcaataaagattcggctcggagaaaaaaactcggtctttcagaggttaaatctaaaaaacttcaaatcggagcttttctccttcatttcgagtcaaaaaatttattttttcgaattggatcggtttattcgtttctccttcaaaaaattctaaaaaacaaaatcgggtaattcttttcgaaattggtgtcccaacgggaaaaagagataaaatttgcaaaatccgaactcggatttatgatcatcgcattttttactagcaaaagcgattttgtaagaaaatatttttttttctgtcgagacaccaattccgaaggattaccaacaaatttattgttagcttcaaatgttttggaaggagtctttccattgcatgtgaaaaaaaactaattttagtagcaaaataaaagcaaaatattaatgtaatttaattcggcctttgaaaattcacagtcctatttttcttcctttccgaattcagcaggggttcgatcgaaagaaacccttgctaaggctttcaaactttcgaactctaaaaatcatcaatttttcattcttatttggcttacagaaacgaaaaagcaaaagtattatattcagagtcctgttttttaacatattcgcaactcgggagctgttttttatacttatctctccgacacaagaagattgatttttttttttctttacgggctcatttttcgtgcttattatctacactgcgattcaattttgggctcccagtgcaaataagtttattatttatttagtaatcataacgccaaaactttgcaaaacttaaattttttgggattttcccttgtaaaaacggaagagccgatctcgagttaaaaagcgattttgataaaaaacgaagcatcatcctataggttgggttaaactatgtgtttatgcaaaatttcgaggaaatctgaccgtaggaaaaaatttttgactctagtgaaaatttaattaaatttctatcgttttttagctaattaattattttcttaaaatatgaggttaactgggacggattctccgagaattttcccatcaaagatgagccagaaaatggt

SEQ ID NO: 44329 - DNA, 1820 bp, Heterodera glycines
  unsure (1)..(1820): unsure at all n locations
aaaaattaaaatttttggccaaatttcatgaaaaagcggaaaaatattttaaagtggataatccanagttacgtggatttatttttattttacctttttctaataattctgtataaaaaaatttagttttttttataatttttgtcaagagtaaatctctttctctaagtgattttttccaaaaaaaaattgtttttttattcgtaagaaaattttctaaatttttccgaagaaaactttgtttgtcaaaaattataaatattataaaatcatttccggcttcggaggctaattgaaattcgaatcattaccgccgttttttcgggagagaagcaataaaaaagtaaaaacaaaaaaatagaattaactaaaaagaaacttttgatcggttaaatataaacatttcgaaatttcttttttttcaaaatttaaaacattttgctaatttcaacgacttgaactccattttcatcaaaatctttcaattaagtattgaaatacaaatacttaaattaaagaattgcgagggagtgcattaatatttaatttcgtctttttttgtcatttcttttttgttaaagttgctgtgaacgtcactggttacaattcggacaattatgttttgatgatctaatcctatgatatttagcgggagtttttgcttagtatcaaaaaacgctgaaattttcagcagggtggtcaatgctgttcccgcgccctctcacttcatttgcacttcatttgcacgagggattgccagccacaagtggcaaccgaaaatatattttttgcagtcatttttatccaactaattaactttttgttttatatttaaaaaattaaataaattattttctatccccttttttgaaataatttatctaaagttaattatttttcacaaaaaaataatgatgatggtgctgatgatcattgtgaaactgaccaaaaacatttgtcgagccactacctttcacgggcggcggcaaaaaatataggttctcatttatatcacctgcttcacaattacagctccatctgatatttgatccctcattctgcaacgcctcaaattttccacatcccacacggatgagatattccttgttattgtaacacgacaaggcaaccaaagagatgttttgatcaactgaaaaccgaatagactaagttgaaaatttttccaagggtgaatttttcggaagtaaaagctatgattcatgtaatatttatttattttgatgtaaaactatgcttcaattgtttaattggataaaaatgcgaaattttcgccaaaatttgaccggtttaacttatattttggagaaaaaatttttactttttgttcgaattcgaattcgtgcccagggttcgaattgggtaaatccaagctcagattagtaatcagcaccctcgaaaagccttcgagaaatgaaaaattttaaaaatcgtctttaaaattttttggacaatatttgaatttaaaaactaatgtaactcaatactggttttgtagaattttttttgaataaatttttttgtcattttacacccttaaatttgaggatttttagtgcctatttttccattttttagtgcctattttcggggttttttagagcctaaggcctacaaattttgacggtttttagtgcctataaatgtaatcccttttcataatgttgtatttaccacttaaacaagtgcctcttgtacaaatttggtcagtgggtttgcactgtttgatgacaaagacatctgcagtgctttcaattccactgttgttaagtgcaccgctccaacagttgagagcttgaaaa

SEQ ID NO: 44330 - DNA, 1573 bp, Heterodera glycines
  unsure (1)..(1573): unsure at all n locations
tcctttcctcccctcctttctctctctctctctctccctttctcctttcctcccctcctttctctctctctctctctccctttctcctttcctcccctcctttctctctctctctctctctctctttccctttctcctttcctcccctcctttctctctctcttgttccctttcctcccctaactctctactctctctctctttccctttcctcccctaactctctactctttctccctttctcctttcctcccctcctttctctctctctctccctttctcctttcctcccctcctttctctctctcttgttccctttcctcccctaactctctactctctctctctttccctttcctcccctaactctctactctttctccctttctcctttcctcccctcctttcactctctctctccctttctcctttcctcccctcctttctctctctcttgttccctttcctctcctcctcttctttctttcattctcttattaccttcccaattgttctgcgttttcggtgaccaacgaaagatcgaccaaattgcgaattacaaagtccaaagtgtcggcaaaccttaaaaaagaaagtgccaataaaagaacggtttgatgaataaaacaaaatataaaacaataaaatttaatcactttccattcttttacagtacatattcgtatgtgccacaaaatttggctccattctcagccttttgccattcgatcccttctcaattccgaaggtcgcttttaactcttcggcttccacaaaaatcgcttaaattcaatagaatttattaatttgtttttctttttaccttcaaaaatgtctttggccattcgattctttggtgactttttgctccacgatttgattacctcaaatttaaaagtaaagcttcatttccaaatgcccaccaaatggcattggcgcggagtcattcgttttggcctttgaattgcgccgtttcgcgctgcgactaacgccgcgctgctgcaccgtctgccttaaaagcgaacaaataaattaaataagtttattaatatgaatgaattattttacgctgccgggccctttccgccgccgaattcattggcaaatcgccacttccattcgatggggtgccaatgttattgttatgccgatctcaacagaatgcaataaataaaatattatcggaattaatttttctgaaataattatgtaattagtttctaattggtttattttctctttttgccaatgtttgttcttaccccccttcgtttgttctgcgcttcttttgctgttttgctgaaagtcggaacggcgtctgaaatttaattttcttattttcgattctttgttttataattgcttatccattttgatcatttgcctgtttaaccggtgattcgccactttttttgccgttggcggtgattgcgtcgaaaagcgcgtgtcgcagtgtttgcattgcccatttgtttgtgcccattaaattgcttttataacgatnaattgcaaaaaaaaataaattntaaaagtcattcaaaaagcgtttaattttaanttaaaaaaaatttta

SEQ ID NO: 44331 - DNA, 836 bp, Heterodera glycines
tttaactgttattttcttttatctgactaactaattgttttatgccaaagtttggatgaagaatagcaaattaaaaagtaaaattttcaccggtaaaaccagaataaaataactttttcagatttttaaaatgatttttggtgtgcttttttaaaatatatcattaaattcacaaattttctgcctttgaattgcaattcaaattttagtgaattaatctgcacttgaaaatatattatgaataagaacattttgcaaattgcttcaaaatgaatacggctgactcgactaattgaattaataattaaaatattagcaaggtgtataattgatgcttcaaacaatatgttttatactaattttggacgggccttatattgcaaaaatttattttaactttccgctttgaaattaaacacctttataaaacaatttaaattaattttttaattattttttaatcaaagtactaatttcccatttattaattatttaatttggaaaatttatattgaaatttttaatgatgaataattatgatttttttgaagcaaaaataaatttatataagttaattttcaatattggaaatgaaaaaatttatgaatattaatagtcttaaatgccgattcaattgtagtgaatgatcaatggctaaattaatgttatcatccttacgatgattattatagtttaaaattatattcatttggcaattataataattgtaatacaattttttcattgatattattaatttgttagaaaattaaacaattatatgaataaatattttttacaattttcaaaaaaatatttttaatcaattaactcgt

SEQ ID NO: 44332 - DNA, 804 bp, Heterodera glycines
ggtgtctgcgacaattttgttttggtttattgtagaattagtagttaatctcttttttggggctgaggagaaattcatctataaacataattttttgccaaaatttactaatctcgggcttggcccacttttctctccctttcgttgactaatcccacaggcattggcatgttatcaatgggatctttggtggaaaatgtgccgtctgttgttctcccactcggcccttcccggcactgaacgtcacactccgcccgactccgccatcggcctaccataccatcgctcgcacattggcctatcgcttcttcacattcttcgcccttaccctttctctgccgccctgtgccctcatctcgcgcacactttcattgcacacgcccaattggaagacttcgtccgcccccatgtgaaaatggcgcatgccgaaccgcgcgtgcacttccgccacttggactaccatcgttttgagcagttcaaatgcttcgtcattcccaatacaaataacctgccaaaaacaaacaaaattaataaatgcattaatacgaacaagccgaagaatcaaaaaaactgttaatgcaatacaaaaatttgccgaattttgcaaaaataatattttcatataatttttcaaagcggtgttttcattttattgtacatttctaaagttaaccatcaatcaatagaaattcacctgaggaaactttggatgctctctgagatgggcgaactgctccaatttgagcacccattccaaatggccaaatgtttgcacaagcggaataatttccaacccaatttgtt

SEQ ID NO: 44333 - DNA, 1657 bp, Heterodera glycines
  unsure (1)..(1657): unsure at all n locations
ttttaaaattttggctaaatgctcttttaaaatttttttaattaaattttatttttttatattcacgtttttttctcccatttttagacactctcatccagctgtgctatccgaaatgcgaacaatcggacaccggcacctattccattcgcattgtgaacgacttgggctcggattcggtggacttgcgcctgaaggtggtcgatcgccctgcaccgcccgaggggtcattgaaggtgctgaacattgggaatatttttgtaaacagaaaatgatgagaggggcatatttgtaaaacaattaggaatggattttttgaatttttttctaattaattttaacggagtatttttcgtttttactgttttttttttacaaaatattcttttaaatatttaatgtataaaaatatgaacaggagcggaccgcgtccagtagcggaaggcgacgcgttggcagcaccgcggcggaccggcctgcacaggctgcagcagcggtttgcgctgcgggcgaagaggcaacagacgaggtggacaacaacgaggaggagcgacaggacatggcggtggtgacaaaaaggatggcaattttggtaaaaaaaatttcaaaattattgtgtatgcttttcgggatttttgtgcttaatacctaggcgccttttttgtgcctatttcgccatttttggcgcctattttttggattttttatttattaatatttttccttgagaaaagcagcacaaaaacaaaaatctttcactttttaattgtttttttcaatttttgggcaccccttttttatttctattttttaaaggacctggaaacatccggcacaccggcacggattgtcgaaatcccagaaaatgtgacggtggttgagggcgaattggccatcatcaaatgcgtcgtggagggcaacccggcaccgacaattgtgtggaaaaagggcgcccgaaaaatgccattgaccgacgaccgagtgcggtgccaaacggacggtgacacgggacatgtaagtggcaatttttaaatgaaatttttaaacacagaaatttaaaaaaaactgctgttttttggaaaaaactttttttgtgaaaaagtcatttatcataaaactgagaaatcataaaaaattttttgttttaatttcaataaaattacatttttcataccgtagccctcaaatggaggacaagaaaactttttactgtagttctaatcttggaagggatttttacggcactcaattaattaattaatgtagctcatttatttctaaactaaattcaaaacttagcagcaaatttaataaaaaaaaatttatcaaattctaaaataatgttaaaaatattttatcaaattaaaataatgttaaaaatattttatcaaattaaaataatgttaaaaatattttatcaaattaaaataatgttaaaaatattttcaggtttctctgatcatttccaaatgtcggccacaagatgggggcgagtacacattgatggtgaagaacgcgcatggcaagcacaangttggcgccaagctgcttgtcacgccagcggncgaagtgaaaaaaatttgcagccaaattttaataaatatatttacaaaaaataaatttacagtcnaatttggacttccggggcagcagaaaa

SEQ ID NO: 44334 - DNA, 953 bp, Heterodera glycines
ttaaaattaattattcgctcgcctcgatacgaaaagaattggggcgtttgatgcgccgcttaaattggcaggcacagagaaaagaattcggagaaaccaaaaagtgatcggttggctatcagcagaagagggcaaaaacagataaaagacggagatcagaaagtatccgccgacgttaaacaaaacgatgagaaggagggagaagaaaatgtgccgttggtgggaaacggcggcggacgacggagcggaccctaaaaaagggaacgggaaaaagtgagaccaaaaggaggaaaagccgggaaaaagtgggaccaaaaggaggaaaagccgggaaaaagtgggaccaaaaggaggaaaagccgggaaaaagtgggaccaaaaggaggaaaagccgggaaaaagtgggataaaaaagaagaaaaaagccgggaaaaagttggacgaagaggaggaaaagccgggacaaaagaggaaaggccgggaaaaagtgccggctctaaaaagaggaaaagcttggcaatttttaattgaaaggaaataaagtaaaaagttgtcactgtcagaaaaatcagcggactgactttgcttaaagcggagcaaaaaggcgacagcgacgtaaacaaaaattgtggccaaattacagacgaatttcgaatcagcgtacacagaataagcatatccaccctgggaattaatcataaataatttttttttttttttgtgattttggcacttttgtgagtaattcgccaatgttcccagtgatttccatcgaagggatttcttcgcttcgccgccaatacaaaaagaccaaaccgacacttggaacggtacaaaagagtacggtaatgggaacataaggccaaagatttaactgattgtatctgaaaggggaacatatgcttaccgttgttggcttttgaaatggtaaaattgccaactttatgggaaaa

SEQ ID NO: 44335 - DNA, 1090 bp, Heterodera glycines
ttttagtgacaaaaaatcccgaaatagttaactaaaatagttggtaaaaatgttaaaatagtgacaaaatagtggcaaaaagtccgaaatagtgacgaatagtgacaaattttcagccaaaaattgagcaaaaataatttttattcactgattgcagttgcaaatgagtaggactgggatttttaagaccaaaaaacccaaaatagttacctaaaaaaatttttttaattaaaaatttttgccaagaaagtaaatttttgagaaaattttttttcatttcataggagtatattttgaaaaattttagctcgattcttaggggtgtattttttgaaaaaatttttagatcgattcttaggggtgtattttttgaaaaaatttttaggtcgattcttaggggtgtattttttggttttattgcatttttgttaagtaattttccaaaaaatgtcgaaatagtgaaaaaatagtgacaaaacgccaaaatagtgatttttaactattttagtgacgaagtagccaaaatagtgatttctagtgaccgatagtgacatcagaatcgaaaatttttaatgcagaaatgcgttttttgagctcctttcttcaaaacaattgagcaaaaaatttagttaaaacctaaaattcacagccctacttatgaagtaaaaaaaatggaacttgtaatgttagagagaaaagaagcgcgaaaataattgtaataaagttgtttattggtaagttaagttttaattgtttttaattccaaataattctgataatacaaaaaataactttatttacaaaacggagtaaatgaaccgataacttataaatttgttttaaataaaaaaaattactataaacataatcaaaaatcatctttgatcaacatttttcgggtccaaataacttcaattgctaagcatgcaaacaaaatatctagcaacataatcattatatttgcttttaacaactgaaagtcagaaaagttactctactggttttggtttcttcacactaaatgggcagatgtttgtcaaaaaaattcttgagtattcaaaagtcaaaatataatttttattaaaatata

SEQ ID NO: 44336 - DNA, 945 bp, Heterodera glycines
  unsure (1)..(945): unsure at all n locations
tttttaggaaattttctatctcgtaaccccgatgctcattcgatccacagagactcttcaaaattttttccattaccccatgagttgcggaaattgtgaattaattctcagaaaaatggctatctctttttaggacaattttctatctcgtaaccccgatgctaatccgttccgcagagcctcttcaaaattttttccattaccgcaagagctgcggaaattgtgaattaattctcagaaaaatggctatctctttttaggacaattttctatctcgtaaccccgatgctaatccgttccgcagagcctcttcaaaattttttccattaccgcaagagttgcggaaattgtgaattaattctcagaaaaatggctatctctttttaggacaattttctatctcgtaaccccgatgctaatccgttccgcagagcctcttcaaaattttttccattaccgcaagagctgcggaaattgtgaattaattctcagaaaaatggctatctctttttaggacaattttctatctcgtaaccccgatgctaatccgttccgcagagcctcttcaaaattttttccattaccgcaagagttgcggaaattgtgaattaattctcagaaaaatggctatctctttttaggacaattttctatctcgtaaccccgatgctaatccgttccacagagactcttcaaaatttttccattaccgcaagagctgcggaaattgtgaattaattctcagaaaaatggctatctctttttaggacaattttctatctcgtaaccccgatgctaatccgttccgcagagcctcttcaaaattntttccattaccgcaagagttgcggaaattgtgaattaattctcagaaaaatggctatctctttttaggacaattgtctatctcgtaaccccgatgctaatccgttccgcagagcctct

SEQ ID NO: 44337 - DNA, 547 bp, Heterodera glycines
ctttcccaaaagttttttgaaaaagcgctccgaaaaaaagtgatgtgaaaatcaaatctgaatttctattaatattcgatgatttagtccaaaaatgattaattgtttgaaataattgaagaaaatttgtttgaaaaacttcattaatttaatttattaaataaaaaaccaaataattttgtattattttcacttgatataaattaaaatttgaatttttttttaaatttttaaaatttttttgaatttttaaaatttcccggttggtcccggttcccggtttttcttgcggtcccggtcccggtcccgaaaaaaaatcgaggtcccggtcccggcttctcaggtcccggcaagtcccggtcccggttttggcaaaaattcccggtcccgtggcactctagttttagcgaattggtgcctttttagcgttttttccgaaaaattcaattcaattcaattcaatttatacgcaaaagcgtgacaccgacattaaaacaaaataaataaaataaaattgttcactgaatgagatggggcggtttcaaaa

SEQ ID NO: 44338 - DNA, 1148 bp, Heterodera glycines
tttaagttttttgttttttgtcgctttcaaaaacgtaaagtaaataaaaatgtgtctgatcgcgtcgaacgattttcgaaaatgttctattagacttgcacaaaatacgaagattttcaagtacatatataaagggcgacatgaagtttgggcaccaaattaaggatttaaaaaacaataaatatgtaaaatgctaaatcggtaaaatttagtaaattttaagaacccttgtgcatgcattttccaaaaacttgggccgccgccgaagaatagaccctattattcgtcatgatttaatttgataaacatattcttgttttttaatccaatcggagcctaaaaaaatacaaaacgtgcaatatttatacaaaaaataacaaaacatgaaatgaaaatatgcagaacaacaaagattgtgattgatcaccagtggttcttcccgccttctcatcagtgatcgccctccgcgtcctgaggctgcaatgggtcgttgagtgtttcttcatctcttgctgcaaaagtgcaatgttatgcatgtataaacaaaataaagttaatactatagatggtgggccctctttttggaagatatttttttgttcaaaaaactcgtgaaaaacttgtctatgggggttctcagggttggggaacccgaatccgaacaaaaagttaaaattcaaaattctcacttttgttccagaattgttgaaaacaagctgaatccagtcaaaaaccattgaaacaccgaaaaataattattctgtatagatatgaacataaaagtgaattttgaaatttttgaattttcgacttttttgtttgaattctggtccgggattcagaattggtaaaaatgaatgttgtattcggattctccgacccagaaaacccccataaacatgttttcgcgacttttaataataaaaaaatttttccaaaaagggggcccaccatccatagtattaccaaaataaattctaaaaattgtttaaaaataaaagaatttcaattgttagtcaaattttcaatggtcgaagaagtcggtaaaaaattaaaaaaaaattgtaaccaaaaattgaattaaaaaaacggtttgaaattgaatccatatgggcgccttaccaggaccggattagtcagtttaaacg

SEQ ID NO: 44339 - DNA, 1173 bp, Heterodera glycines
  unsure (1)..(1173): unsure at all n locations
tattccctcatttttttgtggatcgacctagcacccctcttttccaaggcttggcagtcggagggtttggcactgagtgtgagcagtgacgaagcggcaaaactgttcgattcggccgtccgtcaattggtttctttgacggattgtgaccaatttggtggaatccacggcaccgcaaaacgaatgatcaaagcggagcccgaattttgtaaaataaaacacatttttaaaagcattttgccgttagtgatgggccgcgttttttctcttggcctcgacgcacttggcgtcggaagatccatgcgaaccgatctcaattacaaagccgaattggacgcattgttggcagattcggcgaagttgggcacagttagggagcagagacatgccaatgctgtccatttatttgctaacgggtgatgctaatacatttaatacaaatatatttatttaattgcgttatcccccgactttcccgccaccgatcgaatggttggttggggtagttgaattaatatttctcatttttcaaaaaatattcttattaaaattaaaatcaattttttaatagctttcctttgttattaaataaaatattgtggagaaaaatctaaagtttaaaatttttttaaccttaaataaaataataatacaatttttttagttatttcatcgttattctaaataatgtattattaaattttatttgaaagagttataccaacttgaaaatgaaatttgtacagagaaatgcaaagtgcgtgcattgagtgggaaaaagttttggcagaacatccgaatgatttgttggcccttagattttcgcatgatgcggtatttttgcttaacatttctttacattttcatcaatttccatttagtatttctttgtcggcgattgctacggtgaatttaatttatttttaattaaataatttaaattaatgaataatgattgaaaatgattaaggcaaaagagacagcgtcggccgagtgattgaaaaatgggacaaaaatgccccgtgttacaggtggaaaaacacatgcaaatncaatgccgaatggagtgtgatcgctganatttgaacagctatttacatggaatgtacgccttttgggctggaggagtgcgagcagtacgcggaggcggacgccaagcgccggttgcgctgc

SEQ ID NO: 44340 - DNA, 1325 bp, Heterodera glycines
  unsure (1)..(1325): unsure at all n locations
tagcatttcaaatattcgtgtgagtgtttggtagagccagactagagaaggcaaatgttggtaccaagttgcgggtcaatccnncaggagaaaaagagatagccatttttcggcaagatttttttcgttagcatttcaaatatcgtgtgagtgttggttgagccagactagagaaggaaaatgttggtaccaagtttgcggtcaaatccncaagagaaaaaagagatagccattntttcggcaagaatttttttcgttagcatttcaaatatcgtgtgagtgtttggtagagccagactagagaaggcaaatgttggtaccaagtttgcggtcaaatcttcaagagaaaaaagagatagccattttttcggcaagaatttttttcgttagcatttcaaatatcgtgtgagtgtttggtagagccagactagagaaggcaaatgttggtaccaagtttgcggtcaaatccccaagagaaaaaagagatagccattttttcggcaagaatttttttcgttagcatttcaaatatcgtgtgagtgtttggtagagccagactagagaaggaaaatgttggtaccaagtttgcggtcaaatccccaagagaaaaaagagatagccattttttcggcaagaatttttttcgttagcatttcaaatatcgtgtgagtgtttggtagagccagactagagaaggcaaatgttggtaccaagtttgcggtcaaatccccaagagaaaaaagagatagccattttttcggcaagaatttttttcgttagcatttcaaatatcgtgtgagtgtttggtagagccagactagagaaggcaaatgttggtaccaagtttgcggtcaaatccccaagagaaaaaagagatagccattttttcggcaagaatttttttcgttagcatttcaaatatcgtgtgagtgtttggtagagccagactagagaaggagaatgttggtaccaagtttgcggtcaaatccccaggagaaaaaagagatagccattttttcggcaagaatttttttcgttagcatttcaaatatcgtgtgagtgtttggtagagccagactagagaaggaaaatgttggtaccaagtttgcggtcaaatccccaagagaaaaaagagatagccattttttcggcaagaattttttttcgtagcatatcaaatatcgtgtgagtgtttggtagagccagactagagaaggcaaatgtttgtacccagtttgcggtcaaatccccaagagagaaaagaatagacattttttcggcaaaaattttttttcgttagcttttcaaatatcgtgtgagtgttt

SEQ ID NO: 44341 - DNA, 1072 bp, Heterodera glycines
tgacgttttgttgggttgaagaaatgcatattggacaaaaatccctttaagaatgttgccgaaaactgtcgcatgtgcaaaacaacagccttattaaaaaaaggaaaaacatttgtttaattatcagacggtctttcaaataaaagtctcgagcttacgttgtcgagttcaagtctcggtagtctgataattttatcaaacaaaaataactcaattttttcagttgattaatgctttcaattttgaccgcactttgtgagttaagcgctgcttttttgctccttttataggcaacaaatgttaaaatgttgatcagaagtgccaacagaaggaaaatggaagatgaaactgccttcaaaaagctgttataacgaatatttggccgtccctgattaaaaaaaatataaaattcttaattaatttaaattttgaatttcaccgggtctttctttgtctccgaagagaaaactgttgctgtctaaaaaataattgttgtgcttggcacagtaattatcattggtaagatcaacataaacacaattaaatgccaaaagtactttttccataactaaaaaataacgaattaatttaactaattattaattaccattttgtgacggaatggaaatgcaattgcagtgaaacgattcaacaaaatgaaaactgtcacaatgtttgagactttgaattcgaaagtttttacgaaaaaggttaagaaaacgattgcccaatttggtacggtgctgtaaattggcaacaattgttggccaaagaatgcaggaagcaaattgccaaagttattaggcactaaattaagaagatcctaaacaaaaatcattttttcataaattttgaaatattttttttaaatagcttacagcaacggtacggatgaagaacaatttataaaatgatgactttgaaaattgtttatgccttatgatggtaatcatttccaaaatgtaaacaattgtcgaaggaatgtcagtgcaaattccaaaataattaaataactgtcgatgactgagcgaaaaattataaatttggtcgagcatttttttgccttttcaaa

SEQ ID NO: 44342 - DNA, 1721 bp, Heterodera glycines
gagacaactgctttcttcctttgccgcggacacagacaaaggggttgttttttccactttaatttcaagcactttgttgcaaacatttgttgttggcaggatctaaataagttgttttataattataattattttcttaaaaattattttaataaattgaaagttttttttattttttactttaattccaaacagaatgtcgcaatatgttttcaacataggcgatttgtggttcaattcatcaataatctggtattttatattaccggtttttgtataaccatttgagcataagtcggtttacttatgttgttctcgagaggttgtcccgaagcggacttctgtggattgtttttatttacttttcctttgtcttagtttaccaatggaattttttgatatacatgtgccagttaggttcggcagcaattgtgtttgagtaaaatgtcttctttgcaaaatttgtagacataggcttaaatgtaaagaatttacagttaaaattagtctttaatttaaaaatttgatttattaatttataacaaaaacctcaaattttctttcaacaaaaacaactccttcccatgcgtctgcggtttcccattgcattgttttgtcaaatttcggcaaaattgccgacttcttttccaagttttttgcacagttcttaatttattagttctgaatttattgatatttctaataccttcttcaaaggcataaatccaattggaacccttttctccatttttttcttcaattcggtctcagtcttccactaaaagtgtaaataagattatagagtaagtacaatacaaattttcattaccaaaaaaggacgttcctttgtgaccacaatgaacgcattcgagttcccttttttcacaacattcttaaccatcggttgggcaactttcggcatcaatacttttttttccacctatatacattaaacaatttaaatacttaaatatttttaattacgggcgccaatccaggaattattttcttagtcgccgtagaaaacaatggcgcaacattcggccatgcgatttgtgatggcttcggaacaatctgatgtcatttgtaattaatactatcatatgtaaagggtttttacagatcttggtgcatcagaattttgggcaatcattgtattttcaatgctttcccagcggtccaacaatcgacgacggagacacccgatgacgtgtccgcccatggttatgcctgcaccaccggcatccatgatttcggctatcacaccattgatgtgtaacagctccgtcacattgtcacgaccctttgatagattttagtcaaactatttaatagaaatttgttaagaatatgaaattttaattacttatttcattttattttttattttcaatttgttacatttagatgaatattttttattaatattttttattaacctcaatgggctttgacaaaatttctagatcgtactcttcagcacacttaagatccagtttgtgaccgcagatcacgagcttctttggagttatttggacaatcaaataacgcatcttggcgaagaattttttggagatagaaagggaggaatagctgatatttagagttttctgaaattataaaaattaaattaattaaacaaaaacaaaaaatcactaacaaattgtggggaataaatttatgtttattttaataaaatatttttagggccgattaaatga

SEQ ID NO: 44343 - DNA, 1427 bp, Heterodera glycines
ttctgaaccgttttgagtagattagactagaaaaaattgaaaattttgaaatcatgtttcccactcccttctcccaggggtattattttgtaaagtctttttttcaaaataaacttttcaaaccccttttttcgcaccgtgaatgttatttttattgaattctgaaccgttttgagtagattagactagaaaacattgaaaattttgaaatcatgtttcccactcccttctcccaggggtattattttgtaaagtcttttttccccaataaacttttcataccccatttttcgcaccgtgaatgttatttttattgaattctgaaccgttttgagtagattagactagaaaaaattgaaaattttgaaatcatgtttcccactcccttctcccaggggtattattttgtaaagtctttttttccccaataaacttgtcaaaccccatttttcgcaccgtgaatgttatttttattgaattctgaaccgttttgagtagattagactagaaaaaattgaaaattttgaaatcatgtttcccactcccttctcccaggggtattattttgtaaagtctttttttcccccaataaacttgtcaaacccccatttttcgcaccgtgaatgttatttttattgaattctgaacggttttgagtagattagactagaaaaaatatgaaaatttaactttcactaaaaagttaagcctaaactttttcccaaagttaaaaagcaattaaaattttattcacctccattattgatagaaaaagcatcagagtgcctaaactaacatgtaaataaaatttggtgcgtttcagaaccctttctgaaaaaatatttatgaattaattttgcaaataaataaaaacgaaagactcagattttcgaaaaatttttttgagccagctagctcggcgctcatttcagtgtaagttagtcctttaccggggagtatccctgcaaagtttggtacgcttctgctcaattagcaaaaaatatgagtgatcgaattttcactaaaaaagttaagcctacattttttggcatatttaaaaagcaattaaaaaattttaaaatttaataattttcctgcaccgaaggtactcactcggcctcttcgcggcctcgtggtgggccttcgccccccccctcccacgcccttcagagcacgacaaatatttcaacaaaaattttgaaaaattgactagagcaatcgaacgctaacggacgacctaatggaaaaaaatccccgaaggagagaatttaattaaatccattccttcgggggaccgtgccgggtgccgcggggtaagcagtgctggttcgtttcatcacggcaccgaaccttttggctagtcagcaatcgttgcttaacttgccagatcggacgggtgcgcatgactttctgaaaaaaatatttat

SEQ ID NO: 44344 - DNA, 732 bp, Heterodera glycines
  unsure (1)..(732): unsure at all n locations
aaaaacactaaaaaactattttacatttttaatttatacaactnttnaaaaaaacacaaaaattcaaacncttttatacaatctaanactcttcaatccattctcattcncnatacccaataaattttacnancatctctcttnatccntccaattttcttcactttctntacactttttcaattctataactaatttcttcatcctttcttacactttccaactcctnctcatataacattccccttaatttttcaccacgatcatcttttacgttttattttatttttacacatcattcaattctatcatattgataacgatttaaatcattaaaaattaacccttttttgaatgatatctcaaatgaatctctactccaatttaatgaccgattaaaatatttagaaaattttttctataatcttttaaatttccgacttccgataattaatgcaaagtaaaaaattagaaaatacgttcttaaatgatatttatggtttatttttatattcaaatttaactttataacctataaatttaaaataagatattctttcttgtactcgacctatcaattttatcgagtcattaaaaatttttaaaatgaatatatttgatttttagttgtaataatttaattgaattcgacctttgggttatgtatttagaattttaaataaaaatgtccactttatgtctggtttcacattacctaatcaaattttgcaa

SEQ ID NO: 44345 - DNA, 921 bp, Heterodera glycines
ctcaattgggtggggggacggccgagcagagcaaacgttacggagtccaggggcgaaatccggcggagagccaaactcagggcgggctcttacggcccctcttcacgcggacaaagccgagcgccgttagcgactccgtatttgttttccacgtccgcttcatctcagtgctgccagtgcgcaattggcgagccggggccatcaggccaaccgggacccgtaaagcaaagggaagctgctaactgaattcactttttaatttcagcccggagttgctggcccagacggtgtccaggggaaaatcggactgcgcgggtcggacggaattccgggggcaagtttggctgaacaagaatggtgtgtattttcattaaaatccgaattttatatgatttgcattcgcaggtgctttgactgtcctcaagcaccgcccggcccaaaagggccaaagggaccgaaagggccgaacggagtgccgggactgccgggaagagcgggaaaacgttctcaaattaatttatcccttaattatatgggtataagtttagccggagagaaaggccctcccggggtgcccggttcgccaggattacccggattggtcggtccgaacggtccgcccggcccgaaaggggagccgggcaaggtaataagaaaataaggtgattttttaattacaaaataaaaacacccatttagctgaatgatctgccggcagcaaagggtcccacggggcttcacggcctcgacggccctctcggaccccccgggccagacgggccctccggcaaaccagggccaagtggaccacccggacaactcgtttgaccatttatagcacaaattcagttgaccgattggatgtttagggtattccgggtcaaccaggaagggccggactcaatggccccaaggggacgc

SEQ ID NO: 44346 - DNA, 936 bp, Heterodera glycines
gtaaagtctttttttccccaataactttttcataccacatttttcgcaccgtgaatgttattttattgaattctgaaccggtttgagtagattagactagaaaaattgaaaatttgaaatcatgttctcactcccttctcgcaggggtattatttttagtcttttttccacaataacttttcaaaccccattttcgcaccgtgaatgtatttttatcgattctgaccgttttgagtagattagactagaaaaaattgaaaattttgaaatcatgtttcccactccttctcccaggggtattattttgtaaagtctttttttcaaaataaacttttcaaaccccatttttcgcaccgtgaatgttatttttattgaattctgaaccggtttgagtagattagactagaaaaaattgaaaattttgaaatcatgtttcccactcccttctcccaggggtattattttgtaaagtctttttttccccaataaacttgtcaaaccccatttttcgcaccgtgaatgttatttttattgaattctgaaccgttttgagtagattagactataaaaaattgaaaattttgaaatcatgtttcccactcccttctcccaggggtattattttgtaaagtcttttttccccaataaacttgtcaaaccccatttttcgcaccgtgaatgttatttttattgaattctgaaccggtttgagtagattagactagaaaaaattgaaaattttgaaatcatgtttcccactcccttctcccaggggtattattttgtaaagtcttttttccccaataaacttgtcaaaccccatttttcgcaccgtgaatgttatttttattgaattctgagccgttttgagtagattagactagaaaaaatgaaaattttgaaatcatgtttccactccctttctccaggggtatt

SEQ ID NO: 44347 - DNA, 1060 bp, Heterodera glycines
tgcactcggcctttgagagagcgttgtggaagatattcggaatggaaggaagtccaagccgaagagagaggagcaaatgtggaaatggcaaggaaaagcatggcgagggaaagaggaggaggagaaggagctggacgggtgtcaagcttatgaaggacgactgacgaacaaaaaaaaacaatacgggcaataacttaatgaaattcagggaaaaccaaacaattaaaattgaaaatattccataaaatttttcgtaaattataaaaataactcaattgataaaatcgaaagacacaaattatatgatgaaaattttgaaattaagaggcaaaaagcaaaaggagagaaaaattgagagggaaatcgattgaaggaatatttttagggaaacattggaggaaaggggggggggaatgaatgcaattgtgtacattttcctgcacatattttgtttaagtgtttgttatgtgagggaaacagagaaaaaagatcaaatcgatcaccaaaatttttttatgattaatccgagcacaagcgaagcgcattcattttagtgttcgaattcatgctttttagactacatacaatctcctgttgtccaacaatattaaatgataacagtcaaaagagaaaatccttaccgttttatttcttttaatttctcgttcaatgtggcccttaaagtttgttgccgaatgtgaactaacagtagagaccggacgggaccgggataacgccggaaattgccgggactcccggtactgccccaaatttgaaaaatttaataattattttggcgaaatgtttttatttcaaagttcgaacatacaacttaaggatttttttaaatttgtacaatttcaattgttaaaaagatcccaaaatccatattcaaaattgcaattttgttgaaatctcttaaaatggatgtaaaatctgcaaaacttccccacggacccctaaaatccttattctcttaaaaaaaaattgacgcagaatcccaaaattttggtctttttttggacaaatctgtcaacaaatcgcattaaaaattgcaaaa

SEQ ID NO: 44348 - DNA, 1492 bp, Heterodera glycines
  unsure (1)..(1492): unsure at all n locations
aaaatccaatcgctcatttccccactgaataatntaataataaaaaattttattgttttttaattttattttgncatagttttcaaatgcttttntaagcatgaaataaagcaatgattttattacaaaaatgaatgatgttttattttgaggcaatcccataataaaattattttggcaataaattttttgcccaattttggacaaacgataattttgtccatccatataaatatttaaaaatttcaaatttttgtcatttaaagatttttagtttatccaattttcaattcattccccattaaaaataagactaattaaggtcctattatgtcaagtggttggaaatttgtgctttatttcctcctgctgctgctgctgcttgtacaattttttgctaatttgtcaaacaattaataaacaaatttaggcctcaattacaaaagccaaaatttttgttgataagcaacctgccattgaactgaatgtgattgttgatgatcgcacgcctacgcgtaaaaaactaattaaatttaattaattatttgaaaaattttagtgggagccaaaaatgatgaaaagccggcaaaaatccaagttgataatgagcaacaaaagcgtgaagaacgtggcattgaggcgctgccttttttgtttaacaaaaattgtgaactcgacgatttgatatgccaacaacgtgaatgtaggaaaatattatttcatatcatataaaaagggtgggatacgaccgaaattgaaaattcgaaatagggttcaacgtcgggaaaatttgcgaatttgcaccaaaaaacccagaatttgactaccttttttaagggcttaaactgagtcttaaattttaagacgaaagatagggaaaggcaaatatgtttgaattttcattgaatttttagagaaagttggcattatttccagcatattccctcattatgtacagaaccaaatcccacattttacttaaataaattattataagactaatttatcattggaaaatgcattatatttcaaataattaaaataatttagcgagacgaaagacgagggaacaagacggtataattaaatatctttgacaatttctaaatttatattttagaattggaaaaatttttccattcaattttcaagtaaggatggttttgtaatttttttattgcatatgaccattttttcctttttttaattaagttaataaaatttaaaagtttaaaatttcaatttgaaaatatattgaaagttgagagcataaaaacccggggaaaaagggactgcgctgatctctattgaaaacataaaaatttactttattaaattttcattttgatattgtttaactttattagagaatgatgactttatcatgccagggtccaaaaatagcagcggttttggaacctttcgtaattttctaattcgggttttactgtaacaggccttggtcccgactaggcatgccagaatttttcaa

SEQ ID NO: 44349 - DNA, 933 bp, Heterodera glycines
atagagtataaatataaaaaatttcctcaaaaataaaaaggtctattgcgccccgccctccctatcatgctcgagagcatttgtatatgtataaaatttatcaaaaaaagagatagccatttttctgggataacctctaaatataaaaatcctctgtgaaataaaatggcgattgtgcaccgccctccctatcatgctcgagagcatttgtaaggtataaaatttatcaaaaaaagagatagccatttttctgggatagagtataaatttaaaaattccctcaaaaataaaaggtctattgcgcaccgccctccctatcatgctcgagagcatttgtatgtgtataaaatttatcaaaaaaagagatagccatttttctgggataacctctaaatataaaaatcctctgtaaaataaaatggcgattgtgcacagccctccctctcatacgcaagcgcttttgtgaggtataaaatttctcaaaaaaagagatagccatttttctgggatagagtataaatttaaaaattccctcaaaaataaaaggtaaattgcgcaccgccctccctatcatgctcgagagcatttgtatgtgtataaaatttatcaaaaaaagagatagccatttttctgggataacctctaaatataaaaatcctctgtgaaataaaatggcgattgtgcacagccctccgtctcatacgcaagcgcttttgtgaggtataaaatttctcaaaaaaagagatagccatttttctgggatagagtataaatttaaaaattccctcaaaaataaaaggtctattgcgcaccgccctccctatcatgctcgagagcatttgtatgtgtataaaatttatcaaaaaaagagatagccatttttctgggataacctctaaatataaaaatctctctgtgaaataaaatggcgat

SEQ ID NO: 44350 - DNA, 1016 bp, Heterodera glycines
cccccccccccccccccccccccctcgacagacaatattcaacaaaaatttttaaaaatgactagagcaatcgacgctaacggacgacctaatggaaaaaaatccccgaaaggagagaatttaattaaatccattccttcgggggaccgtgccgggtgccgcggggtaagcagtgctggttcgtttcatcacggcaccgaaccttttggctagtcagcaatcgttgcttaacttgccagatcggacgggtgcgcatgattccactgttccaagcaccccaccaaaagcaaaacgatataaccaaaatataaggaaaaattttttaaaacattttttctccatcttcctttttgatactaaagcatcagagtgctaaaattaagttgtaaataaaatttggtgcgctttagagcactttctgaaaaaaatatttatgaaacaaaaaaatcgattttttcaagtgtccgtttggggtactcaaacaattatggggagcaaaaatccaacgcagaattaaagtacaggctatagggaagctattcccgaaggattcggtctccccataaatctgggcgcatcggttcggggggactgccccgaaaacaaaaaaatcgattttttcaagtgtccgtttggggtactcaaacaattatggggagcaaaaatccaacgcagaattaaagtacaggctatagggaagctattccggaaggattcggtctccccataaatctgggcgcatcggttcggggggactgccccgaaaacaaaaaaatcgattttttcaagtgtccgtttggggtactcaaacaattatggggagcaaaaatccaacgcagaattaaagtacaggctatagggaagctattcccgaaggattcggtctccccataaatctgggcgcatcggttcggggggactgccccgaaaacaaaaaaatcgattttttcaagtgtccgtttggggtactcaaacatttatggggagcaaaaatccaacgcagaattaaagtacag

SEQ ID NO: 44351 - DNA, 1294 bp, Heterodera glycines
cattcttatcactttccctctcattcttgcttccttttcagcaccaactcttccccgctctgtttctcttccctctctctttcgcttcactctttctctccctcccttttctctactgacaacgcctcctctcttccttttccctcctttttctccccttttttcccaatttttcgtccgctttgctggtgctcgtcaaacagaaaataaacatcgaataaagttaatattgccgcggatgacataaaaaaacaaaggcattgcccgcggcattccccgcgtcgttttccctcccttttttcattcattggtccttccgtccgtccgtccgtccgtccgtccggtgcctttctcttccggcaatcgtcgaaatcggagacatttattttgtaatccctgctgaaattcgcccgctgctcaattggcctttcgtccccaaaatttggccctgtggcgtcaccgccacggcgacatttgcgaagatacgcccggcggggctaagtgcggccaattggccggccccgtcaatcttcatttcctgctgctgcggttccgtcctccgattactccgtccctccgtggtccattcaaattattcgcctctgtttggcatttcgaagtgccccttggcaattattcgctcattcttccgacagcccccgcggcgtttcttcccttccccggcactgtttggctgagtttcgtctttggcccccgcttcttccgcgcatccgtccaccctttgcgcatgcctctgccccgtgcggccccgtccccgtcgttctcatccgctgaatctgtcaactctggccccacagcgcctccgtccgtccgcttcccccgcttttcgggcgttcgtccttctccttccgcttctcctccgcagttttgtccctatctcagcgcatccttcgggccaaatggcaaaaacatttggacccatgggacaaatgccgcagcagaaacagcagcagggaaagtgccggccgatcggtgagtgccaaagtcggcaaattcattggccattctttgattttctgccaaaaaactctccatccttgggaagggagtgagtgctctttttgcattttgtcttatgactgataaaataatggtccaaggtttgccccccccccccaattcttgcaaaaataaaattaaaaatagattttcaattggactaatcaatcgatttactgtccgattgacaattaattagtggccaaattaaggccatcgctatgtgatcgacgaaatgggctgcgaccttttcgcggtgatggtgacatttgct

SEQ ID NO: 44352 - DNA, 353 bp, Heterodera glycines
atacttggtttgtgttattgttattatatagaatacatctttctggaatggacaatataaaaaaatataaataataaaattttattataataaaataatgaataattattattattgagattaatcaatatatacaaatatttaacaaaaaaataactatccgtgtcaatgaaaataaaactattttttcgggaatgtttaacaaatttatctgataattgttttggttggatatttgtttgagattaattatccatgttgcaaaataataatttggctgaatatgaaattaatgagcctttattgcagaatttagtaaaaaaaaattgaatcaataataaatttatttataa

SEQ ID NO: 44353 - DNA, 1121 bp, Heterodera glycines
ataaaaatttcaatgaatttcttcgccaaattgttactttgaatttcagaaaaaggaattttctatttaaaattaaaaaattcagaagcaaattcaagaatttttttatttttaaatgcattttttaccacatgaattatgattaaatttttgcgtttcgaattcattttggaattaagaaaaataaaaattgataatcatttgatcatttttagcgcactttaagcaccgccgttaggcagcgcagttccaaaatttattccatgccacagatattatgggcaggacacgccaagtacctcaaacttgggtaattaaaccgaagaaagaagtgcagtggggaagaatgacgcctaaaatgaaggaaatattcgatgctgtgcgaacactttgtgtcccctttatgactctcccaatgcagcagttgtccatttttgccactatttttatctcactcatcgtctgctcgcctctcctttttatcagctattttccaaagccaacgcccttttctccctcttttctgtttgttatttctcattgctgctgagatccaatagtcggtgtacaaatttgtcaaacccgccaacatttttaatcaaaatgctttataaaaatttcaatgaatttcttcgccaaattgttattgtgaatttcagaaaaaggaattttctatttaaaattaaaaaattcagaagcaaattcaagaatttttttatttttaaatgcattttttaccacatgaattatgattaaatttttgcgtttcgaattcactttggaattaagaaaaataaaaattgataatcatttgatcatttttagcgcactttaagcaccgccgttaggcagcgcagttccaaaatttattccatgccacagatattatgggcaggatacgccaagtacctcaaacttgggtaattaaaccgaagaaagaggtgcagtgggggaaaatggcgcctaaaatgaaggaaatattcgatgctgtgcgaacactttgtgtcccctttatgactctcccaatgcagcagttgtccatttttgccactatttttatctcactcatcgtctgctctagaagcctttttatcagctattttccaaagccaacgcccttt

SEQ ID NO: 44354 - DNA, 1470 bp, Heterodera glycines
  unsure (1)..(1470): unsure at all n locations
gaataagccgttcaaggagcgaattcgacacttctacagcatttggatctccaatgaggcggaaaaggagatcacatcagcgggcaatccaaaggcacctgctcttcatgtggtacttgattggatccaccgatcatggcaggaaatctccaaagaagtgatcatcaaatcattaagggtcagttaaaaaattaattcaggaaaaatgtctaaacttttaagtctgtgggctgactacgccattggacggaactgaagacgaaaaaattgcttgcttcaagccggaaggagcaattggaccgatagggatcaaatttttgcgcaagtttaggacaaatgaaacggcgaaagatggacgaaacaatcacgaagaagacggcttatctgatgacgatgatgcaggctggatggagtcggagatgacgacgaattgttcattttttgagccccttttactgttgaatttattttaatttttttggaaaatgtgccaaataaattattaaaaaattctatttatccccccccccccccggcacataaatggagactggtatattatttttcaaccttctcagaaaggggtatataattggtgacggacagattaatggagactagcatataaaaagagtatatacggtatatatcatntaataaaaaacactgtttttctcgcccacgccgaactattattttctatttcagttcagttcgttaatttttttattataagaaaaattaattttttataaaacatatttgaaagaaagatcttaatgttttgagccgggatgagcaaatatatgtgtaaaggttgtcagctacaattaatacatttatcttgaatataatttttacaaagatgcctattgctgtggtaatgaggattcttctataataaaatgtttattatgttttcatttcattttttggcataaattcttttaatctcaagtaacggtagcatcgatttacattattaagcaagtttattaactgatttaatgtagttttttgtgcactaataaaccatattttatttatttttatttttctttattttaaagtttaaagcttaaatttataagattttaatgttaattatattttcatattgtttcgccgttgccattccgcattgagatagcaagaactcattcccaagaatatgggaccatctggtcatttccttcactatattattacctattttattgaaaatatcttgttaagtattgatttttttaataaaatttttgtcattgcctttatttctataaaataatctttgtcctttttacttattgcttatttaaattattttagattaataggcaatatattgacgcgacaatttcaataaaacacaaaaaaaaattaataaatttttatcaaattctttatttgcttatcaagaataaaatatagaaaaaatattggaatttaaaaaattcattttaaattact

SEQ ID NO: 44355 - DNA, 728 bp, Heterodera glycines
tctcgagcatgatagggagggcggtgcgcaatttaccttttatttttgagggaatttttaaatttatactctatcccagaaaaatggctatctctttttttgagaaattttatacctcacaaaagcgcttgcgtatgagacggagggctgtgcacaatcgccattttatttcacagaggatttttatatttagaggttatcccagaaaaatggctatctctttttttgataaattttatacacatacaaatgctctcgagcatgatagggagggcggtgcgcaatagaccttttatttttgagggaatttttaaatttatactctatcccagaaaaatggctatctctttttttgataaattttatacacatacaaatgctctcgagcatgatagggagggcggagcgcaatttaccttttatttttgagggaattagtaaatttatactctatcccagaaaaatggctatctctttttttgagaaattttatacctcactaaagcgcttgcgtatgagacggagggctgtgcacaatcgacattttatttcacagaggatttttatatttacaggttatcccagaaaaatggctatctctttttttgataaattttatacacatacaaatgctctcgagcatgatagggagggcggagagcaataaaccttttatttttgaggaaatttttaaatttatactctatcccagaaaaatggctatctct

SEQ ID NO: 44356 - DNA, 1024 bp, Heterodera glycines
caaataaaaacaacgattacaacaacaacaatcgctctataagcagcttcactaataatagctcaacttttggcaatttttgaaacaatcgcacgaactttgacactgggaataaccaaaacaacgcatacaacaatgctaatgaaagtgggcaaatggtaaataacaatgtcggatggatggattgatcacaaactttaatcaattttgcaaaatagttcatgtatttgaatcatcatttcataataaatttaaatattaatcattataaatttctttaatcccctttggtgtttgaatacacccgtaaatgtgacaagcgcatcgccggttagcggcatgatgcattagtttctcttttgtgccggttcagaaatgccgcacatccctttgttatttgaatttgaccccgttcgcatcggtcaccgaagcgtcggaccttggctacacagatggccacgatcccgcctcatataaaagggcacatgggaaagtcgccctcttttttttcctccattcacccccaaaaatgaattcccagcagcgccaggcagaacgtgcccaactccgtgcaaggttaaacttacttgtcgacgaggtcgactttgtggtccaagggctgatcagcaattatcaggccgatggattgatcaacgaggtaagttttctttattttttatgctgtttttgctttttttgaattttaatcttgattgaacaggcgccgcatgagggacagctgatgggcatggaccatggacaaggtctacagcatgagcagcagcagcagcagccgtgggaactggacccaccaatgcctgcacagcaattcgaaattgggccacagctcccggatgcgtgggaactggttccctaccagccgacaccacaatgggcccaagttgcacatgtggaacaacacccgcagcagcagcaacactaccacccaccagcacaacaacaacagcagcagcaaggcgcgtgggatgaggaatgggaggggccgctttcgccaaatgcgctt

SEQ ID NO: 44357 - DNA, 1117 bp, Heterodera glycines
  unsure (1)..(1117): unsure at all n locations
agaaaaatgaaagattaaaatgactaattntgcggttcaatttggcaagtttgaaggtttgaaactctttttgcagcgtgccaattttcaaaaaaaaattctgaaaatgacgggcgacggcggggaaaaatgttggaattttaatggaatttttatcgaaaaaatagcaaatttttccacgattggtcggtgacttcgccacacccgccgcaacctcttttacaccggcccctcctcggagcgaagtgtctcccattttggagggttttatggacacttggaagcccttgcaaaaaacaacaaacccaataatctcgggacatgacacgtttgccaagtccctgcttggccagtgtgtgtccttaccatgatcagcgacggttgccgactcatccgtgtcataataccatgtcgcattgaactgctccagagcgtggccactgttgatgttgccgcaactttcgctgttgcattggtgcggagtgctgctgctgcggcgcggaattgcaccaccatttgacgcggtcgtggagccggacgcaaattcaaattcgtccgtttcaatgtcatcctcggagacgggataaaccttaaaaatgtatttggaaacataacaaaaaaaaatgccggacgaaatttaacagttggaggaagcactccaattaggggactaattagaaaaaagggtaacaaaattggggagtcaaataactgattaaacctaaccatgattgctaaaaagtgagtgttttatcaggaacggtcggggaatgttgcgggattcccgattcagagagttttttgaaaagtataatggatggttagtctaaaaacccggggatttttgaatcctaaaatcatagtctttaaggcttttgagttactgaactatgtgaagattgatattaatgggtttggaatgcaaaatccatgaaaattatgaaaaatttaccgatttttgtgggtacatgaatttgtcattttcccgttgtttgaccgcggcagcgtaaaatttcaatgcacgaacaattgcgcccgggttcttcttttgatccgcttcggtgagcccgctcacatccaacatcttgaaaaacggcaaatttattacaaattttat

SEQ ID NO: 44358 - DNA, 1347 bp, Heterodera glycines
  unsure (1)..(1347): unsure at all n locations
tgcgccccgcngttgaccaaatggacaaagtgatgaacttcttggccacatttggccacttcgttctcctctcctttggcttcgttttgtttcggaatgccaaatgcgtcgtcgttttctctggctccgtttccgtctctgtcgttgccgctgtctcttccgttgtgcctctctctgtctcttccgtcgtcgtctccgtctctgcccctgccccgtcgtccgttgtcgtctcttccgtttgctctgccgtttcctcttcccccgtcgttggttcgctctcttccgtcgtcgtttgctcctccgtctgcccctccggcgtcgtcttcgtttccgcagtcgtttcgcttgtccgcttcggtgccgtcgtcgtcgtttccgtcgctgggccttcgctgtcgcatcggtacaatttgttcactttcatcgcatcgatttcactcaatttgtgcctaaattcgtcctctgatttctttgccaaatttcccttcaaacctttgtccaatttccacgcttttcgacttcttacaaatgcaattgtcagaatgccccctcccttttcccaaaccggcacaattgtcgcccttccattgcgtgaaaatgccaatttgtggtaatgcatcaccgagccgtagtcatacggcatcccaagagggtcgatgattttctttgggtacttctcgaagtttcgcagcattcccggccgcacattgtcctccaaaagatccacgtattcgtctcggtctgtgcgcgaatgttcgtggaaaaagcccaacgcatgcatctgaacagaggaggggggggggatgaatcggtggcaaagtttgattggacgtgccaattcgtgggcaatgattcccttggagaagcatttgtccaactccaaagacaccgtctgatttccccccgctcttccgacgtacgaagagcatctgacaaagggaccgaccgccgcttttcatgccaaaaccacggcttacgcaccccaacccgaagttccgtctcacataaatgaagtcggattctgtactttgtctcgggacgaagcgaatgcacgttttgccttaaggcattggccctttctttcattcgtttggccaatccttcccttgcaaattgcgacttgcctttgtattcgtcaaatgcgctggcaatggcggctctttgactggaaatgagtccatttgtctccgtagtgccaacccctcactcacagcgcactcattccctcctcaagcatgtacggcactcgcccttcgtgccacagtttgttcgggtacgtttgagtgttcaacgaactgtaatactatggtaatgggacgattatctgttcaaatgtagcaaagaaaa

SEQ ID NO: 44359 - DNA, 1129 bp, Heterodera glycines
tagtaacattatttggtgctctcatttttgggcgcgggatcttataaagtatctttgcataatgcacaatggttatgtcctaatcaggccaatgttccttgtatagcaaaacaagacgttctgtcgtgtagtaacattatttggtgctctcattttttggcgccggatcttataaagtatctttgcataatgcacaatgcttaagtcctgatcaagccaattgttccttgtattaccaaacgacgacgtgtctgtggtgtagtaacattatttggtgctctcattttttggcgccggatcttataaagtatctttgcataatgcacaatggttatgtcctaatcaggccaattgttccttgtattaccaaaacaagacgttctgtggtgtagtaacattatttggtgctctcattttttggcgccggatcttataaagtatctttgcataatgcacaatgcttatgtcctgatcaggccaattgttccttgtattatcaaacgaagacgttctgtggtgtagtaacattatttggtgctctcattttttggcgccggatcttataaagtatctttgcataatgcacaatggttatgtcctgatcaggccaattgttccttgtattaccaaaacaagacgttctgtggtgtagtaacattatttggtgctctcattttttggcgccggatcttataaagtatctttgcataatgcacaatgcttaagtcctgatcaggccaattgttccttgtattaccaaacgaagacgttctgtggtgtagtaacattatttggtgctctcattttttggcgccggatcttataaagtatctttgcataatgcacaatgcttaagtcctgatcaggccaattgttccttgtattaccaaacgaagacgttctgtggtgtagtaacattatttggtgctctcattttttggcgccggatcttataaagtatctttgcataatgcacaatgcttaagtcctgatcagaccaaatgtctcttgtattacaaaacaagacgttctgtggtgtagtaacattattttgtgctctcattttttgtcgccggatcttataaagtatctttgcataatgcacaatgcgtaagtcctgatcaggcca

SEQ ID NO: 44360 - DNA, 967 bp, Heterodera glycines
  unsure (1)..(967): unsure at all n locations
cttgcatttttataaattctctttgccaaaagcaaagaaatgacncaacagaagaaaagggcatgggaagggacggacgaagtcatttcgctgcncaatttgaaatgtcattattttttcggaaaaaaaatgttcaatgataaccaactttataaaatagacttgacaaaaaaaatacatgagaatgaacaataagcatttgggaaaatataaagatggtatgtacaaaaagcagtcaaaatatgtacattaactagcgggtgtgtgcatgcgagggtggcgcttgggaaagcgctgcgcgcttcttgagcttcgctacctaggcgcgttttagtctgttagggtctttgcgtcagccgacatgcacttggtttcctccaataattggagttgacacatcgcataatgcaatggaaaccggaagtgccctaacgttgcacatcatggccctcctccctcccttagtccaggcgttggcacgtcattgggttgagcgctaaatggcaattcacctgtaggccctaaagagggctgaccggtccatgtcccggatccaagcttctcaccattttcgcacccaacatagtgcagatgggaatgggattggcatctctccaaaaaccatgtgcccaactgctctggactaagccatttattgtaacttgagcatattagtagctacaatattcagcactttggctcggccttgggcatcaatttcccggttgggagcatgaacacggacattgtttccgtctgttgcccgagagaaggccgtatacaattgaccgtgggaaaatacttccctttccagatcaatgccgacagtgcggattgtttgaccctgacctttttgaatggtcatagcgaatgcaggctttattgngaactgcaaacgctcatattttatgccgccaggcgatttgtcttcatagacatttcgtgttctttcaagaaagatctcact

SEQ ID NO: 44361 - DNA, 1075 bp, Heterodera glycines
gctcgatcacgattcgggcatccatttcggccaattcgaaccccggatccgatctcgaacaaaaagtcgaaaattcaaatgttcgaatttcgcattttgggttcaatgttaaatatatgaaaacattttaaaagttaccaattttgcaataaaagaccatttaagtcatttttggaccaaaaatgcgaaaatttgaattttcggctttttgttagagttcggatccggggtccaaattggctgaagatgccggattcgtgatcagcgaactaaaaagtcatcgcccggagagggtacgcccccaagccgaaatccttagaccgtccctgcttaattggcaaaaattatatggaaatccaatccatgtaaatcctggcagccctaatcatgggcaataaccgcacctcaattatcgccttctgcaccactttgctgatcagcaacggtttcttgtcggaaatgccctcaaaattggcgctgtcggtgaacgcggtggccatgcccatgttggtcaacggtttgttcagttcgtgcgtggtcttcaacgagaacttgggcaactgcacctgacaaaagaaaggggctcggattgcgttttatgacagttcatttaggccaggcccgtatccacgggggggcgagaaacgcttcatttaattcttcaatttactacacatatttattttgcatcttttttttattgtccaattaatcgatcaaatcaatttgtctttttaattttgcctaattcacttttgtgttccaaattatcttaataaagaattggctagcaaagatttttcttaaatttgtaaattaaaacaatattttagttacttatgatgtgaaattaatatgttttttgaaacatgctttgggattgatccacactgtcaaaaaacacgaaagtcccttaaattacaaacaaattcaagcatttagaaaatatttaataaataaaccgaaaaaaataaacataaatttaaatgaaaaatacagaaaagtgtctttcttgcttgtttggtaaaaagttgtcaaggttatctcaataaggcaggagcactgacaaatgagc

SEQ ID NO: 44362 - DNA, 578 bp, Heterodera glycines
tttcagctacaccttatttaaaaaagtaattaatttgttgcaagtataattaaataaaacaacatgcattgaacatgcaacagaataataattaacgaacttattatttatgtatcagaagaccatatactgtatacgcatttattattataataattttttctccatttacgaaacaacggagttttataaatattcatgagataattatgagagctataactcaacttaaatgaaaaattaatttaatttaagttttatttatataaaaatattattattctataaattacaaaaatgaatatatattattctgcatttcagacgaaaataaaaataaaaatcaccggttcgaataattttattcatatttattcattaaataatattaaatttcgtgacacaaccaaccttaattggatcccatctaatttaataaataattaattttaaaaaaattaataaaagcaattatgctattctaacttaattctatatgtaaaagacttatatataaaaataaataaaattggaattcttttattatttggcataaccaaaatcatcatcttcttgct

SEQ ID NO: 44363 - DNA, 962 bp, Heterodera glycines
gtcaataattatttttggtgcgttttcaacacactattagtgctttattcacgctacaccagaggacaaaagttggtgtccaattcccggtagggatttaatagtgactttcagagatagccattttttgtcaagaactatttttcgtgcgttttcaaacacactattagtgctttattcagcgctacaacaaaagacaaaagttggtgaccaattcacggtagggatttaatcgtgactttcagagatagccattttttgtcaataactatttttcgtgcgttttcaaacacactattagtgctttattcagcgctacaacaaaagacaaaagttggtgtccaattcccggtagggatttaatcgtgactttcaaagatagccattttttgtcaataactatttttcgtgcgttttcaaacacactattagtgctttattcagcgctacaacaaaagacaaaagttggtgaccaattcacggtagggatttaatcgtgactttcagagatagccattttttgtcaataactatttttcgtgcgttttcaaacacactattagtgctttattcagcgctacaacaaaagacaaaagttgatgtccaattcccggtagggatttaaaagtgactttcagagatagccattttttgtcaagaactatttttcgtgcgttttcaaacacactattagtgctttattcacgctacaacagaagacaaaagttggtgtccaattcccggtagggatttaatagtgactttcagagatagccattttttgtcaataactatttttcgtgcgttttcaaacacactattagtgctttattcagcgctacaacagaagacaaaagttggtgtctaattcccggtagggatttaatcgtgactttcagagatagccattttttcataactatttttcgtgcgttttcaacacactattagtgctttattca

SEQ ID NO: 44364 - DNA, 1295 bp, Heterodera glycines
  unsure (1)..(1295): unsure at all n locations
tgctatttatgtgattgattttgagttttaaaaaatattaatttataaattgttaatttattattttacgtgtgtttgggcaagcgtacagccggttaattttgtagaggtcattttggctgaagccaattctctaaaaaactaattttaaaatgaaaattaatgtttttgccaaaaaataaaattaaattgcctgtccaatggttttcccaggctgttttggttgaattgtcggctttccatttttggtaaatgcctaaataatatttaaattttaaaaggattatctgataaatcaaagatcacatatggtccatagtgcatcactgaaccataatcatctaaaaagattttgaatttcttgtagcaaaaattttaataaagttaaatttacattgtgttcccaaaaagtcgatcatgttttgggaatatttgtcaaattgatcacgcagattttgatcaatgttatcccatttgatattcacataattatctctatcgctgcgaccttaaaaaagtcattttttaaataattaattacttgcataaaaattattattattttttactttgttcatgaaaaaagccaacagcatgcctcaaaaatattttaattttttaattttcattcaaatctaatacaacttacatcagctcgtggattctaaaataatggaaaaaaaaattaaaaaatgtaatttattttgttaatcttttgtacttacataatccctttactcatgcatccatctccaaggcttacctgaaaaatcatttttataaaaaacaaatttttaatttggtagaacaaccggctgctttccaccgacttttccaaccaacgaataacatccatcatcaggaaaaatgtgaatctttaaaaaaataaatatttattatttgattttaatttaaaaaaaattatttttatttgatttaaatcttttttaatttataatttatttgctttacataatccatatcgctgggtgttttgggacgaaatttaatgcacgttttagtggaatattcatcaattgcttgcacaatttgatcacgcccatacagcaaatattgttggctaactgtgtatggaatgatagcgcttggccattttaaatacgcttgacgaacctgaacaatttaatttagatatacatttgttttaaatacgtaattttattgggcaaatatntaataatttttactgcattatgatgaagtccaggcttggcaatttttccatcgtccgtctcatcgtttggtaaaattcgcaaataagcccggatttactg

SEQ ID NO: 44365 - DNA, 891 bp, Heterodera glycines
aaattcattttttgtgtgtccatccgacgaccaatcagtttcgggaaaagtgttggcaaatgaatcggaatggaaattgaccgaaaataataaaaaaaataatttaatatagtaaaataaagaatcgatcgattaattatcgtatcgtataagaaaaagccatttaatttgttggaggcatttaattaaggatgaacggggataaaacggaaaacgatggataaacaaaatctcgaccgtacaaaatatataattaactcattcgtcagctaacaactcgacagaacgtcaatgagtcgaaaatttcggctcacataaaatgcgtttataaaaacaaaattctgtatcattaatagggctttcttttttaggcacaaaagatcgcgaaataggcacctaaaaaggcataaaaaatcgcaaaataggcattaaataggcataaaaatcctcaattaggcacaaaaataggcaaaaaatttttttttattaacgctttttaggtattaaaacacgtaaaaacttaaatatttcaaatgtaaatggatagtttaaagttattttctaaataaggacaaatttttaaatcaaaatttttattaagaaaaaaatatattaaattttcgggatcaattttacaaaaaactttttttcgatattaggggtgtaatttcctgaaattttttttcgggtcaattctagggggtgtattttttcgtttttattcgcctttttcgttaagggatttttttcgaaaatcctaaaataaggcacttttaagcacaaaaaccccgaaataggcaaaaataggcattataaaagtcattcgtagaccccccaaaccaaacggaaaacgcgtttttcgtgcttatctacgcgtatcaagtgcgcaaa

SEQ ID NO: 44366 - DNA, 800 bp, Heterodera glycines
aacttagaaacccttgccctagtaattagcagcaattttatgagtaaatctattttattagaaagtctttgtatactgtagttaaattttgttagattaccgtttttattgaaacagaaccccccccgggggttctgttttttagcccccctcaaaaggggggttctatcagagggggggggggggttctatttcaataaatacggtactctgctgccggaccagcgaaatgctttggtcatcatgtgaatcaaccggcttaaaaaacactttttttttttgcaaaatcatttgtgttgcgcagttggggtataatttctgatgatgttaactcaaaagtccaaaattcggtaatcgaataaaagtttgtaatctttcgagtgccccgtctccttagaaaaattatataaaaatcacaaaatttgatcattttttagtgaaaatctgtcaacaaattttaatcaaattttcagaaattttcccggcgccgcctgccccctcttaccaaaaagtttttttggaaaaagagcgcctcaaaaaagcgttttattgatttttaaatttggaataaaattttaaaaaatgatttttgctttatgattttaactattaaaaagttgtagaaaaaatttcgcttttcgcattttcgcatattttggcttttcgcatttcgcttttttttcatttcgcatttttcagtttcgcaaatttcgcttttcgcatttcgctttttatttttcaatttggcccatccctgatttgcacattccagttctgggtctgtaaaactccaaggagcg

SEQ ID NO: 44367 - DNA, 1119 bp, Heterodera glycines
ctatcatgctcgagagcatttgtatgtgtataaatttatcaaaaaaagagatagccatttttctgggatagagtataaatataaaaattccctcaaaaataaaaggtctattgcgcaccgccctccctatcatgctcgagagcatttgtatgtgtataaaatttatcaaaaaaggagatacccatttttcggggataacctctaaatataaaaatcctctgtgaaataaaatggcgattgtgcacacccctccgtctcatacgcaagagcatttgtatgtgtataaaatttatcaaaaaaagagatagccatttttctgggatagagtataaatttaaaaattccctcaaaaataaaaggtctattgcgcaccgccctccctatcatgctcgagagcatttgtatgtgtataaaatttatcaaaaaaagagatatccatttttctgggataacctctaaatataaaaatcctctgtgaaataaaatggcgattgtgcacagccctccgtctcatacgcaagcgcttttgtgaggtataaaatttctcaaaaaaagagatagccatttttctgggatagagtataaatttaaaaattccctcaaaaataaaaggtctattgcgcaccgccctccctatcatgctcgagagcatttgtatgtgtataaaatttatcaaaaaaagagatagccatttttctgggataacctctaaatataaaaatcctctgtgaaataaaatggcgattgtgcacagccctccgtctcatacgcaagcgcttttgtgaggtataaaatttctcaaaaaaagagatagccatttttctgggatagagtataaaatttaaaaattccctcaaaaataaaaggtctattgcgcaccgccctccctatcatgctcgagagcatttgtatgtgtataaaaatttatcaaaaaaagagatagccatttttctgggataaactctaaatataaaaaattctctgtgaaataaaatgcggattgtgcacagccctccctctcatacgcaagcgcttttgtgaggaataaatttttcaaaaaaaaaaaaaccatttttttgggaaaaagaataattttaaaatttcctcaaaaataaaagg

SEQ ID NO: 44368 - DNA, 946 bp, Heterodera glycines
catcatggaaataatatgttttacgcatagttaaactcatatgatgctgatgatatgcgctgctttgtgcattatgtagtttggaatacataattaatggctctaattatagtagatttggaatttggatctaagggtttaaaaaaaagcctggacctgctacacaatgcatgtatgtgtacagtaagtgattaatgtgatatgcatgtgtgtgattgggataatcagcagcagacaaaggagtgccatccatttctccccctcaatttgcttcaccattgacattttcggcactgttaagctggtagtacggtaccgcctccggcgccactgttgtcgtaatcgggtggcatttgtccgctgtcgccgcttttgtggatggagcggcacaattcggcatttgtgccgccgccttcgtcctcttcgtcagcagcagagcttccacgccaccaccatcattgccattgcccgcttcggcaattgcatttctcattttgcaccaattcgttgcggtggacagtgagcgcgactcggcaaattgtcggtggcgagcagttccagcaacacaaccacctgcaccggtgccggcagcgccatttcggcttgcggactcaaagggtggcgatactgctgcgattgccgtcattgttttctgtgctgctgttgcgttccttacagaggaaggaaagtttctgttttggcagtgcgacgaacttttcacagttccaaggccctttatttaccgactttttcgcgcttactttaatgggttgcaaccatttgatggtattttgttggaaagacgacggagaccgggcggtgagtgtggagctgatcccacgcattcgttgttgccgttggaagcacaggaaccgaccaattctgaaatgattagaaaacggatatcaaaatgctacagtaacccacacccactacagtaacctac

SEQ ID NO: 44369 - DNA, 1066 bp, Heterodera glycines
tttaaaaggatcgaacaaaagtcgaaaatataaacacactatttttcatgtatatttttttgtcgaaaattggtttaaaaatatagaaataattttagtcagccaaaaataaaactaaaaaataatttcgggttcagtctcgaaacacagtcaatgccgcgcattattctctgatcagatttaacatatgatcagcagaatcagtgatttaactggcgcgggaattagagttacaatatcaaacggttgatcaaaaacttgattgatgaacacacaaaacaaacaaaaaagggcaaaagcatgcacaaaaacaaaatatcacactgattgaaaagagtcgaatttggcatggcattttgctgttactgttcagagttgaagttgacacgccgtagaagcagcagtacagcagcagcagtgccaccgggcggaaaaccgacgaagagggcggtgacggcgacggcggacgtgacaacgatagcacgcagaggcggcagagcgcgcggcatcgacgtgatctgcgccccgggcgtgttcagctaccgcatctccaccgacctgtactgcgagcacaccaagcggagcatcacctgctttgcctatttgcaacagccgtaaatacgtgtgccaacgaaccgatcgtggaatttgcaaaagcaatttgaggacggaaaacggacggacggcacagcgccaaagaagctttatgacatttttaaatttaaaaattgaaaccacaaaattatttgacataaaaaacaaaggcatgcgcaaagtttggcaacagtgtacaaaatcacacgcacaaaaggcattcttttcaattgatggcgactcattgtcaacattttctgaggcatttttttaacgattcacaaaattcaatcggcaaatttgtttatcaaatcaaaagacttctgcgcaaaacgcgagcataaatgcacaaaaaaggattttaaaaaacaaatgattaccatggatggggcaggtcaaactcgttggcatttctcctgcccatcgaagaaagtttttaattttttatcaaaaaatatcacttataaaagat

SEQ ID NO: 44370 - DNA, 337 bp, Heterodera glycines
taattctgcggtgaatttgtgctctccataattgtttgagtcccccaatcggacacttgaaaaaatcgatttttttgttttcggggcagtccccccgaaccgatgcgcccagatttatggggagaccgaatccttcgggaatagcttccctatagcctgtactttaattctgcattggatttttgctccccataattgtttgagtaccccaaacggacacttgaaaaaatcgatttttttgttttcggggcagaccccccgaaccgatgcgtccagatttatggggagaccgaatccttcgggaatagcttccctataggctgtactttaattctga

SEQ ID NO: 44371 - DNA, 736 bp, Heterodera glycines
gttgtttgcgtgcatttccgttcgattttgttgagtaaatggtaattttttgaaaaatcgaattttcgatttttgttcgaatccgggttcgtggttcggaatgggtcgaattgagtgtcagaatcggattcctcgaccctgaaaaccctaaaaacgccattttctcgaaaaaaaaattttgaaaatttttttcagaaaaaggtggggaacattcttaactattaccaaggtttggactcgtgggttcggaattggccaaaaccaaaattatattacttcactgaaaggcacaaaataaactgttaccacttaaattgggtattgtaaatataaacaaattttcaatttttccgaattaatttatcaccttctaacaacacccgtcgtgcattgcatttcggcgtaagaaagaacggcgtaaagtgcgaattgaaccaaagtcaaataccaaccaaacggtttcatgccgggcagccgaaaaacgagttcctaaaaatgcaaaatccaagaaaatgtgtccggcgctagtctaaaagtggccgtttttgaaacaaaaggggggacccttttgttttgcaaagtttttttaagataaaaaaccataattttttatccggggttttaaaggtcgctaatcacgaatctgacatgtattttgactaatttctaatccctaacccgaactcgaataaaaatcgaaattttgaatttttcaaattatgattttttgttcaaa

SEQ ID NO: 44372 - DNA, 1066 bp, Heterodera glycines
  unsure (1)..(1066): unsure at all n locations
atcgctgcgagagttgcgtgtccagactgtatgnagagcggaaagtggcggagagcaacgacaggatgccaaatatgcggactacatcggaccgtcgctttctgtcagcgccgttttatggacactcaggtggacaagcaagtagtggctgacaaccctctggaggcatttgtggattggctcgtctaccaattgccaaaaaagtacgacacctatgcctactctcactttagcggccgcttcgacatggtgctcgtcttccgcgagctgttccggatcgggttcaaccccgagatgctgagacgggtacaatgctatttttctaaatttggttaatttaaaatttagggtaataaaatgtacgagatgaaagtgcggaagcagaaaaagcgaaatcccaacgtcgtcttccgagattctttcaatctgatgccgtgttcattggctgcgcttatcccttcctatgggctggacgtggaggacaagccgttcttccctcatctcgccaatagaccggagaactacggcagagaaattcagcctacacctgacgactacctggctaacggaatgatgcccgggaagaggcgccagttcgacgagtggtacgccgagcaccatcatgagcctttttggctcgatgaagcgcttgccaggtaatttctttatttttatttaattttttattgttgatttttcagttattgcacgaacgatgttgaaatcctgatggcagctctcgtcgcattccgccgtgaattcttcgagatttcgcggcgacaggagtacattgatggaattgacgacagggaaaaccatgacggcatcgacgtactgcgcgagtgcatgaccatcgcgggagcgtgcatgcggcatttccgcacaaatcacctgccctctgaacatctggccatcgtccctgagcgcggctatgacaacgcgcagaaccagagcctacttgcacttcgcttcttccactggtattcggaggagcatggggtggaagtgcaaactgcccactcggctggaggagagaaacggatcggcccctactcgctggacgggt

SEQ ID NO: 44373 - DNA, 423 bp, Heterodera glycines
ttgtcgcggaaagcgacataaaattcattcaccaattaattagttttttgttcattaatttgtcgatcaatttgctctcggtcgcttctattatgagtcatccttttccctcttcattcattttccctatgaatcatccatcgatcgattttttgtatgcacatttgttcacgtgatttcctccgccccattgatttgtgagggtataaaagcccgccccattttcattctcgtcacttcttctcatcacttcttctgctcagcaccaaattatatttgtttaattgaataaagagtaagagaaaagctcttctctcaatctgtaaaggggacattcaggagccctgtcatacagaccattaatttgacccccgttgggtcattaagggggttaaaaagaactctcagattcagtgtccacat

SEQ ID NO: 44374 - DNA, 1095 bp, Heterodera glycines
  unsure (1)..(1095): unsure at all n locations
aatgaagagttctgttggtgcccgcccataggcaccgccgtaaaaaaattcatattttgaatgagagatggttaagaaaattaaaaaattatctcacttcctcgctggaagattttttcaattcgtagaagttactacaagtttttttccactcataaattctcaaaaaatttccaactattttcagccaaaaaaaattaaaggatctcttaatcgttttatcatctcttcaaaatcgttaaaatttaacattttatttcgattgatttcaatgtttttgcaattttcgtgtcattatttttttatattttacttttttttaatattctttttacatgaattgaagaagaaatttgattgtccccaaaaattgaccgggacaaaattgtcgatcagtttgagataataaagcaaacaaaaattaccagtttataatttcaaaatcactctgataactgcaaaactgactaagtaaatcagtcttttgaaattttgtgaataaaaatttcccatctctatttatcaatcaaaatccgccatattttactttgactgttcaaaaatcattttttcaatttcttattttctttttccgatttatttttttgctaatttttttgcgtcctttttcccaattcagaaaatgaatgcgtttgcatttgtcaccaatttattcactggttcatattgtgtgatgagtgttctgcttctgctgatgtttatcagcagaagaagcatttgtaaaagctatttgatcggctgctgaatgtaattaacagagaaacggattttttgctacgaaaaacaaatgttgaaaaaaaatgtcgtgggttttttaaaataggctcaaataaaacattaattatcggacccaatttttcactttttttctcgaccttactgacgcataaattcggccactgtccattttaaatccaaaaaataaatcctaattttaattaatatcttatggcggtagctctcaatattctctaaaaaaatatttcgccaactatgtatatgatattcaagagcgcgntattctcatgaaaatacgaaagatgttataataataggctgcttaatttagaaaaa

SEQ ID NO: 44375 - DNA, 1665 bp, Heterodera glycines
tagtaacggcgagtgaactgggaagagtccagcgctgaatcgcagctcctctggggttgcgaggtgtagcgtatagaccgtgagcttgggttggcccgcttgttcaagtttcccttgaccggggctccagagaaggtgcaagacctgtccaactggcggtgcctacccatctttacgtgtcttggagtcgggttgtttgggatcgcagcccaaatcaggtggtaaacttcatctaagactaaatacggccacgagtccgatagcgaacaagtaccgtgagggaaagttgcaaagcactttgaagagagagttaaagaggacgtgaaaccgatgaggtggaaacggacagagctggcgtatctggtctgcattcacccgtttgttgctgtacgttgggctgctagcctccagactggggtttgctgtccttctgttcagtggcgaatggggcatttgcaggcggagtgcgctgagatgctcggagtagctgcgtgagctcggtcttgaggccagcctttcggggtctggtacccggatcgggggagtgctgtttactctgggtgaattgtgcaatggtttcgggtccgtgttgactcgagctgggggtcggtggcggtcgcgtgcgacacgtaccagcaaccagttcggtccagctcgggctctcagttgtacgttctcggtgtaaaagccggtcatctgttcgacccgtcttgaaacacggaccaaggagtttagcgtatgcgcaagtcattgggtgttcaaaacccaaaggcgcaatgaaagtgaaggcttcttacggagctgatgtgtgatccctggcactgcggtgttggggcgcaacatagtcccgtctcgatcgcatgcgatggggcggagacagagcgtatgcgctgagacccgaaagatgggtgaactattcctgagcaggatgaagccagaggaaactctggtggaagtccgaagcgattctgacgtgcaaatcgatcgtctgacttgggtataggggcgaaagactaatcgaaccatctagtagctggttccctccgaagtttcccccaggatagctggagctcgttaagcagttatactcggtaaagcgaatgattagaggacttggggacgaaatgtccttaacctattctcaaactctaaatgggtatgaagccagggttgcttgactctgaacccaggcgttgaatgtttgagctccaagtgggccatttttggtaagcagaactggcgatgtgggatgaaccaaacgtggagttaaggtgccaaagtgcccgctcattagacctcataaaaggtgttggttgatatagacagcaggatggtggccatggaagtcggaatccgctaaggagtgtgtaacaactcacctgccgaatcaactagccctgaaaatggatggcgctggagcgggccacctatactccaccgtcattggcttgtacacgtgcttgtcgcgtagtctggccatgacgtgtaggagggtcgtggtggttgcgttgaaggctttgggcgtgggcccggccggagcttccaccagtgcagatcttggtggtagtagcaaatattcaagtgagatccttgaagactgaagtggagaagggttccacgtgaacagcagttgaatgtgggtcagccgatcctaaggcaccggct

SEQ ID NO: 44376 - DNA, 621 bp, Heterodera glycines
ctttcacgttatgggatggtcgtgtgcccaatttcgacatacctttagagcagtttggctggaaattagaaagaaatgtcggcactgagtgtgcctcccccgtccccctccgtccgtcccattccttcctcccctccctcgctcctgtcccgcatttggctgttggctgctgtccccgcccctcccccactttttcccctcttttcccgcacggctttctgccgctgctccaacagatgagagaagaaggaaagatgactgactgaagagggggcgaccaggagaagaaggccgacgaactggttcctcctcttcctctctctttttcgcccttttttctctcgcattttccatccgtcgccatcgtttattaaggctccgcccgcccgcctccccccagcggcgggggtacggacgaccgtctgggccgatcgatggttggcccttgtcgccagcgagcggtgggagaggtggggaggatgaaaagccgttaaggatggacggaattagggaggtggaaatttgttgagagagaaagagggacagaggtgggcgatgggaagggcgggggaggggagagagaggggggaaagagaggggggaggagcgaatgttattcga

SEQ ID NO: 44377 - DNA, 966 bp, Heterodera glycines
ttttaagaatgctgcataattttttattgtaaatagtcacaaacaaacttttttttcactcccaatatttaccagtatcatacaaaaaggcaaaagttaagcactgagatataaaaaaatcgtctagaataattatctaaacaatttgtcgggaaagctgtataaattctgggaaaaaacttttcaagaaaagctgaaaaattttcaatcgcatcagaagcagcctcaaattcttcaacaacataatgtaaaaaatattacgcaagaaattatttttagatcctttttagaaatgctgcataaatttttattgtaaatagtcacaaaaaaacttttttttactcccaatatctaccagttatcatacaaaaaggcaatagttaagctttgagatataaaaaaatcgtctagaataattatctcaacaatttgtcgggaaagttgaataaatttcagttgcaataggcatattggcacaatacataaatgtagagcaggctcaaaatagaggaaataccaaagattaaaaaattcgtgtttatggcccactctgctttggctggacataactcgccagagagtggagatagaccctttgttgatacatttgaaaatgtagagctcggctagcgcattcgaataacacaaaatttgttttcatttgcccccaaacaatccgcttatgacgggccgaaagaaaattcacaaaaatttggcaccggaaaaactccatttttttatgggccagcataataaagtaaacccaaaatgtaagtgaatttaaattggtcatgtgagatgtttagttttttatttgacccatccgttttctgggaaaaaacttttcgagaaaagctgaaaaattttccaattgcatcagaagcagactcaaattcttcaacaacataatgtaaaaaatattacgcaagaaattatttttacatcctttttagaaatgctgcataa

SEQ ID NO: 44378 - DNA, 962 bp, Heterodera glycines
cagtgattgaaatgctggtgggtttagtcccagtgattgaaatgctagagggttgagtcccgttgattggaatgttggtgggttgagtcccagtgattgaaatacaggagaattgagtcccagtgattgaaatgttggtggattgagtcccagtgattgaaatgctggtgggttgagtcccagtgattgaaatgctggtgggttgagtgccagtgattgaaatgcagaattgagtcccagtgattgaaatgctggtgggttgagtgccagtgattgaaatgcgtgaattgagtcccagtgattgaaatgctggtgggttgagtgccagtgattgaaatgcagaattgagtcccagtgattgaaatgctggtgggttgagtgccagtgattgaaatgctggtgggttgagtcccagtgattgtaatgctggtgggtttagcccagtgattggaatgctgttgggttgagtaccagtgattgaaatgctggtgggttgagtcccagtgattgaaatgctggtgggtttagtcccagtgattggaatgctgttgggtttagtcccagtgattgaaatgctggtgggttgagtcccagtgattgaaatgctggtgggttgagtcccagtgattgaaatgctggtgggttgagtgccagtgattgaaatgaattgagtcccagtgattgaaatgctggtgggttgagtcccagtgattgaaatgctggtgggtttagtcccagtgattggaatgctgttgggttgagtaccagtgattgaaatgttggtggattgagtcccagtgattgaaatgctggtgggttgagtcccagtgattgaaatgctggtgggttgagtgccagtgattgaaatgctggtgggttgagtcccagtgattgaaatgctggtgagttgagtcccagtgattgaaatgctggtgggttgagtcccagtgatgggaatgctg

SEQ ID NO: 44379 - DNA, 811 bp, Heterodera glycines
gataaaataattgaaaaagtttctcaaaatatggagtgactgatcaacaaaatgtgcaaatggatgtgataaatgaaagtgccaattcagaaattcgtcaaaaactcattcaaatgccacaaggctccgctgatcaggcccagccaatgtcagaagggacaataattatcgatttggaacgaactggatcaacaacaacaattgcaaatgaatttgcttcaatcccacaacatgatcaaactggaacaaatgataatgcaaacccaaatgatcaaacaaattttgttaatccaaatgatcaacaattggtcaaaccaagggaaactggtcaattgatgccaatgaccgctgataatttaaatttggcatcccttcatgaagcggataatgttgaacaatttgtgatgatccctaccccaaatatgcgacaaatcaatgcggaaaatcgcgtcaattcaaaacgcaattcaaaaagcggtgaaaaaactgattttggcgctgccgaaagcataaatgaggcttctccgtcaactgtacaacgaaaacgaggacggtcaaaaacgctgaaaatccaagacaaaaatgcagtgggcaaatcaaaaatgggagtggaaaaaccatcgatgaaatcggcaaagggcaaatcaaaaatggtatttataattaaatattagaaatctaaggtgattacataaatgttgttgttgcattcctgttttaaaagataggctaacatggtttttgttttgttgcacttttgaatggaaattaaattatcaattttctttactatattttatttcgtcaggat

SEQ ID NO: 44380 - DNA, 1146 bp, Heterodera glycines
  unsure (1)..(1146): unsure at all n locations
gattattttttctggcggcttctcaacagcgatcactgacaaatcaaatttgtctggggcaaacaaagcanttcaaatcgggttggtaatatgaccgactcatccgcgagcacagcgcaaaatgaatacgtcaatgagaaccctgaaaatacaaccaaaattaatttaaaacaatatttttccattgaattttttcttaattcaaccaaaagttcccccattttttgctcacaattttccctcttcgctttggtcgtcgtcctcggcaattggcacttggaaaatgcgcagcacttcgcccgtgttgttgttggccaactcttcaaacaaatgctcctccaggcgccatcccttgcccactttgaggcgaagttttgcacagaatttggcccgtttgcttcccccgtgtgccgcttcgccgcccgcaaaacggcgcccatgacgaaagcgttcggtgccccaaccgtcgaaaaaattcttaaaattttacattcccatttatatgttcgtcatctttctgtttcccaaacttacgctgacaattgccttgacaaattcgaagaacggttcgtccctaaatgtctccgccggcgcttcttgggaattcttttcgaagataatttcggcctctgaaaattgcgagaatggcacaattgactaaatgttttgcttttaaatgcccacctttctccgtctttccactcccaaaagttgcgcactcgccccattgtttctgctgttggccatcgtcctcctccgtttttgtgtccgtccccaattcgatgggcgcctcgacaacgatgcgcaaagcgtagccaaaaaatggtattaattcagtgccaccgccgcaggctttggcgaactccagaaaaaagaagaagaaaggcattcagaatggcaattagtaaattttttttggtaattttggcaaaagtgcagaatagtgcgtcctcgaaaatttatatcatatgggttttttctcgaaaaatctgaataaacgcactttcaagttgcgaatggagtacaatgtgcgagcgttgtcaatggaacattggaagaactcgtggatttcataggagaagatgccgttaaagaggattttgttgtttttgaaagaggtaatggacggacggcagactctagaga

SEQ ID NO: 44381 - DNA, 1439 bp, Heterodera glycines
  unsure (1)..(1439): unsure at all n locations
catgcacccagagactccggaagagnatccgccttcgaacaaatatatatgaacaaaaacaaatagtttacatgccaaaatgagaaggtcacaaatgctagcaagaaacgaatcctttttggagacactgtgtaatgccaaaaaggcgaatgaccttattcgagacgcaaccgatgagcaacttttgtgcctagtcgaaatatgtctcaacattctaaagggtcgggttccattgcgtactcggcatttgaataagctgaaagctcatgcacaggtgcttcgtcgtctcgcccgcacacgctgctcgcgctctgccaaaaaggttttgctacagcacggagatggcctcccagctattgtggggctcattgcgtcaattgctcttccgcttattatggatgtcattgaaaattataaataaggtgcaacaaagtaaaaaaaaaagaagtaaaatgcagcatacaaagcgctatttgtttgtccccgaagaaatttatcagagtttggcatcaccgccaccgtctgacggaacaccaattgggctggtacgtaacagaattaaacaaatcaaaaacgatgacggcataaatgaggcagaacgggcaatcaaatatgagcaggaacttaagcgtctcaacaagctgactcgggacgaggatgaacgtcccgtgggtgttaaattagaaaatttgagtgatgtggttgacgctatgccaaaaccagtcaacgtcaaaagaccaattgttgtcgctacgcgtcgccatttaaaggttgggcgtgcgcgaaaagcaaatgttgaacaactagaagatgttgatgatgatgatgatgatgatgaaactccaaagccatcgagttcaaataaacgacaacccacacaaacggaaatcttaaaattaatttataaaaacgcccaatctcttggagtgtctgaggaaggacaggtcttgagagcgggtgggcggccttttataaccagcagtgtttatgacattgttagtcacctgatgaacaaggacaagcgtggccaaaacaaagagacaactgcattcaaagaatttgttgaaagggcaagacagatcccgctcttgagtaggcacttatttcccgaaggccaatccggcaaaggcatttataaaaacaccacactgaaatttaatccatctttatggatttgaaaaagcttcgtttgcttgagtttttgtacaaggaactaagttcgcctgtcgcattcacgagcgttgaaccgctgctgagagaggcgcagaaaactcaaccaaaaattaatcgaaccgatgtccaaaattatttagccacccaacgtacatacacactgcatcgtcaggccaagcggcgctaccgtcgattgccaacattggcaccaggcttacacactgaatggcaggccgatttggctatttttgaccgacttgctnaaa

SEQ ID NO: 44382 - DNA, 1361 bp, Heterodera glycines
  unsure (1)..(1361): unsure at all n locations
gacaatcggacagtaattacactaaaggtagtaaatgcgntcgccgaaggggaccgattgtgcgntatcaacaaaaaaggaaaataggcaaataaattgatgagtttttgtaataaccctaaaaatcaaacgatatgaatttattatcttttagtgtaatttactgtcggattgtccactgtccaattgtccagtcacggtgaatgattggaatggaaaagagtggggggggggggaagtgatcagcggaaaaggggagggatgtgaaaagggatggaaggaaggcaaagagaaaacgactgatcagcagagagaatggtgaagaaattgtcagaccgtcttaagtgaacggacaagaaaagtgatcggacccaactaaattaattttaaaattaaaactaggcctaaaatccataaaaggtgccatttttagcgcaaatctgatctcaaaacctggaaaaatatcccaaaaatttcccaggcggcgcctgtcggcagcgccagaaaaaatttctttttggtttttttaacgcttcccaaaagtcattttttggattattttattcgattgttcgaaatgctaaggtaatttattgaaaaacattctttgtccgaccaaatgcaaacttaggctttactaatcacatttaaagaaaatatgccttttttggccattagatatgcttattttggaaaatgtttctcgactttttcttttaaaagggaatcaatcgcttggattaattgtaatttaaatattcacttttgctgatcaaaagcacctttctctcctgttcgtccacataatcttccggcacattttccaattccttaaggtaatcgccttcaagcgaaggccgaagggacggcgaaggtctggcaataggaagaatatcaggcaattggacggaggacgaaggaggacgcggccccggcactattgggggaagtaaagtggggaatcgcaaggggagaaaggggctgcaattagaagcctgcatttattctttagatataactttgctcaaacgcaaccaaattttaaaataatgatatttttcgataccactaagcgcttactataaattctggacattcatgaacaatggggatggttcaagaaagttatgacaaaaatgtgcaaaaaaaattagttatttaggcttctcagatcaaaattgattccaagcttaacgaattgcgtagaaagcactaatggctaccgaaatatatcacgattttattatttggctgcttttcggcaaaattatgaataattttatgccaaaaatttgcttccaagtcatttttccccagcactgcatttttccaatattgttttgttcaggaaatctagaccc

SEQ ID NO: 44383 - DNA, 1140 bp, Heterodera glycines
cgccagcggcgctgaaacggcccaaaaatttttttgtccttttttgccggcctgtatcattgcgggaagaagcgggagcgaaaaacgcttggtgggaggattttaagttggagtgttagggataatctggcgcttatttggcatgcctagcttgtacctcttttaatcacttttgtacctcttttaatcactgttgtacctcttctaatttaaaaacgggcatgaagcgcccgtatgagctcaaaaaaaataaaaacgggcgcgaagcgcccgtccaagcacaacaaaatttgaaaaacgggcgcgaagcgcccgtctaaggccgagaagcggcctaaaaatcccagataattccaaatatcttcacaacccatagcttgtctaggtagcgaagctcccaaagcgcgaagcgcttttccccagctaaatagccgacggttcacgcacccgctagttactatatacgttatattgacaaggagtttcgtttcaaaaactaatttgagcttaacggctaatgggacgggtctgaaagtggtggaagggtcttacaactttttgaggcgcatctgggaaaactatagaaaaaaattctcgacgcccaactgagtcccgaggagcgatttctcactttttcttgcagtttagggcccgtaactttttttctaaaacccgaatcaaaaagtgcccgctgtgagggcactccgcagaagtgtcctctataatccggtattttttttttttgatcagaccaaatcccggacctgtacagacacggagactcagttaatttttttttcccacttcagtaccaggcgaataactcattaggctttgacctgtgcgcagggtggccagcagacttattgtagagctttaaaagcccgatttttccaaattttaaaatttcgaaaattttcaaaatttttcgagttaggcctaaaaaacggttttcgtgttttttaattttatgattttttaacgatttttcccagagaaacgaagaccacttccaaaacatagtttttcgagctctatcgattggtaatttttttgaaaaaaattcggtttttttccggaaatagaaaaaatttttggcctgagcgggacatttgagtcccgggcctataactcggcagg

SEQ ID NO: 44384 - DNA, 575 bp, Heterodera glycines
tgattgaaatgctggtgggttgagtcccagtgattgaaatgctgttgggttgagtcccagtgattgaaatgttggtgggttgagtcccagtgattgaaatgctggtgggttgagtcccagtgattgaaatgttggtgggttgagtcccagtgattgaaatgcaggagaattgagtgccagtgattgaaatgctggtgggttgagtcctggtgattgaaattgttgtgtccttacccaaaggaacgacaacaaatataaacaataaagtttattgaagaaaataaaataataaattggtgacggagagaggcgaatatcgattggctttatgccacaataaaattggtgaatgaatgaaggaagtccaaatgtggggaagagagccaacattaaatagacagaaatgggggagggaagaagggacaaacaaagggtcagagatcacaaatgtcaatggtcactatctataacacctcccttctctaattctgatcactcctgatcagtggcggcggcgcttcttgatcgggctgggcgagtaaaattgccgcggcttgacgatccgttctgatctg

SEQ ID NO: 44385 - DNA, 1081 bp, Heterodera glycines
ctgtcggcattgtaatgggcacgggatttggcttgacgtattgcccggcaatggtaatcggtaaacgagaagaacacattaaatatatattttggtacttattgtctcaaatcctgtgtctaaatggacttaaaattcctctaaaattataaaatcttccttggagaccgacatcacaggaaaatcgcactcgggaagctttttttatccattgctctgaatggaaatctagattttcctcactattattttagctccttaccattcgaaactctcgttcattggattcaaattttatttatttatttttcaacattttagttacaatgtatttcgagaagtatcgtgcacttgcgaccggtcttttcaaaagttcacttcgtttttcaatctcttctttaggtgttactgtttgcggtgctggagttggtaatttctgttattttttgtctcatattttgtaaaattcatttaggaacatttggtttctctaaattgatcagcattttgattgtccactttgactggcgtacagtttttctcatttacgcaggttttgcctttcgagttctagagacaacctttctttcatcaatttgttttcttttgtcagttgttgttctgctgtgtgtgccgtgcggtgccctttaccggccgattgaatttgtgccgatttacgaaggagagggggaggaagaggaggaggaacacggaatgacggacaatgcaaaagaaatgaccaaagaggagaacgacggcgaaacggacgggcaacatcagtacaaaggtcgcacccgcaaagcccaaaaaacaaaaccattctgatgatagtttagttttcttttttttttttgctcttcaggccaaccagtaatgccttggacaattaaacgattaaaaaaaagaatatttatagatccattttccaaaaaagtcttccgattggttcagctgatgacgagctgtccattcccgcggacactgccaccaccgtccacccatccgaccacggcctcgtccctccgtcccaaccattgcgtcccgcccgttcccaccagctgatcagcaaagtgtcgatgat

SEQ ID NO: 44386 - DNA, 969 bp, Heterodera glycines
cttgcatggcctggcagggtcccaaaaataaacgaaagaagcaaccgtattatgcgaagtgactttgtccgcttcgagtggatagtgcgatttgtcaggaggagggaccaaaaacttggtagcctaaaaacccactttacaaaacagcaattgaacacggcaaaagacttgtcctagggagtagtcggcttggtgaagaagtgccattgcgtgtagcaaagtgatgtcgcgcgaggcggccgacgccgtttggtggagagtggtcaatttggtggaggaagagccgtccaaagcgcgagaaaatattccgacagcgctaaaagggattgaacttgttataaataggagcgaaagtgttcacggaccgagcgatgatcagaaactgatcgatgtcgcggtcactgagccggtggtgcgggtggtacacgacgaactctttgtccgtacatcgcacttccgtccgtccggtggtctcttcctccccttctctcttcactttattcacttcttcttggctaacagtcaattcgggaatttgcgcttggtatcgttctccgatttcaattcgtcctttgtccgcgagaagcgtttgattggtcgggtcgtaaaccaaagaatagaagaaagagtcctttaaggggtaaaaattgtattatttttgttttgttggtgtctcgagaatggttgcctcttggtccaaatacatgtcgcacgtctccacctcgttcagaatcacaaccgaacatttgccacgaatttgtgtggctggtagggtttcgacaatgcgcgagaggaaaagttcatgctgacgaagtctgcttagctccgctgcgtcgagtcgttctgcaccggcggggagaccggcgaaaccaacagattccgcccgaccgtcgtcagccgtctcgtcgttttcgcgtcgcgagttctccgcgtccgtcgacgagcccccgccactttccattgcgtccg

SEQ ID NO: 44387 - DNA, 80 bp, Heterodera glycines
tgtactgggcccaggccctggccgcgcagaatgaagatgccgcgctgaaggcgcgcttcgccccgctggccaaggcgctg

SEQ ID NO: 44388 - DNA, 1192 bp, Heterodera glycines
  unsure (1)..(1192): unsure at all n locations
gcgatcgagacgggactatgttgcgccccaacacccgcagtgccagggatcacacatcagctccgtaagaagccttcacttttcattgcgcctttgggttttgaacacccaatgacttgcgcatacgctaaactccttggtccgtgtttcaagacgggtcgaacagatgaccggcttttacaccgagaacgcacaactgagagcccgagctggaccgaactggttgctggtacgtgtcgcacgcgaccgccaccgacccccagctcgagtcaacacggacccgaaaccattgcacaattcacccagagtaaacagcactcccccgatccgggtaccagaccccgaaaggctggcctcaagaccgagctcacgcagctactccgagcatctcagcgcactccgcctgcaaatgccccattcgccactgaacagaaggacagcaaaccccagtctggaggctagcaggccaacgtacagcaacaaacgggtgaatgcagaccagatacgccagctctgtccgtttccacctcatcggtttcacgtcctctttaactctctcttcaaagtgctttgcaactttccctcacggtacttgttcgctatcggactcgtggccgtatttagtcttagatgaagtttaccacctgatttgggctgcgatcccaaacaacccgactccaagacacgtaaagatgggtaggcaccgccagttggacaggtcttgcaccttctctggagccccggtcaagggaaacttgaacaagcgggccaacccaagctcacggtctatacgctacacctcgcaaccccagaggagctgcgattcagcgctggactcttcccagttcactcgccgttactacaggaatcctcgttagttcttttcctccgcttacttatatccttaaattcacccaatattcacatcttaattcatttcaaaaaatcaaaacaacaatnccattaatccactcattccaccacaacatccaaaacatttttaccccctaattacaatccttaaaaccctaattaaaaccacaatttctctccatcacaccaaaaccccacaccctatctcatcaactaacttaanaacacatacaaatacatnatcccaccaatcaactcacaatcacttcattttatattaactaccctcaaccatactttccaatctatntaactccaa

SEQ ID NO: 44389 - DNA, 897 bp, Heterodera glycines
  unsure (1)..(897): unsure at all n locations
tctgaatttctataatattcgatcatttagtccaaaaatgattaattagtttagaaataattagaagaaaaattgatttcaaaattttcattaatttaattagctttaacttttgggttttataaaataaaaataaaataaaataataattttatattattttcactttaaaaaaaaaattaaaatttgaattttttaaaaattttaaaaattttttgaatttttaaaatttcccggttggtcccggttccggtcccggcttctcaggtcccggcaagtcccggtcccggttttgcccaaaattcccggtcccgctgcactctacttaaaaaacattttaaatgttattattttgtatatccagccaatttcaattaatataaattttttaaaagcggaatatttgtgaaaatcatgaaaataattatatcaaattcattaaatgaattttttggaagcaaaaatttattgtataaacatttttagttttggcatttttcatccgagtcaaattaataagaaattgtgtaatgaaaaaactttatggctaatgttttaatagctataaatttacaaaataatgatgcaatattataaaattttttatgtaaaataaccatcaatcaatatgccaatgacgaattttgcaaaaaaaaaatgagttggcaaaaatgtggcgtaaaaaattcatcaaagaaattcgtgaaaaaaagaatgaaaataggtaggaaatattgcaaatgaatcggagagtgacagagataaaaagaaatattcccggtcccgaaaaaaaatcgaggtcccggtcccggcttctcaggtcccggtttttgaaaaattcccggtcccgtggcactctagttgggataatttacttatntttaaggatttcttgaa

SEQ ID NO: 44390 - DNA, 994 bp, Heterodera glycines
aatggtatatatgtaatttgtgtattttttgactgacacttccttatgttcccttgtcagcaaagagacgacgacaaacactcggattccctggggcggaaagaataattcggcagttggaaaagaaagacttcgtcaagaaaagggttggattggcatcaaccaaagcggggagggcagcgagaagtgcgttgacgaaggcagcccttcaaaccaccctaacattcttacttagataaaatgccaattgccaacccaacagatggttcttccgttggctttgtcaccagcggatgtccttcgccaactttagggaaaaacattggaatgggttatgtggacaaggcgtatgctaaagttgggaacattttgacggtcgaagctgggcgagacagaatgattgaggtcgaagtggtcaaaatgccatttgtgaaaagcgcctattatctgaagccgacttctgtggacgaagacaaaaagaaatgattaacattaattattgtatttgcattttacattaaattatatatttccatttttaatcacttattatatttgcatttctaattaatgtacaaataaaatattgtcagtttttatgggccaaattaagtcatttaagcttccattttttgttttccgaaatatgcattttgacagatacatacataattttagtatttcatttatattattattttttgaagcgtttccatttattaaaagtcgttttaaaaaatggacggaagaataaaaccacgaaacatttataaaacgcttgaagggacatcggaaaacgaaaaagtacagcacaacgaagatgaaaggccgcccgtgttggaaccggagacgacggacaatttggcggaagaagtgcgaaattggggggggggtgacttaatcatcttttttaaaatttaaaatcccactacggataaagccaatcctcaaaaatggtaaatcggaatttttatttaaataccgcaacaacccc

SEQ ID NO: 44391 - DNA, 1170 bp, Heterodera glycines
ccccctccctttatctctctcttttttctactctctccctctccctttatctctctcttttttctactctctccccctcctccactctctctctctctctcacccctttctctctctccccctccctttatctctctcttttttctactctctccccctcctccactctctctctctctctctcacccctttctctctctccccctcgctttctctctctcttttttctattctctccccctcctcccctctctctctctctttctctctctctcgctcccctctctctccccctctctttggcatttcaccccttttttgcttaacttcttttgctgtagtggttgctggctttttgtattcgattgctgttccaacagcaaatttcgctcgctgcccgccgtgttcatttgcgtttggatgtgcgccgtggccgtgcccacgacggagttcaatcggctgagagaggagaacattggcattatgcccattccgtcgtccgtcgttgcgcccactccggcgcttctcgtcccgcctcccccaaaggtcgtcgtgcaggccacaacatccgaattctgagtccgcaccgattttcgtctcgcccgtcctctccttaaccaatgtttcaattccccgccgtcgaatcagtcccacgcgcccattcgaatcacctgcacttgaaaatgtcgcgaatggcagaccgaaatcgctgactcataaactaaaaaaacgaacggaaggaaatatccgcggactaattcggcggaataccgcgtaaaggaaagggttgcaggaggaggagagaaacagcaaaaggtaagtgatcggctgaaccaacggctccaaactgttgttgcacatcatctgctcagtccacaccttcaaaatggcgaaaagagttcgaaagtggtcgaaaaggaagccgaccgaccgtatagagaagacggacgtggtgtgggagggtgagcacggcgaaggaactcacaatggcgatcagaagtcggatcacctgaacggcggtggtgttacggcccgatttcattcccggcacctttttacgcgactccaccgtgcccaccagcactgtgccgttgggtgtgcccagcgtggcaatgccatcctttgccgtcgacagtgccaacatttcgttgttcttcatcaccttggcca

SEQ ID NO: 44392 - DNA, 1083 bp, Heterodera glycines
tccgagtggttgttgtgcgcacgacagtggtcggcatttcggaacggagtgaatgagtagggaattagtcagcagatttgtgggctaaacttggaagatattcgcatctccttgcatttggcatgcattgaatttaaaaagagacaatcgattcgacttggcaggccactgcgcccattcaatgcctggagaaagggacggagggcccgctgcgtcttcccccccccccccctctcaattctcccttttccctcccttctgtcccatcattttcctctgcctttcttttttcgcgtttgaggcaaaacagcgacagatgttatgttcttttcacaaatgttccagtttataacgccctttttcgtttcaatttcagtttaatctttaatgaatgaaagtaaaggtcgttttggaggccgacagaacggagacaaagggcaaatcaaatgattgattaatagcattaatcgatcggagattgtgaagaaaaaacaaattatacacttaatgaacaaaagtaaaatttaaaaagtaatcaacaaattaaaaggaagagaaggcataaaaaacactaatcatttatgtattggtcctttttcagcgttcttttggtaaattgtgaagcgaaaaggtaagtctctgaactcgcgtctcgacttgcgtcaggttttattgtgcagacggacttaaaggcagtcctcaattctttgattaagtcatttctgtgaacgccgtcgaaaatctaggaatttttttttgaaaattgaataatgaatagaaactttgcaaagtaaaattccattgggcgcaaggattggctcgggatcgggcacagtgccgaacataaagaggtcacggcagagtttgattatccgtaaatggtccatgtaggattcgccttaacggaacgaaatttgagcaatgacaaaaataaatttaataaattgctgtcgcctcccaccggtcggattcggtgccatgtcactgagcagcaaatcgacccttcggccattcaaacgccgtctgatttctgtctgagtggctcttctggtgaagtcggctttgcacagtaaatcaacattt

SEQ ID NO: 44393 - DNA, 1017 bp, Heterodera glycines
cataaaaatgcatttattaatatagaaacactctcaaaagaataacgaagtactcggttcgggaacgtgaaaatagaatgaataaataattgtttatatgctaattatcaattaaataataaatttaataatactagcataaaaatgctacatatatttgaaaagttatgtcgtaactatttttacattgaattaatagaaaattatttatttaaatcgaattgttaaatatatagcttaaaaaacaatttattacttctgctttttaccttttttaaaatttcaactttgaacacttttaacacattatcttaaaattaaaatatattttttattattaataatggaattaagctaaataatttttataaagaattattttttgttgattttcatttatgaataacaataaaattgtcatttagatttaaaagcattttatttgccaataattaactttgaatttaaacaaaaatattttttaaatttgttgttctatttttggtgtctattttcataaaagctctttaaagccaatttaatagttactaattattaaaataattaaatattaatagatttatacattataaacgaaaaagagttaagccatgaggcaaaaaaatatcattaacaaaaatgttttgatatttaaacaagtttcatagcttattaatatttataaaacatcttaatataaaataaaaataaatataaataatatttttatttttcgaatctaattttgcccgttttcagtgctgaaaatagttaaatgcataattgacaaatttttttttcaaatttcaattatttgtaaatagagcaaacaaaaagactaatatctcaaaattagaaaaaagtaactataaaaaatgaatttattaataaaaaatgatgccgcacgcaatgagtgaacgaacctgtgcacattaggagaacatgaagataaaataaataataatagtatttccactccaaaaaaaagatttataaaattataaaaacaatatcaat

SEQ ID NO: 44394 - DNA, 948 bp, Heterodera glycines
aatcaaatggaaatggacattaggggggggggcagtcaatcagtccgattctttgctgcctccgtactgtggggaaacactgccgacgagcgatggaccacgagcagtacgggtcacgcgcacaacggacgcaatcggagccgtacaaagcgcactgaccaagacggaattgggagacctgaggagttttaattaagctaattgaccgtatttaaggaatatttgcagcactttttcctccgtcgccaaatacaaatattcgttcggaagaattgccattgcgtggagttttttggtggacggaattcggtaaatggcgagcaaaaggacggaaaagggaacaacggacaaacggtggaacactttgagaagggagtgacggcttaagaagaggggggaaggggaagaaggcaaaaacggacggaacggaagccaattacttaaagtcgtagacaaaaagcacaacacggccaagccgatcggggccatcggatacaatttgggaaaaaagggcgccgtgccgatggaggaggggcgaaccttaagcaagaggaaaagcaaatgaaaagcaagggaaaagcggacacaccgccaaacggaggcacggactcggccatcaacagatgcgacttggcaaagtgaagctcctcgtcggacagttgacgcgagtcggactgacacttaacgaagagaggcaaagtcaatgctttcgcattccgattggttttggcatttttatgggatggtttgggaaagtgccggcatcgtaccgtgcctggtctgttggtcggcacttggtccgctggcgttgggttccaccaacttccgcttccgctgaccgattgttccaggaaaaggccggaatcgaacagctaaaatgagagaaattggccaatcagaggaaaagctgagaagggactggaagaaagtgcctgatttatggcgctc

SEQ ID NO: 44395 - DNA, 795 bp, Heterodera glycines
  unsure (1)..(795): unsure at all n locations
cagaacaaacagngccgcnngaacanccccgcngnnggncaaanngaacacgnaaaggcaaggcgnnnnnccgnanngggcaaaagnnancccgnngcncnccgangagnnngcgaancccaccgcnncgnncangncanngaaggggcgaacanaccnnccgcnggggnagnccaagacaaagggcgcnggngggnacgagcgaccannagcaacaagggaaannncgcgaacaggaaagggcngaaaanngaagggaccgcgccgaanngagccgacanaancagcanncgccaccaggcccanngncacacgccgggggaannggnccangaanagaacggcggngaactcataccgacccggactgatgaacagtgatttcatcattgttttcctcacagcgtagcgggcaggcttcacctccaactttcgcgcaatgtccagcgccaacccatccatcagagacaccttcttcacatacaatttcagtcccacaacctcgaaacggtagcggggtgcacccgcgagcggcgcaattagcacaaattcgttgtcgttcggcaaaatttcaatgtccagctcacaaaagttgatcagatacaacggctggttgaataggtcggtgtcaattttggcaatgaactgagcaacgttgctgagcgcaaacaaatcgcatcgcgctgtgcatccgtctcccgtctcaagcacatcacccgggtcccggtagtaccccgctgcattcaggtgtgagtcctttgtcgttgttgaataggagagctcatgtgaaaaata

SEQ ID NO: 44396 - DNA, 1308 bp, Heterodera glycines
cgtaaaacagatcttaacaaaaataccaggttttttatgtattttatcttgggacaaagatttatatgggcgacaatctctgaaaatctgacagtattatttatggattaaaaataaaaataaactttaaaaaaaagtcgcgggaaaacaacagaaagaaaattgataataatatcccaataattaatatttaaaaaaggaatattcaaaaacccgaagtacaagaaaaaggagggggcgggacgaataaagggaggtaagtataaattcctgggggtttgctttaaaaaattttctaaatttgggaccaaatgatcacttttattgtttggtcatcaacacaaaatttcggttgacctccctcttccctcccagtttttaaactcaatacacagcaacaaaagccaaaggctttgatcaaatggataaaggtgactaattcacttctttaaaatatattttttgctttttttttcttaatccatgctttaagattaaagggagacttatgattcttcgagagccggagcaaaatattataaaaaaaaatttgtgagttaaaagttttagaccgtggaaattatgaatagggatggcatttttatggcctgctagtaaaatcgcttagaatatgtacgagtttttgtttttgttttttaaacccaaaatattaactaaacattttctaaattgggtgtttaagttggtcaaaaatttgttttatctttccatcaataaataatcatcaaatagaaccaatttcttcaaattcaaaaataaaatttttctaattaaataatttttttattgaaacaaggaattttttgaaaggtttttttaaaaaaggccaatgggtctaatggaccgaaattttaaataaaaaaaactcggggtcaaaatttcgatttagtggtagaattgaaaaattttattgtatttttggggtcggcgatgccaaatacttttgagttttgcccatccaatttttaataaaaaatgaaaatattttttcatttctttcaaagatttttaccaggaattccaaatttaatcgtttccaatattaattcaaattcagaaagtcaattttctcgttttgtattcttttttttagctgacgaatgatgcgccgagacggaagagtaattaatgtgtgaagttgatgagaaaacaaagatgcattaacaaaaaaagacaattaacgtttaacatttttcttatttattcacaaatttgtgatgttgctggcgaaacgttagtcattggctcaatgaatgactttggaatggcctcagtaaaaaataattt

SEQ ID NO: 44397 - DNA, 631 bp, Heterodera glycines
tagggcatccaattatatggaaatccatatttttttcctggactgtgggaggcctgaaacgcacgaaaaacatgtttttagctcggtttgaagcttctaggaatttccatatccatattttccatatttcgcgatttatgtccatatttccatattgtccatattttggcatttttatccatattttggcatttttccaaaaaacctctattagaacggcccccaacagctaaattggctttttgaccccaaaaaccgaaaatttttttcaaaaaaacaatttttgcaaaattttctcgagaatattgaataaatttaaattccttaaaatcttaaatttaggtcaaaaataagcaaaaaaagtaaagtttctagttgattttttgctaaaaatgagtaaattttagatttatcatatttttttcttctaaaatgatttttaataccatatttagccatttttgaaagttttactttaatttagcgaatttgaaggaattttgaaaatttaaatgcaatttcaaccaaaaatttgaagaaattttacactcaattttaaaaaatttatgtccatatttggagatttttgccattttatgtccatatttcgcgattttgatatccctatttt

SEQ ID NO: 44398 - DNA, 1166 bp, Heterodera glycines
  unsure (1)..(1166): unsure at all n locations
aagcgctttgtgaggtataaatttctcaaaaaaagagatagccattttctgggatagagtataaatntaaaaattccctcaaaaataaaaggtctattgcgcaccgccctcccctatcatgctcgagagcatttgtatgtgtataaaatttatcaaaaaaagagatagccatttttctgggataacctctaaatataaaaatcctctgtgaaataaaatggcgattgtgcacagccctccgtnctcatacgcaagcgcttttgtgaggtataaaatttctcaaaaaaagagatagccatttttctgggatagagtataaatttaaaaattccctcaaaaataaaaggtctattgcgcaccgccctccctatcatgctcgagagcatttgtatgtgtataaaatttatcaaaaaaagagatagccatttttctgggataaactataaatataaaaatcccctcaaaaataaaagggcgattgcgcacagccctccctatcatacgcaagagcatttgtaagtgtataaaatttatcaaaaaaagagatagacatttttctgggatagagtataaatttaaaaattccctcaaaaataaaaggtctattgcgcaccgccctccctatcatgctcgagagcatttgtatgtgtataaaatttatcaaaaaaagagatatccatttttctgggataacctctaaatataaaaatcctctgtgaaataaaatggcgattgtgcacagccctccgtctcatacgcaagcgcttttgtgaggtataaaatttctcaaaaaaagagatagccattttctgggataacctctaaatataaaaatcctctgtgaaataaaatggcgattgtgcacagccctccgtctcatgcgcaagcgcttttgtgaggtataaaatttctcaaaaaaagagatagccatttttctgggataacctctaaatataaaaatcctctgtgaaataaaatggcgattgtgcacagccctccgtctcatacgcaagcgcttttgtgaggtataaaatttctcaaaaaaagagatagacatttttctgggatagagtatatatttaaaaattccctcaaaaataaaaggtctattgcgcaccgccctccctatcatgctcgagagcatttgtatgtgtataaaatttatc

SEQ ID NO: 44399 - DNA, 68 bp, Heterodera glycines
ccaaaaattttattgttagctgagtcaggagatgcggatgttaaagcgtgaaatgaacattgccgatt

SEQ ID NO: 44400 - DNA, 1190 bp, Heterodera glycines
tgtttataattatatttgcataaaatggcaaaaacctagcatgttcaatgctttataaccttttttcagaagcaattaaataaatctcttaagaacttcaagtcctctatataatctattaaatgataaaatttcaaaaaagttctgataaataattttagcggagtgatcagcttgcaaacgtcgtttggcattggctgaattgtttttggctttgtttattgcttttttccggtgaagcaaaaataaatttgtagcaattaaacactgtaagtgaatagggctaattaattttggtgattaacataacatattatattaatatacatatatttttggacataaaagtgttaattgtacatttagtcgtatgtaataatgagggcaattcagcttttaaaattctttaaagtttgaaacaatttttataaaaacaaaggtgtattaaattaatagtaaaatgattttttttaattatgactttcataaaacgggcctcaaattgttagagatggaatcgaaaaattatataaacgattaaattttattttcaccttttctcttttaagcagaatttgtcaaatggatcatcgaattaaagaaagaatgaagaaacaaaggatgtgaaagaaagaaaaataaattatttatttgttatcagagaaggaaatattacagattacttttgcacaaatttaaatattgcattttaaaaatataaatttctctttaaattaatgaatagaaaatagaaatagaattaatgcccttttcagacttaaaaagtaccaggactgaaatttctaaaccaagccaggactcggggtctgtggcctagccgatagacgccgacgatgaaaatgatgatatgctgctgcttttggagacaagtctcgacaggacaaaggtgggattttcgatctcgacagtatgaaaaaaaaattaaaaaattccgtagttcaaattggttttacgcataaatgaacaaaagcacaatgccagaaaatcgtcagtttaaaaattatttttcttagcaaaagcaattagtattcgcgttacacttcctctttctttgtttgtccctcctcatccgtctgtgtattttgtttgtttcacttaaaatttaaaaaaaaattaaatttaaaaattttgaaagtaaaaaaatttcttttttataattttttttattg

SEQ ID NO: 44401 - DNA, 1762 bp, Heterodera glycines
  unsure (1)..(1762): unsure at all n locations
attttctattcaattccattcttctgttgccgaccccctttatcaactgtggctttaaatgcacaaatgtttcaaattcgcaaaattatggctgttctgcggagggaaatgttttgcgcttttttgtcatcggtgacatcggtggggaggagtatacggtagagggcaaacagcagcagtgtacggtggaaggacacggtaagttgaagagggagaacaaaataacattttaaaatgagagaaaataaaataggaatatacaataatcacttaaacgcatttgtgaccactgtgagttaaggaacggtggctgattgtgtgcaaaataattgtcctacggtggtaaagtattatcgtccaactgtggcacaaaaagcggtggcaaaggcgatggattcgcttgctacgagtaaaggagtgacaccccgagaggtaattaataattaattaattaatcctaacaacaaaaaaaactaaaattttgatataaaaattctttaatttctcctataaatttttatttgtaaaaattaaacaaattgtttttataggattttacaaaagtgtttgcttctaaaaagtcgaaaaaagaattgtataaaattgcttctggagaaatggcaccccattttttgttgaacgttggcgacaatttttacgacgaaggcgtaacaaaagaggatgttgcagagcgttttgaacaggtaattaattgttaattaaggataatttataaaacaaactataccacaaagtatttatttaatacgggaaaagaattttttaataaaaaaaatatttttatataaataccaatggttttctttttatagaattttactgaagtgtacaattatgacagtttgaatgtgccatggtatacaattgctgggaacaacgattgggaaagcaaagatggaattgagccccaaattgaacacccaagtggcaaatggtaaatgtaaacgttttaaaatgagagtaaattctcttgaaaattttttaaaaattaatttgcctgcaaaatttcggaaatttcaaaaggttgtgacaaaaagaagcgaaaaacttttgtcaattttttccgtaaataatactaaaaaaacaaattttttgaaagtatgtactttttggctaaatatctattttattattttaaataataattttacattttttaaattttttcaggactttccctgcccaacattatgtggtcaattacgaatttggagaaagcccggacaaccgcaaaactgctcgtttcattatgatcgacacaacagtgctttgtgggaatggggcaaccgttttcgggaaaatgcagaaaaaagacacacaaaaatatgccaaaatgattgagaatgccaaaaagcatttcaaatggttgcgcaaggagttgcgagaggcgaaacgacggttgaaatatgaacaataaataaattaaaaaataaaattaatgggtattattaataaatttaaataatttactaaagaacatttcattttatgatattaatatatcgtaaataataataacaaattaaaatagaatgatcgcttaataaaaactcttacacatttaacattaaaatagaatgttaatttatttaacggattccagttttaatagaaaaaagccagcaaacaatatttgttttttataatttttagaaattttgaatanatggaaaaaattcaaaattattcaatttctccgatatntcgggtccaanattntgtcgnntctggaaagttttgt

SEQ ID NO: 44402 - DNA, 956 bp, Heterodera glycines
tagagttgagcggtaatcggtaattgtaaaaaaaccggtaccggtactgaccggtaatgcaaaaaccggtaccggtaccggtaccaactttttccaccggtaccggtaccggtaccggtaaaaaccggtaattttccaacgtaaaaatttttggacaaaatttttcaaatacaaaatttttattcagttttcgcgcgagtgcctgttttttagcattagaattgttcagaagtatatgtatattgagggtgaccaagtttttttttcaaattcaggataaagaacactaaaattcagatgtagacctcaaaattcagattattgcaaaacaagggatcagcggccaattttccaattttgcgaaggggtctccggccatgtaaattaatgtaaatcaatgaccttttttgctttcaacaccgcttttttcgcggcacgtttttctcaagacttttggggaacaaggagggccggcggtgccgataggcgccgccgggaaaaattttgtatttttaatgcgatttgttaacagaatttgtaaaaaaagaccaattgattaatttttgggtttttaggatgcttaaaatgaaagaaaaaaagttggaatatttttttaattaaaatttcaattaaaataatggtaaagaaaatatgaagaatattctatcccagtggggaattgaacccacgcgagaaataataaaatcagaaggtttagccacttgaccacttatgcatatgatcaaatgctttaaatgaaaataaatatttaattttttttttctcaaaaaatttctccttcttcaccattccctactcttttctcacccagacccacattcttaccagtgcaaatttttaccggcggtaccggtactagacaaaccggtaccgatactttgatttttgaaaaaaccggtaccggtaccaaaaaaaccggtaattaccggtcggta

SEQ ID NO: 44403 - DNA, 1129 bp, Heterodera glycines
agggaatttttaaatttattctctatgccagaaaaatggttatctcttttttgcgagaaattttgtaccatacaaatgttctcagcatgggcagcggggcgcggagagcaatggccattctattctacagggaatttttaaatttattctctatgccagaaaaatggttatctcttttttgcgagaaattttgtaccatacaaatgttcccagcatgggcagaggggcgcggagagcaatggccattctattctacagggaatttttaaatttattctctatgccagaaaaatggttatctcttttttgtgagaaattttgtaccatacaaatgttcccagcatgggcagaggggcgcggagagcaatggccattatattctacagggaatttttaaatttattctctatgccagaaaaatggtaatctcttttttgtgagaaattttgtaccataaaaatgttcccagcatgggcagaggggcgcggagagcaatggccattctattctacagggaatttttaaatttattctatatcccagaaaaatggttatctcttttttgcgagaaattttgtaccatacaaatgttcccagcatgggcagaggggcgcggagagcaatggccattctattctacagggaatttttaaatttattctatatgccagaaaaatggttatctcttttttgtgagaaattttgtcccataaaaatgttcccagcatgggcagaggggcgcggagagcaatggccattctattctacagggaatttttaaatttattctctatgccagaaaaatggtaatctctttttagggcaattttgtatcttgtaaccctgatcatcatccgctccggagagcctattccaaatttcttcctttccttcagagctgcggaaattgtgaattaattctcagaaaaatggctatctctttttaggacaattttctatctcgtaaccccgatgctaatccgttccggagagcctcttcaaaattttttccattaccctaagagctgcggaaattgtgaattaattagcagaaaaatggctatctctttttaggacaattttctatggagagaccccgatgctaatccgttccggagagcctcttcaa

SEQ ID NO: 44404 - DNA, 1592 bp, Heterodera glycines
caaatttaatttaaaaaaatacatgaaattctatccattaaaaaaataattaatttaaacttataaaatgtattcatcaaaaaaaaattaatttaaatataattgttttatttattaactcaacaaaatattttaaattaattaaaatcattgaaaataacgtaaaaatgcacagaaaaataatgttacaccgtccggactcgaactttgcccccccccccaaaaatgatgcctcagaatccccaatcacacaggcgattcatgaggtcttaacgatgtcaaaagtaaaatctgatcacatattcatgatcagcgtcataaaatagccctaataacatgtttctggaagatttttggtgaaaaaatttttccactcaaaaatcctggtcacccccctttggtcccgaaccccaaaatcacttttattttggtatcattttttaaaaatgtgataaaaatatgaaataaaatttatttggtagagcaaaaaattgcggattttttcagtatttaaaatttcaaaagcacctttacggaaccgagttctgaatttttttctgaaaattcggatttttccagaaattcttgaataactttttttcatttgaagatataaatttcatttaaatcccataaaattctcctgatttttctctatttttaaggctttattcctgtaaaattgatcaacccttcgatttgttatgaattttcaaatattaggccaaaatcccgagggccaaaaaattgccaaaaaataaagaatttttaaaaaattccaaaaattttgaaacgaaaaataaacatcatattcgtgctcagcacatcaaaataccccagaaaaatatttttgacccccattttcaacccaaaaaaaattttcgaaaatttctagggggcctagctcgaaaatttttgaaaatttcccgccatatggcacaccattcgatagagcttcaaaagctctacaattttgccctaaggcgttttttcgataaaaccaacccctaacgagttatggacccgggactcaaatgtcccgctcaggccaaaaattttttctatttccgggaaaaaatcgaaattttttcaaaaatatcaccaatcgatagagctcgaaaaacggttgcttgaaagtggtctccgtttttctgggaaaattcgttaaaaattcctaaaattcaaaaacccgaaaaccgttttttaggcctagctcgaaaaattttgaaaattttcgaaattttaaaaactggaaaaatccagctcattgaactctacaataagtctgctggcaccccctcgctcagttcaaaccctggcgagttattcgcctgggactgaagtggacaaagttggtactgaatttctccatttttctgcagcccttcatattataggtagaggcctggaattttttttgttttttagaaaacacttcaacttagccccctcacagcgaacattttttgattcgagttttagaaaaaaagttatgggccatcaaacgcaagcaaaagtgagaaattagccgccgggactcagttggccctcagagaaaaaaacctatagttttcccggattctcctcaaaaa

SEQ ID NO: 44405 - DNA, 1400 bp, Heterodera glycines
tgataacactatccaatgtttttgttcaattgctttttgaatgcaatcaatttttaaaaattttgttttttagcactcaaattcttacaaaatgaaaaaatggtacattaaatattataaagatttcttaaaaacttaattacactgagattggaataaaattgatggcacattggttaaattcgcattaataaaaattgaacataactggaaatcggcccttaggcctaaaatttcgtttttgaggccccataactttttggtttctttctatggaggcgtaatactaaaaattcgcaatagaacgaacgaccctactatatccaatgttgccaaatttatatgtgtcttcagagttacagttatttttattatttataattatttttcaattttttcatcttttttacagcttaaataaggttttcttttaaattctacgttaatagtatattttaatgcttattaatttatcatctttgttttgaggcaatgtaatgcctttaaaattcggccacgcaattggcttggaatgacgacacgacttttgtacagaagacagcccccaatttcaaaaatttcatttattttcggattaaatggtgaaatttcggtttcactgcacttctttggccaaccagaaataaccaaattaacaatttcctgtagggtctcatctttggttgtaggttgcgcaacttcttgtgccgtgacgggaagatgatcggtttgcgactgtaatatcgtgttaatataactcggtttcgacgcaaatgttggcaattaaaacatcttcctcaggccttggattgcaatcggcatgcggaataaatcggaattccctttttggagccgaaaatggcaaggaaaggcttgtgatcagtaaataaagtgaatttcctctcgaataacattcagtggaatttctgcactgcgaacacaagagccattgcttctttttcgatctggctgtaattctgctgggaatttgacaaaacacatgaggcatgttcgatcactttcccggatttgtccggaaaaacatggccagtcgttgcgccaataccgtttttggaagcgtctgcggccacgattattggaagagtcggattgtaatgggtcaacagcagatcagaagtcatgatcttcgccttttcaaaagccttctgtcgctcttcgctcccattccaattttcatcctttcttaggagctgatcaagcggagtgcgtatctcacgtatttcttttatgaatcggccataataattaagcgctcccaaaaacgatcgaagtgacgttttatcgtgtggcgcgggcataagctgatcgcttctgaacgtaccggagcttgacccacggaagtgatgacacaatgtgtccaagaaaatgcaattcttttt

SEQ ID NO: 44406 - DNA, 802 bp, Heterodera glycines
aataaacttcaatttctccgtttcatacagtcccgagatggaatgaaattttccaacaaaagtttgcacaaatttcatttcaaagttttacacaataattaattatctgtctcataaactatcaaatccgcgaatttaaaaattatttctacagtccatgacgctaggaaaaagtgtgggaaatgaaaatgtcccacttttgctgttcgctcatttcccggtcctttaattccatttttaaacccacaaagtttttcacttccaaggttttgcacattaattatttgtttttactatattttgttacagtatctgctcaaagtggaccagtacatggtggaggacggggcggaggatgagcacgacttgctgtacggcacggacgacgacgactcggccaactatcgccagtcgtcggtgcgcgagtcggactattacgcagcgggcactggacgcggtcggcgcggcagtggccgacggagaaggcaacgcggcggcggcagtgcggcagcttcttatcgcggcggcattgccaatgatccgcagcagcgacaacgcgtgtccgcctggcggtcgccgccgcgacgcgtgcgcacgttgacgcgatggattgacggagtcagtgggacgcgcgagagggggaggggcgacactttcatttagtttcagaatttgtttttgtgatgcattttaatccccaccccctttaacaataagaaaaaaaatttgctaaattttgtataaaaaagaaagaaaataactaaagtaggttcttggaatttttaggaaaagaaataataat

SEQ ID NO: 44407 - DNA, 858 bp, Heterodera glycines
ggagactatatggcatagggcaaaaattgaaacccccgtcacgacgccagagcgtttttttcttttttatttgaaatatttgtggatccagttcaattagggagccgcgcaactcgccgcgccttttgctatttagccgtccgatttcaaaaaaaaattaaaaaaccctgaggaccgcggagcggtccgccaatagcgaaaaccggcgtttcttttgcccatggttttattcatatctgcattttataattatttttcaaaataatgtgaattcgcgcggtgactccgatccgtttacatatttatttcagaaaaagcggccaaaaatttcaggcactatttcaacatttgtgattttcagcaaacagacagaagcataagccatgatgacgattcttgtgcaacgtcttgacggtaaacttcattacatccattccgaccaattttgagtcccggacccgaattcgaacataaaatgaagcttaacgatttcgcacttttcgtcaaaaatgtgtttaataataatgcatagtctgaaaatcttacaataaagttcattcaagcagttttagtcgaaaatgctaaaaccgaagtttcgactttttgttcgagttcggtcaagggttcgaaactggttgaaatggatgtcattttcatgagcagcggcccggcccgaaaacacatttaatccagaataaccggctattcgtttttctttttattttttaaattttttattatatacctatcatgtatcattctcaatcactaaaaaaggcttggttcaaagttcaaaccagggttacacgggcccgggtatttaaacattggctcgggtccgggcacccggtaaaaccg

SEQ ID NO: 44408 - DNA, 1008 bp, Heterodera glycines
  unsure (1)..(1008): unsure at all n locations
atgatttcaaaattttcaattttttctagtctaatctactcaaaacggttcagaattcgataaaaataacattcacggtgcgaacaatggggtttgaaaagtttattggggaaaaaaagactttacaaaataatacccctgggagaagggagtgggaaacatgatttcaaaattttcaattttttctagtctaatctactcaaaacggttcagaattcaataaaaataacattcacggtgcgaaaaatggggtttgaaaagtttattggggaaaaaaagactttacaaaataatacccctgggagaagggagtgggaaacatgatttcaaaattttcaattttttctagtctaatctactcaaaacggttcagaattcaataaaaataacattcacggtgcgaaaaatggggtttgaaaagtttattggggaaaaaaagactttacaaaataatacccctgggagaagggagtgggaaacatgatttcaaaattttcaattttttctagtctaatctactcaaaacgttcagaattcgataaaaataacattcacggtgcgaaaaatggggtttgaaaagtttattggggaaaaaaagactttacaaaataatacccctgggagaagggagtgggaaacatgatttcaaaattttcaattttttctagtctaatctactcaaaacggttcagaattcaataaaaataacattcacggtgcgaaaaatggggtttgaaaagtttattggggaaaaaaagactttacaaaataatacccctgggagaagggagtgggaaacatgatttcaaaattttcaattttttctagtctaatctactcaaaacggttcagaattcaataaaaataacattcacggtgcgaaaaaatggggttttgacaagttttattgggggaaaaaaagactttacaaaataatacccctgggagaangggagtggngaaacnatgatttcaaaattttcaatttttttctagtctaatctactc

SEQ ID NO: 44409 - DNA, 996 bp, Heterodera glycines
  unsure (1)..(996): unsure at all n locations
tgagcgtaattacgatttttacttacaccattttttgctaggcttagatcacatgcgattttcggcactctgataattttagcgttcataatgggatgtataaaggcgattgtagaaggaattggaagcgctaaaattgtttgagaagctttttgagcgtaattacgatttttacttagaccatttttttctaagcttagatcacatgcgattttcggcactctgataattttagcgctcataatgggatgtataaaggcgattgtagaaggaattggaagcgttaaaattgtttgagaagctttttgagcgtaattacgatttttacttgaccatttttttctaggcttagatcacatgcgattttcggcactctgataattttagcgctcataatgggatgtataaaggcgattgtagaaggaattggaagcgctaaaattgtttgagaagctttttgagcgtaattacgatttttacttacaccatttttttgctaggcttagatcacatgcgattttcggcactctgataattttagcgctcataatgggatgtataaaggcgattgtagaaggaattggaagcgctaaaattgtttgaggagctttttgagcgtaattacgatttatacttacaccattttttgctaggcttagatcacatgcgattttcggcactctgataattttagcgctcataatgggatgtataaaggcgattgtagaaggaattggaagcgctaaaattgtttgaggagctttttgagcgtaattacgatttttacttacaccattttttgctaggcttagatcacatgcgattttcggcactctgataattntagcgttcataatgggatgtataaaggcgattgtagaaggaattggaagcgctaaaattgtttgagaagctttttgagcgtaattacgatttttacttgaccatttttttctaggcttagatcacatgcgattttcggcactctgataattt

SEQ ID NO: 44410 - DNA, 963 bp, Heterodera glycines
  unsure (1)..(963): unsure at all n locations
ctggccctatcaaacaatcttacgatattgaaacgcaacaaaaaaaattcttgaccaaaaaatagctatctcttttttctcatttttttaccgcaaacttggtaccaacagttgccttcttttgtctggccctatcaaacaatcttacgatatttgaaacgcaaacaaaaaaaattcttgaccaaaaaatggttatctcttttttctcatttttttaccgcaaaattggtaccaacagttgccttctcttgtctggccctatcaaacaatcttacgatatttgaaacgcaacaaaaaaaattcttgaccaaaaaatgtctatctcttttttctcatttttttaccgcaaaattggtaccaacagttgccttctcttgtctggccctatcaaacaatcttacgatatttgaaacgcaaacaaaaaaaattcttgaccaaaaaatgtctatctcttttttctcatttttttaccgcaaacttggtaccaacagttgccttctcttgtctggccctatcaaacaatcttacgatatttgaaacgcaaacaaaaaaaattcttgaccaaaaaatggttatctcttttttctcatttttttaccgcaaaattggtaccaacagttgccttctcttgtctggccctatcaaacaatcttacgatatttgaaacgcaacaaaaaaaattcttgaccaaaaaatagctatctcttttttctcatttttttaccgcaaacttggtaccaacagttgccttcttttgtctggccctatcaaacaatcttacgatatttgaaacgcaaacaaaaaaaattcttgaccaaaaatggttatctctttttctcatttttttaccgcaaaattggtaccaacagttgccttctcttgtctggccctatcaaacaatcttacgatatttgaaacgcaaacaaaaaaaattcttgacctaaaaaatnggttatctctttt

SEQ ID NO: 44411 - DNA, 816 bp, Heterodera glycines
ccttccggaacactgatgctgtttatatttagagcgtaatgagctgatataaactgaatcagtgtttgcggaggaccgagctgataagtcccaataatctccaatttacaattttcatgatcacttttgtgatattctcaatatttcaatttcttatatccaaatgtaatctgtataagtttacagtaggaaattgtaatttgggggttattggcgatttcaaatcgatccttccggaacactgatgctgtttatatttagagcgtaatgagctgaaaatgtcagaattcaaaaagtggggtcgcgaaaatagtaaatctgaggttattggcgcgtatcaacctgatccgtctgcaacacttaaacagtttatatttaaagcctaattagcagaatgtgaaattctctcatttgttactttatgatcatttttgtctaattcgcaaaattacagctcattcttcgcgaaatataaactgaatcagtgtttgcggaatgaccgagctgataatcgccaataatcttcgattacaattttcttggtcacctttttggaattccaccatttcaactccttatcctctaaatataaactgaatcagtgtttgcggaggaccgagctgataagtcccaataatctccaatttacaattttcatgatcacttttgtgatattctcaatatttcaatttcttatatccaaatgtaatctgtataagtttacagtaggaaattgtaatttgggggttattggcgatttcaaatcgatccttccggaacactgatgctgtttatatttagagcgtaatgagctga

SEQ ID NO: 44412 - DNA, 1197 bp, Heterodera glycines
tttaaatttatctctatcccagaaaaatggcttttctttttttgagaaattttatacctcacaaaagcgcttgcgtatgagacggagggctgtgcacaatcaccattttatatcacagaggatttttatatttagaggttatcccagaaaaatggctatctctttttttgataaattttatacacatacaaatgctctcgagcatgatagggagggcggtgcgcaatagaccttttatttttgagggaatttttaaatttatactctatcccagaaaaatggctatctctttttttgataaattttatacacatacaaatgctctcgagcatgatagggagggctgtgcacaatcgccattttatttcacagaggatttttatatttagaggttatcccagaaaaatggctatctctttttttgataaattttatacacatacaaatgctctcgagcatgatagggagggcggtgcgcaatagaccttttatttttgagggaatttttaaatttatactctatcccagaaaaatggctatctctttttttgataaattttatacacatacaaatgctctcgagcatgatagggagggcggtgcgcaatataccttttatttttgagggaatttttaaatttatactctatcccagaaaaatggctatctctttttttgagaaattttatacctcacaaaagcgcttgcgtatgagacggagggctgtgcacaatcgccattttatttcacagaggatttttatatttagaggttatcccagaaaaatggctatctctttttttgataaattttatacacatacaaatgctctcgagcatgatagggagggcggtgcgcaatagaccttttatttttgagggaatttttaaatttatactctatcccagaaaaatggctatctctttttttgataaattttatacacatacaaatgctctcgagcatgatagggagggcggtgcacaatcgccattttatttcacagaggatttttatatttagaggttatcccagaaaaatggctatctctttttttgataaattttatacacatacaaatgctctcgagcatgatagggaaggcggtgcgcaataaaccttttatttttgagggaatttttaaatttatactctatcccgaaaaatggctatctctttttttgataaattttatac

SEQ ID NO: 44413 - DNA, 1376 bp, Heterodera glycines
  unsure (1)..(1376): unsure at all n locations
ttntaattttggtttttttttattttcctaaatttgattttatgttttaggtatctataaaaattttatgtctaatcaactgtaaaatctgttcatccaaaattaagctctcctccatcaaggcggatattgctgttgacgagctccttcaccgtttttgtgcgcgaaaagtttaccaaattaatttagttttgtttttgaagatgccctaaaatgccgaaaaaagcgaatgggattttgtcgagtaacgaatcaaaatatactttgagtgcaaaccactcgacgccgcaaagccggccgcttcaggcgttgtccaatccagcgactccccatttttctcccatttggccattggccattatttaatggcttgaggtgacgtgcgcttaatgttatttgcaattattacgaaattggcagcctcatttatgattcggtcgagtttttgtgaagtcaaaattttttgtcactttaatactcccaactccgggttttcgattttgggcatttatttattagtgattttaaacaattaaaatttgccaaacaaagggcacacgatttctgctttgctatgtcacgaatagacgcaaatatttaaaaattttcttttctgtaatagatttttcaatttcaccgtaaattccttaaaaaatcgttttttccatattaaatgatcaaaaagatttattttattcaacaaacttataaaagcatttaataaattacaatgaatgaaactcaaataaaagagaaagaagaaatggtcataatgcaggtgatttattataatttttataatctaaacatttttttaataaagatgtgttctgatcaaaatccttgctggccaatgattggttatggcatatttttgctcattttgacaatcggtggaattttgtcaaatttttcagtgattttcatcacaattcgaacaaagtttaaaaatttttaataaatcaattaattacaatgaaattttaagatcatttcgtggttccgtgaatattttgttggcattttattctttttttgaaatcatcaatttttgtggcaattttttgtcaatttttacggcattttcaggccaatattttatgccatttaatgtaggaatttattttggcattattcctttaacaagcatcggctgatccctccttataatgcttttcattggcattgaacgattgtttgttgtgcttttttccgctaaagtataaaaattatatttaaaaacaattttttaaatttcttttttccataatgaaattcaactcgtctttttttctcactgttgtactgatggatactgtaattcacatgattgtaccgccatttgtttattggagttattatgacgagaaaatgaa

SEQ ID NO: 44414 - DNA, 1118 bp, Heterodera glycines
tccattttttagaaatcccgaattagggaaatgttttcttattatttagcaatttacaacaaattcttttaatttaatttacttaacaatttctatgctaaaacatttttaatttggactataatactttaaaaaacaaacaacaaacaaactgatcatcacctgatcaatcgttgcgcggacactgtacaccgggccattgccagttttgtgccgtcgtccccaaattgcgccctgtggaaaaattaaattttccgacgaaaaatgggtgtgtttttttaatttgtttcaattttcttagcaaataaatgcgcaaaattgttcgttaacaattagcacggtgcctatcggtcccgaacaatttaattactttaaaacaaaaaattttttcaataaaaatgaccattttttcgcaaaatcggctaaaaatgctattttttatcccacggcattccacactaatgacaaattttgtgtatttttagtccaaaattttaaaaatcggaattttggcgtccgacaatgtcgatgggatgcctcggggaagccttctatgttaacgggcttcagaccaccgtgtgagaaaaaaaacaattgctctagcgaagaggcctatttttttagaattttttgcgctaaaatatttctcagatttgcctaaaaatttggaaatttccaagcggtttcccattttttttttgaatttttgcgcccacttggcattggtatgggcgcaattcgcggaagaacagcgcgtcccacagggtcaactgttccgcaatttgcggcacattttcggtgcccgtgtcgaacatttgcgcccgctcctgcgccgaggcgagcgcccgcgcgtagcgctcgtccgcctcaatggcgccgggcgccgaagaaacggacgcggacggcgacagtggcgactaaaaattaaaaaaaattaattgtttaaaaaatttagatgatacctttccattttcaaatccccgcccgaataagttttcaaaataaatttaaaaatgtcgatactctaaattttccacccctcccccctcacccatgaaaaattgtgaatatttagcagaaattaaaatgccagcatatgaatatttccaggaattaga

SEQ ID NO: 44415 - DNA, 827 bp, Heterodera glycines
aagagctgcggaaattgtgaattaattctcagaaaaatggctatctctttttaggacaattttctatctcgtaaccccgatgctaatccgttccggagagcctcttcaaaattttttccattaccctaagagctgcggaaattgtgaattaattctcagaaaaatggctatctctttttaggacaattttctatctcgtaaccccgatgctaatccgttccggagagcctcttcaaaattttttccattaccctaagagctgcggaaattgtgaattaattctcagaaaaatggctatctctttttaggacaattttctatctcgtaaccccgatgctaatccgttccggagagcctcttcaaaattttttccattaccgtaagagctgcggaaattgtgaattaattctcagaaaaatggctctctttttaggacaattttctatctcgcaaccccgatgctaatccgatccggagagcctcttccaaattttttccattaccctaagagctgcggaaattgtgaattaattctcacaaaaatggctatctctttttaggacaattttctatctcgcaaccccgatgctaatccgttccggagagcctcttcaaaattttttccattaccctaagagctgcggaaattgtgaattaattctcacaaaaatgtgtatctctttttatgacaattttctatctcgcaaccccgatgctaatccgctccggagagcctcttcaaaattttttccattaccgtaagagctgcggaaattgtgaattaattctcagaaaaatggctctctttttatgacaattttctatct

SEQ ID NO: 44416 - DNA, 596 bp, Heterodera glycines
gcacagcaaagcactaatagggtgtttgattcacttcataaaataattccttacactaaagttttttacaaccacttattgtcaatctaatttcttgcagatttaaagccatccattgcctgccggttctcggcacaacaaagcactaatagggtgtttgactcacttcaaaaaataattccttacccaaaagttttttacaaccacttattgccaatctaatttcttgcagatttaaagctatccattgcctgccggttctcggcacagcaaagcactaatagggtgtttgattcacttcaaaaaataattccttacacaaaagttttttacaaccacttattgccaatctaatttcttgcagatttaaagctatccattgcctgccggttctcggcacagcaaagcactaatagggtgtttgactcacttcaaaaaataattccttacccaaaagttttttacaaccacttattgccaatctaatttcttgcagatttaaagctatccattgcctgccggttctcggcacagcaaagcactaatagggtgtttgattcacttcaaaaaataattccttacccaaaagtttttta

SEQ ID NO: 44417 - DNA, 942 bp, Heterodera glycines
  unsure (1)..(942): unsure at all n locations
caaaatttgtttacatttcgacattgggagaaataaattcaatttttttccttttcaacgatttcacnagctattatttttaaagttgttttggcatttctgaaaaagttatcaaatggtgtcattttttggttttatagtcgtaatttaaaaaattggctttgtaattatgccctttttaagtgcttttcatttcaggatttacatattaaatttggaccttttctcgatgaaaaagcagcagagtttgattctgatactttgaatcgttacaaggagcaacagagggtaagttttgctttgactatttcttaaaaaatttataaatttaaaatttcttactattttttttgaattttcttataaaaatttctacaatacctaagttttcttggaaattttctttctttaaatttttattaaaaaactgatttcatttggcagaataaaaacacataaactgttgatcaaagagggagcatttttagatggtgggaaattagtacaagtacttaaccatatcaacaatgcttaatttggttaacaatgaaaaaattatagtccaaaaattttccggcaatgttttgggatgcaccagaaatgtttaattgctttccataacaaaacacccaaaacattttctgcaaaaaaaatggcgctacttgcaaagagcgctcttttgaattctatcaaaaacaaaaggggggacccttttgttttgcaaaaaatttttgagatacaaatccatgaaaatttgttatccgggggttttagaggtcgctgatcacgaatctgacatctaattcgaggtcttggaccccaagaaccccagggaataaattttcatgactaaatattaaaaaattttgcaaacaaaaaggtaccccctttgttcttgcttaaagataatttcaaaagagcgctctttgcaagtagcgccga

SEQ ID NO: 44418 - DNA, 1617 bp, Heterodera glycines
cctcattcgcgcaatgacttgctgaatttgattcgctttcggagattcactctaaattttgtttgtttcattattattatttaaccaaggccccaaggggccctgtgaaagcgccggggccgctttcaacactacccacctggatttattggttaaacaataatcaaataaaattttgttcactttgattgtccgtttgtgagtcggcattccagatggagtttcgttgtgcaccgcctccatgttgaagtcggtgcggaaattgtgcatctcctcgtttattgattatactttaagtttatggaatgctaaataaggatataaaaaaatatttgtattttaaatactcattaatatattctctgccaatttgaattttatggcccgtttaattggatacaataaaaaataaaggaattttatatataattttaataaataatttttaatcaattattggctgatagtttcacgaaaaattatttatttaaaatatcttttaatttgtgtctatcatgtcatttatgtaaaaagaccttttagtctttatcatattataatttgggtttatcacagtgatttccgtctttttcaataaaatttttaacgatcctcaccttcttgataaaatcgcggcctttatccagaaattacttaattaatattttttataaattatttaaattcattttttgttgtatttgatagataaatgaacttttgactcaaatgcatttcttttgacaatttatacacaaaaatttatatttatgaaaaaagtacctttattattttggtcttttaattaacattttaataatttttttattttttacttttttttactatgagtaatataatataataattcatctaattgctgataaattgacgaaatatgcaaaatcctgctgtacagacttgatgtctcattaataaaagtagcgctatgacttattaatttattgtttggaattaaattttatgatataatattattatacaaacttttcgattgaatatatatattctttgttattcgtgaaaagaagtgtctgtcaaaaatatcagtcagttgtttgccaacattatatgtgaatataagtttaataattttaatagttattcatttatacaaattttttacattgcaatacgtctataaataaacaaaaattattatattttaatattgtttgccgttgttgctataatcatgatgttcgctacataaattagggacaaaaacgctatgattgtgataaatatttttgcaattgtctaaatgaaatttaactgttttttcatatttttggtagataggtttaaagaaaaatgaaagattcattatttattggattagttcatgaatcatgatataatataattaaattgtatttgcatttatttataagtattctattaaaagtgcacttttcattttgtatgttaatttactagcacagaaccgacagttcacgcacccgctattaaaatatatatattaacattttacgtattttactttagaagcaaaaatttaaaaatgaaattaaaattacaatctttaatttaaataaaagaaataaatgatataatacataaagatttagtaat

SEQ ID NO: 44419 - DNA, 1131 bp, Heterodera glycines
caggaaattgcaatttttaagattttttgtaaaattcttttgggacgcgggaaagagagaaatatagagagacgagagataatgagagaaagagagagggttagaaaaagaatgagtgagaaaaaaaagaggaaaatgaaagtgagagagagagagtacagcggagagggaagtgagagagagaaatagagagagagtaaagaagggggaggagagggagatgagagagcgggaaggaagatattgaagggagagagagggcggggtgggatgagggaaagaaagagagaaagtgagagagagggaaacaagagagaggagggtagaagaaatgggaaggagatcaacacctcaaaaaacccagctttgatagcgttgaaaagcagcaaaatgctgataaatcatcagagtttggagccctgtttatatggcatttaaaatccatgtgaaaatacactttagactttatacactggtggaaaaagtctttgaacaaacacaaaaacgatttcaaaaggctcttaaaaatttgaaataattcatgcaagcttatcttttgatgtttaacaaaaaagtcttttacacaaacttgatcagatcactccttcatagtgaccgggacacccaaaaatacactgaaaatcgggaaaattttcgaaaaaaattcctagggggttagaaaaaattttctggaaaattttagtaggcccattggaagagcacaaaattcccttccaaattgccctttgaatgattgggctgctaaatatggatttatttccgaaaaccgccgaaatgtggatttatatggactaaaaacctttaccaaatcaaaaaattttggctctagtgcactttatgagtccaatcgacttttatgagtccaatcaattgaaaatactcggtttttctagaataactttgttggtgctaggtcgtttcacaaaaaagctcagtgatcgataaaattaaataaatacatttaattattcaattcacaaaacacggtgccgtccggttaatactaataatgtacggcgggacgcaagtcgttttcaaattttttaatttttcaatttttacatcacttctcgcaaattttctccatttgtagtagacatagcctgacgc

SEQ ID NO: 44420 - DNA, 746 bp, Heterodera glycines
cctttggtgggtagatgatccatcgccgtctctcggggcaaaaatgagtatcctcgttccgccccgctcgatggatgtgacggatttttccccttttaccctcgcctcgttatttcttcccgttctttcgtttggtctgacagtgtcgcaatgtgatggtcgatggaaatttggggaggcggaggataagcacaaagaaaagggggaaaatcggagccatccgtcactaattattctttcatggtgcccttttcgaccgaatcagaaggaatcgaaactatgggctttagaggtttgattggaagtcgagttgggggggcgcacttgaaaggaagagaaaggggattcaaggtctgtgcctcagaaatcgcaaggagcttgtttttatgacaataaaacactcggctgacgcattttctgctagcgcattttctactgacgcattttccactgacgcattttccgggcgccgtgaagtttagtcccgtcatgaaatttggtccaactaaaaagaatatttgagttcatcattaaaagtaaggagttttggagtccggcaatgggtccgtatcgttttggcgccgatgttttggcgccagcccaagttttcggactataactttttttgttgttaccaaatccagcaatcttggtcttcacgattagacaattaccaaaaaagttataacatgaaattccaaaaaagtcgaaatttttgagattttttcttattaacttttttagaa

SEQ ID NO: 44421 - DNA, 1060 bp, Heterodera glycines
aatcagtacttttcacgcctataaaattcgggccgcttttattggtgtttgtgactagaaaaatagcagatgcatatcaaatgactacagaaaattacagcctccaagaaaataattgctttgcacaagcaatattttgtagagcccatcaaacacattgtgcttataggaaaggcagaattatacaataggggcctttttattatgattacaacaaatcagcatggcgtctcactgatatggtatgtttcagttaaggtttagccgatctacaaatttcggcactgtctattttgtaaaagcgaatcaaattcctttggattccaaagtggaattacagaattgcgaaggcaaatcctaaatagacaaagacgctttcattataaagctttaagggaggaaaagtaatacgaatatttcaatttcttacttatccgaatagacaaagataggttacacacgaacatttttatagaaattccggctgaaactaaaatccctcttttggtcttaacctatgatttttggatggatgaattaagtatagaaggcgtcgcagaaatacattcatattttctaaattcgggttgcagaaaattaagatttaaaagaggctgaattacagatgattttcaaattttgggtgtatccgaatagaaagaagttggaaatcagtacttttcacgcctataaaattcggccgaaaaatattggtgtttgtgactagaaaaatagcagatgcatatcaaatgactacagaaaattacagcctccaagaaaataattgctttgcacaagcaatattttgtagagcccatcaaacacattgtgcttataggaaaggcagaattgaacaataggggcctttttattatgattacaacaaatcagcatggcgtctcgctgatatggtatgtttcagttaaggtttagccgatctacaaatttcggcactgtctattttgtaaaagcgaatcaaattccctttggattccaaagtggaattacagaatttgcgacgcaaatcctaaatagacaacgacgctttcatataaagctt

SEQ ID NO: 44422 - DNA, 1097 bp, Heterodera glycines
aagcatgcagaaatggctgaatgcttgcagaaaattgctgcggcaatgcgcgaaaataaggaaagagtgtatttagaattttgccaacgtttggatattgagacaaaaatcaatcaagcagagattaagaaaaaagaatgaagagttaaaaaagaacacatggaagatttaagtgacttattgccagaaagttcagtttggagtgttatttataccccacgcaatcaaattgaaagaatcaaaagggtcaaaatcccactgattcaacttaaaaagtttgatggatcggttgagagttggataccattttgggaaacatttcgagtacatgttcatgaagacaattcagtaacaaaaattgaaaaacacaatttgttggaatcaaatttagaaggggaagcaaaagacttaatagaaggcataccaatttctgaggatggctaccaatttgcgattgatctattgttagaaaaatttggtcgcgcattaaaccaataaataattttgattccacaaagtgacacagttgaagaagacgaaaaattatacattaaattcgaaaaaatttgcagactgttgtcaagcttaaaccaaaatattgatttgtctcctcattatttatttttagaagggaagttatcaccattagttttagacaaatattttgttattaaagacgcagaagacaaccaaaattgggacacaacaaaattcagaaatgccttatcaagagcaattgaacaaataaaaaacagacaagaagtaaaacaaaaatgtggaaaagaaagagatttaaattataatagaaatgattcagaagttactatgaattttgcagttaaatttcgagaagaatgggaaaagttgctgaatgaacaaaaaaccaaaaaattggaaaaaaccaaagagataacagaaggagtttagctcatcagaaggcccagaaaaacaattcaaaaacccaaaattcgaaaggttttcaagaaatcaaaaaagaggagaaaggggaaggaaaaatgggtccccatatccaagcaaatttcggtcgaattctaacagttctaattattccaatgattcatttattcaagcaaaag

SEQ ID NO: 44423 - DNA, 1122 bp, Heterodera glycines
  unsure (1)..(1122): unsure at all n locations
tttgctccccataattgtttgagtaccccaacgggacacttgaaaaaatcgatttttttgttntcggggcagtccccccgaaccgatgcgcccagatttatggggagaccgaattcttcgggaatagcttccctattcattaattatttatatttgcaaaattnaattcataaatattttntagaacgtgctctgnaacgcaccaaatgnttaataaaagttaaataaggctctctgatgctttttctatcaaaagggagatgaataaatattttaaaaatgtttaattcctttttaaacaggccaaaaagtttaggcttatattttaaaaagtttcatcgaacctagcgcactaaaatcgataaaatctctccaaattttgcaggccttctccattgtaaaggactaacttaacctgaaaaaatgccaacgcttgttgtttttaaaatttttcgaaattctgactttttcattaattatttattattttgcaaaattaattcataaatattttttagaacgtgctctgaaacgcaccaaatgttaattaaaagttaaataaggctctctgatgctttttctatcaaaagggagatgaataaaatttttaaaaatttttaattcctttttaaacaagccaaaaagtttaggcttatattttaaaaagtttcatcgaacctagcgcactaaaatcgatataatctctccaaattttgcaggccttctccattgtaaaggactaacttaacctgaaaaaatgccaacgcttgttgtttttaaaatttttcgaaattctgactttttcattaattatttattattttgcaaaattaattcataaatattttttcagaacgtgctctgaaacgcaccaaatgttaattaaaagttaaataaggcactatgatgctttttctatcaaaaagggagatgaataaaatttttaaaaatttttaattcctttttaaacaggccaaaaagtttaggcttatattttaaaaagtttcatcgaacctagcgcactaaaatcgataaaatctctccgaaattttgcaggccttctccattgtaaaggactaacttaacctgaaaaaatgccaacgcttgttgtttttaaaattt

SEQ ID NO: 44424 - DNA, 1367 bp, Heterodera glycines
cagcgaccagcgagttttgagcgacggcgagtcgtcgagcgacagcgaccgaaagattttgagcggcggcgagtctccgggcggcagcgatcggcgagttttgagcgacggcgagtcgccgagcgacagagaccgaaaaattttgagcggcggcagcgaccagcgagttttgagcgacggcgagtcgtcgagcgacagcgaccgaaagattttgagcggcggtgagtctccgggcggcagcgatcggcgagttttgagcgacggcgagtcgccgagcgacagagaccgaaaaattttgagcggcggcagcgaccagcgagttttgagcgacggcgagtcgtcgagcgacagcgatcggcgagttttgagtgagtcgccgaacgacgccggcgactctggcattccctcgggcgtgctcgttggaccaaagcgttggcgtgaccttttggtgttggaggacagaaaatggcttcaacttgatctactcacaaacaattagctaacaccacacacttattacacttattcaacagaatacgggggacttttgttgcttgtgacggaaacactctattttttgtttttgtattaacattttttatttcttggcattttgcttataaactctgtgatctctgatctgttttaatcattagggaccgaatttatatggacaaaaaatacgaaaatatggacaaaaatttctgaaaattatctaaatttttgtaaaatctaaacccacaaaattttttatcaagagtataaaaaaatcatttaatacatgaattatagaatttgttaacggagacttacgaaaaattttgagacaaagaaaaaagattacaaaacttaataaattttgcaaacaattaatatttatttaattctaaattcttattactgataagaatgtactattttcttttttgattttgaaaagaccgtacacatcaatttaaaatacaactaaatcaagctaagaagcttttttcctcgccaaacttatagatcgaggcataatccatatttaacccgtatcctatatggcatctgattaccggtagacgtaccctataaatctggaggcactagtggaacaacttgagtagctttatgtctgttaggtggtaccctccctgaaacaaagatcaagagtggagacttttcggcgagttgactaatatagaacattagtattctaacccactacctaagaagtcacctgctcccacttgtggattctttttcggagggccctccaacagcaaaagtgccgcaaaaggtggcggaacgtttcgtcactaaacttttcgtcactgaaataaaatgaagaattttaaaaggaaaaaaattcaattttttaaaat

SEQ ID NO: 44425 - DNA, 862 bp, Heterodera glycines
  unsure (1)..(862): unsure at all n locations
tttttaacagattttcactgaaattttggggcattttacacacacgaaaatgaatcaaaatgtacttttttcaaattaaaattttttcaaataatcgcttcaaaaaatgatatgtagggctgcgacttttagtgacgaaaaatctcaaaatagttaactaaaatagtgagtaaaaattccaaaatagtgacaaaatagtggcaaaaagtgcgaaatagtgacgaatattgacataatttttagcccaaaattgagcaaaaataatttttattcactggttgcatttgcaaatgagtaggactgggatttttaagaccaaaaaacccaaaatagttacctaaaaaaaaaaaaaatttataatacaaaggggggggggggttaatctacctacactgtaagtttcattcggaagtcccaccgtcacttgggtacctctcctttgttaggggtgtattttttaggtcgattcttaggggtgtattttttggttttattcagggctgccaagtgtcctttttttaaagatttgtccttttttggaggggccggatctttaaaatttaaaatgtcctttttttaaagattgtcctttattttaggcttccccaaactttttaaattttttgtgcttaatgatttatttcgctgataaaaatgctacaaaaactcccaatttcaaaaatttttcccggcggcgcctttcggcaccgccggccccccaaaacttattttttgttttcttaagaaaatggcttaaaaccgtaaaaattggtcatttttggtgaaaatctgttaacaaatagtgtaactgctcaaacacaattttacaattttctgaaattttttttcctaaaaannatca

SEQ ID NO: 44426 - DNA, 1154 bp, Heterodera glycines
  unsure (1)..(1154): unsure at all n locations
aaaagtgatttccgacttttgttcaattcgattcaggggttcgaaattggccgaaatgcgtgccggattcgtaaccagcgaccccngaaaaccntatatatncggtatgttttttgtttggaaattgaaaaaagatgaaaaattttgtgtggcctaaactgtataaaggtgccaaattgcaccgtgaatgcccgcccctcgctggtctgaccacgttgaaaagctcgggattcatcccttccccttgccctccctgccggtatgtatcncaaaactcacatcacgcatgtggtccttcaagtcctgccacgagccgctgatgggcagcccggacaccgccaaacggtagggaaagcgtccgcgcggtcggtcacgcggcggactgcgcccgtagcgtccgcctccaccaccgcggccaccaccaccaccgcctccaccacggtcgccacggtcaccaccaccaccaccgccgccgccgtacggtccgttgccacggggctgaaaatgccgttgtgggaagggaggggggcataaattagacaaatgcaaaatgtgtacctgaaatctatgctgattgcccattttctaataatgtaattagtgcacattaataatattgtacatgaaagcaagcaatgagatgagatatgtcacaaaacaaaaaattgttaacttaaacaaaggtactcgtatacttgtttcaagagggccaacaattttttggggaaaattacgaaattgcccagttacaggcctataattacatttgtctgaatacataatttggtctcgaccgtttctagtgcattaatgtcgaatttgaacaaaaaactgagttgtaaaccccaaaaattcattaaattctgcgactactttttttttgaatttgaatccgggattcaaagtaaatgtcaaactagaatacaattggttgaacaactctcacccctcaagaaaaaaaaaaacgttttacatttcatttccaaaccgggggctgtcactaaattggtatacaaacaccgctgacaaaaaaaacatttggagccaaccaaacattctctctcaaaaagtatacaagtaccatatccaccgtctcctcaatcacattagtacgatatacacctatacataaattattcactatttgttgcaca

SEQ ID NO: 44427 - DNA, 1655 bp, Heterodera glycines
  unsure (1)..(1655): unsure at all n locations
aaaaaataggtgttcgttttgattattttgcatttcttttaattacttttttattgttacacagtattttgagtacaagggtctctcccttgaaatttgacatttataggttttaaaaaatctaattatgtaccacccaagtttagatataattcctgcgatcacattgtgaaatcgcccatgaaaagtctgttcctgcgcgtcgaaatcgccgatcctgttctgccggagagcagtgttgtcaccacgatgttctcgtacgtgggcgaaaattttggtgtcacgacacatcacagagtttgtgctgaatgccaacgttgaggaaccggacttagtcttgcgcggcgcattccaaatccttatggaacgggcaatccaaaatgcagagcagcaaagtggccggaaagttctcaaaattggtgttacgctacagggaagaggtttgattggtcggctggtagcccttttattccttacctattaaataggcttacatgatccaatcgtattgccgcttcgaccgccagaacaaaacagctgtgacacgctgatggctgagctggacaaactcggccaaagtgatggtgaagacggaggaattggtgttggagagaatagtggtgaagcgctcgacaaacgatcattgctactcagcgaaccggtgcaaatcactgtgacctgtttaactccacctanccggggcgggccgaccgcgcttctacccgtatcagcattggggctacaatgaggcgcatcgcataaggatcagagattgggaagacaattattgtatgttccacgcgcttattggtgctcgagcgtaccacgaccctgtgctgttcaacgagtggatgttagctgatcaacagccacaacagcagaatttggcacgactgatgctgatgcaggatttttgtgaaaccaaagaagctttccgccgtcttatcatcaatcgagagttgatgtgttcctcagtgcaccgcctaatgcatgcagctggcgtacccgaaggccaacacgcatatggcatggaccatttgcaaaccgttcaacactattgggttcagtgacaaacaacaactgctaacacgtgaatttctcttttccaaaacaggaccagcggtttcccgctctgtatcgcattgtactgttcgaggaccatccagaggagttgcctaaaccaatttggaaaggtccatcagggcgtcgtttcgatgtagtgctctttttgtccaacgctcactatgatggaatcagaaaaattaactgcttcttcaagcttggcaatttttattgcgttgattgcgaatgctcgtacgggcgcccattgaagcacacgctggaatgcattcgccgttgtccgcaatgtgcaaaaagtccacgcccagtttttttttcgcttatcattgttgcttcagttgggccggagcacccatgtgcaaaggaacctggtgtaaaaatcctttgtccggcatgcaatcgattcttcttctcgcaacgttgctatcacgaccatcaggggcagacatgttcactgctgaagcgatgcaattattgttggcgcgtttatcagcgagacccaaaacgggcacataaatgtttcaccaaaatattgcacccgttgctggggggctgtactgtttatttcttttttt

SEQ ID NO: 44428 - DNA, 998 bp, Heterodera glycines
ccaaaaagttttttggaaaaccgcgccacaaaaagagcaatttaaaagcaaaaaaatttaagagatgaagtgcaatttggatcttttgtggttagacttccataaaatgcttataaatgacaagaaattgatgaatttgattgtttcaagcgaaaaatatgatagttaactgatttgttcgcaattttatgatgtttaaaaaaatgaggatttttcattccaaatgagtattttttgaggtattttagtggcaaatgggatttttatggctgaaatgaggatttccaaaattttgagaccgaaacgttgctataaaaggtatgattttccttctttttttcctgcaaaatatgaataaagaaaggagctcaaaatttagggtattttttgatagataaaaatatttaatcataaatactgggcaattagcttctaagaaccatatcggttttacccaagttcaggcacttttggtgctggaattccgcggtgaagattccggtaaaattcaaatgttagatttttaagatgtgcttcaaaaaaaaaattaattgatgccaaaatttggcgaaaaagagtgtcctcatctaagcgccaacgccgttcattctagacagtccaagtttaggcgacacgcctacaaacattcacaacacaacgtagctggaaaatttttctttgaaatgggcggcacatgtattaaatgcggcactctcttaaagggtttgattacccctaaataaggggaaatgagagtgattactttcgcctacttagctcagttggaagagcgcggcaccgattgctggggtcgcgggttccccaccgcgggttggaattttactaaatcctcaccaagaacacgacgtaacatgaatccaaatgaaatgtcaaagtattggttttataaaatcttttttcctatataaaaaaaaattctactggcgacacattgctttaaaaccttcttgaaaccctagaatatattcaaaaaaaaa

SEQ ID NO: 44429 - DNA, 550 bp, Heterodera glycines
ctgccccttctaatgataaacaaatgctatagtgtaccctctaggaggataaatatggcatgaccttcaagggctatggttgcctaattaactaactaattagcaggaaggaaacgaatatatactcaacaaatctcaacaacatagcagcaaagcaagcaaatcatgcgcattgctctaatgtgtttttcccaatgctaatcgcccagaaaataaaccaaaaagtgagatgaagcattaaaaattagccccgggcgaaatgcattctcgcgcaacacttttcatgttcaagtgcccattgcccagcaaaaaataaataaataaatgtgtgccccggggggatgcataccgcctttctgctcccggctttaaatagccccctggcgccccccccccttccctccaccctttgatgagggcggagcttcttaactacgcttttcggtcggctttatgttttggtgtctctgtttggtgtcgcgcagcactctcacccaccccccgccccttggggtggtgggtgattagtgggtgggtgggcgagaagatg

SEQ ID NO: 44430 - DNA, 969 bp, Heterodera glycines
attatttttttttaattatttttttcattttatcacccaacgttctagactgatcagaagctcaccaaattttgcagggaaactgctgagaacccttcaaatgcttataaattttcttagaattttttgcctggaggaacacagttcttcacacttaccacaccagcattatttttttttaattatttttttcattttatcacccaacgttctagactgatcagaagctcaccaaattttgcagggaaactgctgagaaccctacaaatgcttataaattttcttagaattttttgcctggaggaacacagttcttcacacttaccacaccagcattatttttttaaaattattttttgcattttatcacccaacgttatagactgatcagaagctcaccaaattttgcagggaaactgctgagaaccctacaaatgcttataaattttcttagaattttttgcctggaggaacacagttcttcacacttaccacaccagcattattttttttaaattatttttttcattttatcacccaacgttctagactgatcagaagctcaccaaattttgcagggaaactgctgagaaccctacaaatgcttataaattttcttagaattttttgcctggaggaacacagttcttcacacttaccacaccagcattatttttttttaattatttttttcattttatcacccaacgttctagactgatcagaagctcaccaaattttgcagggaaactgctgagaaccctacaaatgcttataaattttcttagaattttttgcctggaggaacacagttcttcacacttaccacaccagcattatttttttttaattattttttgcatttgatcacccaacgttctagactgatcagaagctcaccaaattttgcagggaaactgctgagaaccctcaaatgcttataaattttcctaaaattttttgcctgga

SEQ ID NO: 44431 - DNA, 1220 bp, Heterodera glycines
tgccatttttcgtcaatattttccgatttgaatatctccttagtgaaaaaatttgattatgcctaaaattaaatccaaatttgaatggatgggcgagtgggtaaacagttagtagcttcactgatgaaaatcttgagaaatttttgattttcaattgcaaaaacaaccgatgaggaaaattttttaaaattatttgcacccctaattttcaagtttttttgtgcatatttggtgcatatttcacgactttatttgcatatttatgcgcatattttggccatttttcgtgcatatttttgacagccctgtttattatggttgcaaatatatatatatttttcgatttttgaatgcatttttccaaaataaatagtttaaaattttggtcaagaaaaaataaataataaaattaaaaaaacgtgaaaaaatttgaatttttgagccgccaaaaaaataataattttttattgcattttcattaaggaatttttaaattttatatgaaaaatttgaaaaatactaaatttcaatctctttttcttccttagcaaatgtttttttaattaaaaaatgattttcgtttagaaaacggactgaaaagagtgaacaaaaaatttaagaaaaatgaaaagattgtcttaattgaaaaatttgaaaaaatgaaaaaagaacagttaatcaaaaaaagaaatataaacaaaaaggcaaaccaaattgaaaaggaaattgccaaaaaactcgacgtaagtctgacgtcaatttacacttggaagagacaatttgaagaagaaaacaaaaatgaatggaccaaaatgaagaagttgatcaaagtatttgaagaagtgaagcacagattcattttggaaaagggaaaaatgacgagaaaagtcatgaaaattgttgagcaaaaaattgcaaataaaattggaacggatcgccaacaaattttcaaatggaaaaggaagtttaaagtgaaaaatgaggcaagaaaagatgacaaaagtgccatcatagcggaatttgaagcaatgaaaaaggaatatttgagaaaacatggcaatttaaacaaaaaagcaaaagaaattgaagaagaaattgtcaaagagttgggcacaagtcggacaacgattcgcagatggaaggcacaaatggcaagtcaaaagaaaaatcataacaaagggagacaaggggaaattattgaaaaatattgaaaattaaag

SEQ ID NO: 44432 - DNA, 730 bp, Heterodera glycines
  unsure (1)..(730): unsure at all n locations
acaattttttgacaaaatctagttaacaaaacatactcaaattttcaaaaatttttcccggcggcgcctatcggcaccgccgaccttccgccccgcttgtcccaaaaagtctttgaaaaaatgcgccgcaaaaaaaaaattcttaaaaatctgatttttttgagcagtttgcatttaaatgtacgatttgctaatctcctccccaaaattgttaaaaatgatcatgggaggcgaaaaatacgaaattttatactattttaattgattaaattgttacacaagcagttttaagcaattttgcaaaatgttcttatttttgaccctaaaatcttattttttggccttgatgttcttattttgaaaattttttgatcacatccctgtattaaccatgtgatggtcggaataagcacaattgatttaattaaatgcaaaatcatttattcaattaaatgtaaaatgatttaatcttttcagcaagttttctttgttcgattttgaataaattatcttatgctaaaaagttaaattaaataaaaagttatgcactaatttcatttttattttctcccgccccatttttggtaattttccggaaattttttgcaaactaaattttgatctaaacttgatttcgaattctttattgcattttgtttgatttcactgtgcttagtatttaaacaataatataccgtacttcttcgattatangcccccgggggatcta

SEQ ID NO: 44433 - DNA, 1121 bp, Heterodera glycines
  unsure (1)..(1121): unsure at all n locations
cagaaaagcacaccctgatcaatgccttgcatcgtntggccagcttntcgtctttgattttcctgcgaaaagcattcaacacagtgccaatgggagttttctaaaaaaaatctaagaatttttgaaaggatattcggtgctaactacatattcaccagagcttttcaaaaggtgccgtcaattttgttgtacgcctcgcagtacaaattgtactgattgttcggtatctaaaaaaaaatcaaaatcaaaaccataccagggaaaggaatttaccacgcttttttcaaataaaaataattgacaaagcaggtgtgcatgtgtttgaaaatttcgcgcatttggaattcgccatggcacaccggacatccgaccagctgaaacatgaaccaattcatttccttacaattagcagcagcagtgctatggcgtacaaggttgagaattaatttaaaccaaatttggttagcatttaataaatgtaataacactgttcattagaatagggtaaggggccgaaatttaaaaaaaaattcccagacggcgtctgtcagtatcggtcttggtcaattttatttctcggaaaaaacccgcagaaaattttcaaaaaagcgtagaattttatgaaaatgagtggttagtttcaacaatatgccgagaaagtctctggcagaatattttgacagcctgccaggtttgctggacgacgcaatggcatcgtccccggtttgccatcaaagacgcttgggaggattttctcgaccacccaaaagccgagaaactcgcgcagcgccttgccatattttcgtcctcattcttcaccgccgccaccgtcgttgtcgtcattgttggctttttctcctcgcttccattttctgcagcatgacaatcatttcctccatcaccgtcgtccccattggcaccggcaccaccatttggcgatcgttttgtcgtcgtcgttgactgttgttccatggcgatgnccgtcgttgtccttggcgatgggggntgcggtgtgtgccgaaggtgttgctctttcacaccaccatgaattnggtgcacattgttcttccactgntccagctcgccccagcgggggatgttgatgtccgccatttgctcct

SEQ ID NO: 44434 - DNA, 1311 bp, Heterodera glycines
caaatactaatgctacggtactaccgctaccgtaactctacacttcacatcaaatccgacaagatttattataaattaattttaaaaatatttgatttttttgtttaaatctaactaaaaaataattttggtattgtaataattaaaattattgtactataattcactattaaaacattgcctcaaatacaacgggtggccttttcaagaattaatttatgtattgccataaaaatcagtgaaacgaaacaattcagccttcccaaaacaattaagacttttaattttacttaaaagaggagggaagaacagaaatgcatttgctttaaggaggatcagcagaatgaatttgaatgaaattgattactacggtcgaatgactagggtcgacacttttagttactaaaaggctcgaaatcgttaattaaatagtgaggaaaaatgccaaaatattgactaaacgtccgaaatagtgacgaatagtgacaaaattttcagccaaaaattgagcaaaatataattatttttttttcccggcggggtatgttggcaccgcctgatcccaaaaacttttatttttcttaaaatatcggcttttaattattttgtgacgcagtgccaaatagtgagttcaagtgatgggtaatggatgacatcagaatagaaaaaattacttttttgagctcctttcttcaaaacaattgagcaaaaatttttaaatcactaaaatcacaaccctagttatgacgtcagtcaaaaacctttaaaataatcgtactcaaaaaatcctcaaaataaagatttttgcttgtttgctaaaagaggtttctgtgttttggaaaaaaatctacaagatatgaatatgaatgcttttgaattcaataatttggtaaatttttttttgcaatttttgcttaattcttgagggttattgtcgtcttcttgaaaaatcctcaattcttcgattgtctccttaaacatataaaataatgtaaatgaacactcatctatttctttttaaattttgagttaattattaatattcttccaactataaaacttttacagtgataaagctgtatattcaaaataaataattttctaaaataaaatttatattgaaattaaagttaaaaataatattaaacaatatatatattatgcaaaaaaataataatgataataataagaatatgtttatctatctaatctaataatttactatttagaaattactcttaatttggttagatttcgaagtaaaaataaaacagtagaaaaatacattctgactttaaaaaatataggaat

SEQ ID NO: 44435 - DNA, 992 bp, Heterodera glycines
  unsure (1)..(992): unsure at all n locations
tgcatttaaaaataaaaaaattcttgaatttgcttctgaattttttaattttaaatagaaaattactttttcgaaaattttgcacaaataagaggcgaagaaattcaattgctctgcccaccagggatgggccaaattgaaaaataaaaagcgaaatgcgaaaagcgaaatttgcgaaactgaaaaatgcgaaatgaaaaaaaagcgaaatgcgaaaagccaaaatatgcgaaaatgcgaaatgcgaaaagcgaaattttttctacaactttttaatagttaaaatcataaagcaaaaatcattttttaaaattttattccaaatttaaaaatcaataaaacgcttttttgaggcgcgctttttccaaaaaaactttttgggaagaggaggcaggcggcgccggcaggcgccgccgggaaaatttttgaaaatttgattaaaatttgttgacagattttcaccaaaaaatcatcaaattttgtgatttttgtatcatttttctaatgagaaataagagttttggcgcgccgctgagaacagtttttcatcaaattaccaaattttgcgattttgggccattttctaagaaaaaaaggagatttgggggcgcggcggtgccgataagcgccgccggggaaaaaattggaaattttgatcatttataaacaggttttcactgaaaattagccactttataggtaaaattttgaaaaattttatgggaatttaatccaattcttaggggggtaaaagtcgcatttcgcgccaaaaagcgaaatgcgaaaagcgaaatgcgaaacgccaaaaaatgcgaataatgcgaaaggcgaaatgcgaaaagcgaaacctcggcccatccctgctgcccacccagcgccacacgctgccgcccntgcggcgatgactttgctgnctgatgnngaggaaaagcggcggacgacggcgcatcgngccggttgagttccccggcattatgtctctgcccgacgac

SEQ ID NO: 44436 - DNA, 1122 bp, Heterodera glycines
  unsure (1)..(1122): unsure at all n locations
cgacaggttggtttcctttctccttaatttaaattaagttttgtatttttagatttttgattttattgctccgtttgaaatgggccaaaataaaaaagaaaaaataacaaagattaaaaataaaattggtgcattaattgcggaatgggcagcgaagcacaacaacgccatcatcagttgatatgcacttaattgacccttttctgatttgattatattaattagtgattcctttttcaattaaagctccaacaaaatattattaatatataaaaacatgaaagtcaattataaagggtttttccttttaaaatttatcaattatttactaatacaacctttaaaaatgtgtttgcttgcgcagagctgcactaatcaaacctccatctatttccattgaaacagaagtgctcttcaatgggtcattggacaaatccaaaacgaatcaggcatttattcgttagggcacaaagaatttgcgaaccttttgaaaaccataaaaatttgggcaaaaagtcgcttatatgtttgaattttgctttccaattttgtttttcagctcgactcatttgttccggcatttttggctattttaacggcgttactttggcaattatggcaacaaaaatttgtctactctttcctaatgcgcctttatcatttttactgtaccaatttttctccgtttattcaaaatggtaaaaaaaaataataaatgaaaattatttaaataatttaaatccaaaatctactcggaataaatatttcatggattggatcaatgcttcgattttgcttggaattgttaacgccaatgacaattaatgcaattgtgtcacgttggcccccattaattggccaaagtgtaatgactgtaattaccccaaaatttccggagcaaaacgcatctttaaatgtgaacaaattcacactccaaacaattctcgaagaattagccatcggtaaaaaaggatattcattanagcaaaacccaatttaattattcaaattcctggtaatttagcanatgaaattctttccnngagaccaaaaaaactggaaagcaatttttgaagaaattannattngagcaaaaatttgaactttttgcgctcattgtct

SEQ ID NO: 44437 - DNA, 1020 bp, Heterodera glycines
  unsure (1)..(1020): unsure at all n locations
agagtcaggcattgccgtgggaatcggtggatacataaacaaaataaaccaccaaattattttntagattntcattcggtttcgaacgtgatcaatttcgattttccgctctcaactgatatgtctgatttttattgaattttttatactaatttttgcttgaggtatgtccatcgagtgggcagaacggcacggggatttaacaaaggcacagcaatttcttttgcttcccaggaagagttgaacctttttgaggtggttcgaacggagatcaatgaacgaagtcaaaaaaaaaaattttttttttcgtttcttcgatggttttttatcaccttttttcagtgggccaggcggttatccaaccttatgaagtgcgtatgaaagactttgaaagtttccaacttcgagcaagggtacttcctttgtttttgttaggcttttaaaaaaatatttttataggatgttatagcggcgtgcacaaagacggtaatccgtgaaacgcgaatggctgagataagggcggaactgctcaagtcgaaacgattggacgcatattttgagaagaacccgcgggagaagcgtgctctggagcaggaccggaagcagttcaagctgaatgtgcacagtgctggcattgccgacgtgccggattatattggtaaagaaaagcgagcaaatttgtgaatttacaatcgttcagttccgaaagcgcttcgtggacaggactttaacagtgagcaaaaacggacaaaaagtgaaaggaacaatcggaagagaaaacggccatttgagaaggcgggggcaaaacggaagcacgcaaaaatgttatccgatccgttgcaaagcttcaaattttaaaaaatttgttttgttaattgtttaccatcttttcataaaaaaataaaacaaacaatatgttgaaaaagaaaaatgaatgacatttattanaaattgagttggttttgtaaactcgtcatagaattgaaggcgtatctcgtagaaattcaaatcatctaaaaa

SEQ ID NO: 44438 - DNA, 763 bp, Heterodera glycines
tagaatttcaaaaagctctattcaatacttcataaatagctgattcagcatggtcttcaaatgttcgggtgtcataacttttttcaatatgagacaatctcgaaaaaacccattagattatttagattcagacgcataaactttagctaaaccaaaatttttaaattttccaacaaaataggaaaaaattcagaaaatccccatttctcgagaacctctctagggacaataattttttgcctctaatttattcttctatctttgtttttttttcgggaaaatgtttgttttaggcaaataaaatttggggctgagaagtgcctcctgtggaatgtgagtgggtttacatagccaaggccttggccaattcatggggccataactttatgaagtcaaagagtaaaaccctaatcaatttttttttcattaaatataccattttatgatgacagaacttctacatattacaccccaattaaatatatgcatataaatttcacaaagcttgaaaaagctgagttttctaagaatgacttggttttgcaggaaaatattttcgtataagggctatgaaaattttcaaaaaatttgataattatctttaatatttttttttacaaaaagtctcatgttcttaaaaatgaaaattttaagaaaatcaactttttcaaacttcatgaaataatgtgtcaaataatcgcccaccatagtaataattaataaagtaaagggcgagaatatttgtaaattaatgttcaagtat

SEQ ID NO: 44439 - DNA, 1593 bp, Heterodera glycines
  unsure (1)..(1593): unsure at all n locations
aaaaaatatttatgaaacaaaaaaatcgatttttcaagtgtcgttgggggtactcaaacatttatggggagcaaaaatccacngcagaattaaagtacaggctatagggaagctattcccgaaggattcggtctccccataaatctgggcgcatcggttcggggggactgccccgaaaacaaaaaaaatcgattttttcaggtgtccgtttggggtactcaaacaattatggggagcaaaaatccaacgcagaattaaagtacaggctatagggaagctactcccgaaggattcggtctccccataaatctgggcgcatcggttcggggggactgccccgaaaacaaaaaaatcgattttttcaagtgtccgtttggggtactcaaacaattatggggagcaaaaatccaacgcagaattaaagtacaggctatagggaagctactcccgaaggattcggtctccccataaatctgggcgcatcggttcggggggactgccccgaaaacaaaaaaatcgattttttcaagtgtccgtttggggtactcaaacaattatggggagcaaaaatccaacgcagaattaaagtacaggctatagggaagctattcccgaaggattcggtctccccataaatctgggcgcatcggttcggggggactgccccgaaaacaaaaaaatcgattttttcaagtgtccgtttggggtactcaaacaattatggggagcaaaaatccaacgcagaattaaagtacaggctatagggaagctattcccgaaggatttggtctccccataaatctgggcgcatcggttcggggggactgccccgaaaacaaaaaaaatcgattttttcaagtgtccgtttggggtactcaaacaattatggggagcaaaaatccaacgcagaattaaagtacaggctatagggaagctattcccgaaggatttggtctccccataaatctgggcgcatcggttcggggggactgccccgaaaaaaaatttggagcgatttgaatgagaatagaaagagccaggttcgatgaagttttggtaagccaaaaaaatatccaaatatttaaaaatctataaaaaatttaaaaatgagaattcatgcgagattttctggaaataagcttaatatggcatagttaagctgtaaaaaaaatttggggcgatttgaatgagaatagaaagagccaggttcgatgaagttttggtaagccaaaaaaaaatccaaacatttaaaaatctataaaaaatttaaaaatgagaattcatgcgagattttctggaaataagcttaatagggcctagttaagctgtaaaaaaaatttggggcgatttgaatgagaatagaaagagccaggtttgatgaagttttggtaatccaaaaaaaatccaaacatttaaaaatctataaaaaatttaaaaatgagaattcatgcgagattttctggaaataagcttaatagggcctagttaagctgtaaaaaaaatttggagcgatttgaatgagaatagaaagagccaggttcgatgaagttatggtaagccanaaaaaatatccaaatattaaaaatctataaa

SEQ ID NO: 44440 - DNA, 929 bp, Heterodera glycines
acctattccccgacccgcacccccgaccatgtcgtccccccggaggtcccccggcaccccgactttttgccccccgtaccccccgacacgaattcggggggattggggactccgagcgttgtaaaaatataaaaaattaattcaacaacgaagagggggaaaggttgaaaattttagaatttttttaataaaattgattaaaaattacgaaaaactttccggcggcgcctatcgacaccgcctgcccccaaaaacaccaagttttttcttaaaaattggctcgaaatcacaaaatttagacaatttttggacaatagtctcttaacaaattatactcattttcaaaaattttcccggcggcgcctatcggcaccgccttaccacttccccccaccccaagtttccaaaaaagttttttgaaaatcgcgccgctaaaattgttcaaatttatgagattaaaatttttgagcctcgaaattcgattttcagtttctgaaaatttttggagcctgggatgccttgttataaaatgccaaattggacgcatttttagttgattaaagtgaaaaaaggaagatttacgagcattgaaaaagaaaaattgggtttttcgttaaaaaatttcgttgatcactacccgatcggggtccccgacccccgacaattgagctcctccccgacccgacccccgacatgtccccgaggtccccggcccccgacattttgccccccgaggggtcggggaggaaccctactttgtattattgaaagatgaaaaacatcctctgccgaaaatcacaagtgctggccaataaaaacaactcaatcgattgcctaatttgctggttgcccattgaaaacttcaaaagactcattttcatgtaaataaacattcgattattagagatcgggtttttagttgctaaaaa

SEQ ID NO: 44441 - DNA, 1049 bp, Heterodera glycines
taatttagtaagataatgtggcttgaattacaggttacacaactggaaatggaagcgcaaaaaattcgtggcatttatgacgccacccgtttggaagcacaccgtgcaattgaggtattaattactaattgccgttaattacattgcaattagtaattagcaatttttataactgtaaattaggtaattaattttactaaattgaacaattaatgatttaggcggcgaatgcgttcacgcaaattgcgcacgggttgctgcaggcgcgcaacaacactcgcaccgcacaacaactgatgaaggagacgcaagggcatctgcgcggcgttgctgaagcggcaacaaacgcaaaaagtgcaagcaaatcgatgggcgcaacaattgacacggctgcaatggaagtgtctgcggcgaggtaagaggaaaatttagcgatttttttttgagtaaaattaatgatcagtttaaaaaaaataaaacttagaaatgtttcaaaaaaattcaactatttttttataagaaaatttcaagaaaaaaaaatttttaaatttttctggcgaattttcaaaattttatgatgaattactaaaaagaatttttctttaaaattttctccaaaaatagcttaaatttctttctttcttgaatttcttataaaacaaataaatgatttttctgaaaaatttaaaaatatatttgaataaaaacatttttttgatttgcttcatttagatcttcaaaaaacgattattacattttaaaacttaaatttaaaaacaatttaactaaaaattaaacattaatttttgattataaattttattttaattgcacgctttttttattgtcaatccctcagggcccagggcgacactttggacgtgcgtttggccaacattcagccaaggctttctcaggccaaagcggacctggccaaagtcagccggacaaacggggagctgaacgcacgcgaggacacagttgccgaaattgacaaaatcatggacaaagcggagaatgcctatcaaaaagtggaaataatgaaaatt

SEQ ID NO: 44442 - DNA, 683 bp, Heterodera glycines
caaagggcggtcaaatgggggcgggggagggcacctaccgtaaacgacgacggattggctcacaagcaatttttacgaattgccgagatttaattgttttactaaaacaacgtaaaactgcgccaaatttcctccttcatttctaatggcataaataaaaaatccccaaattggggtgaggaaaaacggcggaggttggcacttagaaagaaattgctaaaaattgaatgcattaatcaatttttggccacccattgcccgttttttcgctgcccccagcaaaactgatataattgttcacttccttttcgcattacacacatttgatgacaatgtttacagagcaaaagaggaggaagaggctaaaattgtgccacccaaacagtgccgtcgatgtcattttggtttttaaatgcaaaaatataactaataattaaattatagaattcaaattcgtttttttcgccccccccctctttttctgttttctgttgattcatcctccttaatttcttaaccaccagtttggtcttctccatttattctctcgagagttgctcttggctcttttgccacctctctccccccactccaatgaaatgagtgggggggggggatttgtaagtgagaagggcgggggcgggggacagatgggacgacgagggaaaagcacggggggtggg

SEQ ID NO: 44443 - DNA, 803 bp, Heterodera glycines
atttccaaaaaagttagaacatgaaattgcaaaaaagttgaaaattttgaggttttttcctaataccttttttagaagctaaaatttttgtttgttttttgtaaggttaatagagcttgtgaagggctttcgaatgataccaagattgttagatttggtcaacaagaaaaaaaaagttataataaaaaaagtgaggctggcgccaaaacggctgcgccaaaacgaccgattccctgaatgtacaactacccctggtgacaaaacaaaattacgaaaatttccttgacattttgtattttctgcgtatgaattgggagtgcgaagaagtgatgaagaaaataaagcaggttaaaaccatccgataagaattctagtaggaaattaatttttatttaatgctttttttaaatactttttggaaaagatttaaaagatctaaaaattccaatttcatataattcagatatttcaatgatggattcgggaattaagggttttatgcaatggattaaaattatagaaattttatctgggttctataaattgtctagaggcaggaattcttgacttggaatttttcaatccgaaatcccggattttgcaaattttggaccagctgtggactacctagaaaaaaatatacaatttttaagacacgttacgctccggtgccggtgcctttcggccaaaaaaattgtttaaaaatttggacgtatcaaaatgttcaaattttgacaattcgtatggccccattcgcgaggtagttgatgccaaagatgcgcgaacaaaggaagaaaattagg

SEQ ID NO: 44444 - DNA, 1027 bp, Heterodera glycines
aattcgctactcacagacaccaattccagaattattttcctacaatgtgatacatttgagtcaatttttcacgaaaattgaatttgattgagttggtcaacaaattttcagtaagagaatttataaaaaatggataaatacccttggaattaagactaaaccgaaccaatcatatccagcaatatatcttgaaaaatcacgtcagtttggacccttctgtacaaggccagagcccgtggtcacggatttgttattagtatttgaaattggcaaaacttttccattctttgggcagctggacaacaatgacaaagtacagtaaaataaaaaataatttttatgataccgtatttcttgaaatatagcccccgggggcttgatcttgggggctttgtttcaggggggctgtattcagggggtatctaattctggaagggggtctctatttctaaaatttttaaaagggagtctttatttcacggggtgtctgatttagaggggggctttgtataggaaatgccgtatttatcgatttaatttttatataataattcacattgaaaagattgccttgtgcagtaatattgcgatgccattgtatgtgttgtgcaacagtttctattcggtgcaacaaaactgtgaagttctgtgcacaccagatggcctaatgccaattaaaatggccgaaaattcattttataagcaagattcagtgtgagtgaattattattataaacttattactaaattaagatttaatttttgataatttttaatagggttcgagccccgtgggcgggggtgcttagaacatgggctcccaccggctctaacggagatcctataggtcccggacagaggaaccggaacaactgggataacaatgcccaaacctcgagaggttcttttaatacatcgaatagtcatccccaaaatgacagaagatggaccaatcgctcttccagaaatgacagacgatggaataatcagtctcctcaatatgatcgaagctggtcagagaactgac

SEQ ID NO: 44445 - DNA, 1227 bp, Heterodera glycines
  unsure (1)..(1227): unsure at all n locations
tagtcggcttttgtgtggatttatctgctcatctctcgatttcactaagagtccattttcctgaaaattttaaaatatgcaaaaatctaaaaaaatatctaaaaaattagatacaatttttttcttaatttttaaaaaattaaattattaacgttatgcagaataaaaagaaaccttcctaagctgttgaatgacaaagaaaaattttatataattatttggtgtattattgtctaaccaaaaggaaaaatttcaaaaataaaaaatgaaattttataaaattttcatcttgatcagtgcccaaaaacgatattggcatcattattttagatttaattatttcgtttgaattgcaatagacaaataaagaaaactgtacggatcagggtggggcgcggaattcattattaaataatttatcagaattgcagattcggatcaatggcaactcgtacagaataaatttgagtctagtgcacctcaggcgtaaaaaaattacataannncaanaataattttctntntattnctttttanctnanaatttaatataaaaaaattatanacttcaantttcntttnatacnaacaatntaatacttcttaaantncactantntcaaaaattttanaaaaaanccnaaatcttanncacaancctanncctaccctaaatcttanncataacnntnnaccaaattatntatcacttcttccnaatttcnaaaaattaaatanataattnnatnaanaaaataataatttaaatacaaanctaaaaaanccaaaaattnaattaaataaattaancnaacaatcatttnaaaatnanttttatnanaaanctnatcanaatntttcttctnctnatcacacaaattctnntnatnatnannattacaatnacaanntaatataacanataaaanaccatttattaatccaaaaaatanattttataaattcnctaaatttttatattttttttctttaaaaatcaattatttctttacaatacanaaacaacaaaacaaatcaaaattttccataaatttattttnatnaagaagaaattccncaaacaaaatttttataaaaatttatcaaatnttcaatttnaatcctaaatttcaaaaaaccttgtaaagaaatcccacccaaatttataaattnnnncgaaccctctggagaaaaagagagagaacggaggaggaaagtgaagaaaca

SEQ ID NO: 44446 - DNA, 1212 bp, Heterodera glycines
aaacagatgagccgaaatagggagacggagtagggtcagaggcccacagaaagacgttatcggatggcgaattgttgtctccttctccgttttgattatgtttttgaatttcattggggccattaatcagccgattccttgacaattgcgtgagaattggcggaggaggaagaaaagtgccaaagtaatcagaagagttggagtcgaatgaattgaggaattgggcaccggacggaagagcagtaacaaaaggagtaggaggaacagaagtggcggactaaaaaatgggcgaatggaagaaaagcgggggggggggaatgcctggtgaaagggcgaaaagcatggcgaagagccggaggaaaaacaaagtcgaggacagttttgccgaactcggttggcacaacaaaagaccgaaggtatacgacggcagtcgaaaaacgtctgcggagtcagcagagggggagggggagggggaaaaagcggggggacggacaaacgcttggaaggcacagaatggaaagtgagggacaaagagcaggacgaagaagacgaaagaggacggaagagggagcattagctgaagatggggaggcactgatcagtcgaaggaatatctgcataagaaagggaattttggctgcaaattgcgcaatcaatcgatgatctctgcgcaaaacgcaggaaaacacttcggctggtttttgggccgctgtgagcgaaatgcaataaaaagtccataaatctgatttaaatggataaatttgtgagcaaactgctggcctttttggaagagaattaaatgtaaagagagagagagagagagagagaaagagaagcacagacggaataaaagtcggatcagatcaaacaaaagctgatgggaatgggggagggggagggaggcgatcagcggatgagtcaccctcccccccccccccggggggggggattgatcagccgtagctcatctacagcaaaactgagaggctatgtgttcttagataagcagttatacagcagaaaatatatagtcgttcataagcataaaaaagagaaatggcacaataattggaagaaaatagaagagaagggaagagaatggcattccaaatttggccaatttccgattgatttgaatctcatttccttgtctgctgatggcattaagttgtcctttccaagatgacttctcacaacggtgcattctttgct

SEQ ID NO: 44447 - DNA, 984 bp, Heterodera glycines
  unsure (1)..(984): unsure at all n locations
ttctaaaaaagcccaaagattatttttagcgatttggtgccttttttggcgttttttccgaaaaattccattaaaaatacaataaaatcgggaaaatacacccctaagaaatgaactaaaaaaatttcagaaatatacctttaagaattgaaaattttctcaaaaattgttcgccaaaatttcattttttttcttgataaaaattttaggtttaaaaatttccttattgataaacattataaaatattgaattatcattaaatcagcaaaattaagtcttttggttaagttttacgtgttttgttccataaaaatccttaaaaaattttttaaatgccttttttcatgcctttttcgggattttcgtgccttttttcaattttttggtgcattttatagtgcttttttcgcgattttggtgacttttttgcggtctctagtcatagcacgcatattttgttgaaattcatcaaaattttctcaagctggtgactttcggcatccccgttttagttttctcagccatgaacaaaaaaattttttttttttttgcaaaaatctcgttaatctaaataagattttaaaaaaatccttatttattaattacttatactttcacaaaatgtgaatttctttaattaattaaaaaataataattattatttgagaattttctcattttaatttaaccattaaattttttcttatctttttttctgtaaattttcaatcaaatttaaatccatgtttaatttttctgtaaaataaattttaaaaaaaaacatttttagaagttcaaaaaaacgctactccaaaaagtttggcctgaccaaacaaagcacaacatcagcggcggattacttcaatttttcgtcgtccatcggcgaagaaattttggacgaaaatttgcgccaagaaaaattgagcagtgaaagcagttcaaatgtgacgggatggagatgaaaccgaaaantatacatctaa

SEQ ID NO: 44448 - DNA, 1184 bp, Heterodera glycines
cgatatttgaaacgcgaacaaaaaaaattcttgaccaaaaaatagctatctcttttttctcatttttttaccgcaaacttggtaccaacagttgccttctcttgtctggccctatcaaacaatcttacgatatttgaaacgcaaacaaaaaaaattcttgaccaaaaaatagctatctcttttttgtcatttttttaccgcaaacttggtaccaacagttgccttctcttgtctggccctatcaaacaatcttacgatatttgaaacgcaaacaaaaaaaattcttgaccaaaaaatggctatctcttttttctcatttttttaccgcaaacttggtaccaacagttgccttctcttgtctggccctatcaaacaatcttacgatatttgaaacgcaaacaaaaaaaattcttgaccaaaaaatggctatctcttttttgtcatttttttaccgcaaacttggtaccaacagttgccttctcttgtctggccctatcaaacaatcttacgatatttgaaacgcaaacaaaaaaaattcttgaccaaaaaatagctatctcttttttctcatttttttaccgcaaacttggtaccaacagttgccttctcttgtctggccctatcaaacaatcttacgatatttgaaacgcaaacaaaaaaaattcttgaccaaaaaatggctatctcttttttctcatttttttaccgcaaacttggtaccaacagttgccttctcttgtctggccctatcaaacaatcttacgatatttgaaacgcaaacaaaaaaaattcttgaccaaaaaatagctatctcttttttctcatttttttaccgcaaacttggtaccaacagttgccttctcttgtctggccctatcaaacaatcttacgatatttgaaacgcaaacaaaaaaaattcttgaccaaaaaatggctatctcttttttctcatttttttaccgcaaacttggtaccaacagttgccttctcttgtctggccctatcaaacaatcttacgatatttgaaacgcaaacaaaaaaaaattcttgaccaaaaaaatagctatctctttttttctcatttttttaccgcaaacttggtaccaacagttgccttctcttgtctggccctatcaaacaatcttacgaatatttgaaacgcaaacaaaaaaaaattcttgacc

SEQ ID NO: 44449 - DNA, 1246 bp, Heterodera glycines
  unsure (1)..(1246): unsure at all n locations
ttggctttctgtgattttgtatacaccaattttttggactttatgcttaatgttgttctattctcgtctgatccttcaatcaataattttgataacattgttttattaacacgcagtgggatttgaacccactgaacccagcaatctgtgccatgctcttaccaactgagctacgcaatcgcacttttccttgcacttatttcgcgcgaaatcacacattatggctcttctgtcgtataggcgcatggagagaaatatgtcacatttattgtacacagtttgttgaattataatgttgattaataggtctcttgattaattcttattatttgttctttttattttatgtatcaaaaaataggaacgaaagaaaattaaaagttaaaacagttaacagaatacaggacaatcgaacgcttagcgtggctggcttaatgaccagataattaattatacacagtttagttgggcatagaaattttgctggagatagcgtaaatggatggaaatagttgtttggattgttctgaatcgtggaatttttccggcggattgttccattcttttctttttatgactgctaagacattcttcatgccagcgtaggataaatagtgatttacacggattcttttttatgtaaatacatgtttttttcctggattctccatagcctaattagtaggaaaaacactttcttttttgtgtttgcgaacaaaagttgggacttttatttacatatttttacatatttcgggatttttctacatattacatatgtacatatttttatacatattttggactttttcgcattttttcgaacatattttgaaatttttgaggattttttaaggaaattttcattaaatgtccccaaaaaaaaacccaaaatttcacaattttttgtacatatttttaggatttttgagaagtgatagaaatttcatatgaaaaatttaaatttttttttgaaatatacccctaaaaatcgtttttttcaaaaaagagatagtaaaaagggtgcttctaagcctatttaggtcatttttagggcattttgtacttatctcacccctttacgaagattttttttcaaaaaacaccatttaaaaaattttatttacatattttagtacatatttnggttctttttgtacatatttcatacatattttagcattttttatacatattttatttacatatttttgcgatttttgcttacataaaaaaagaatccctg

SEQ ID NO: 44450 - DNA, 1097 bp, Heterodera glycines
ttctgtaaatttgaatttgaacaattgaataagctaatgaattaattaattaattagtcataataatccgatcagaaatctgatcaaaaaggaggatggatcacttgatcatgaactgatcaatgagacaagaaaattgagaaaattaaacagacagaaaatgatcaatgatcaactcaaatcagtggatgatcaaagaaagccgagaaaagtttgatctctgatcagtgaaatccattaaaaaacgatcactaaggcagtgatcagaaaataccatgaaccatacaaaaaatcacttattaatacatagaagaggaaaagccctgctgaaaacaacaaaacaacaacaacgagttttgtgtgctgtgtgctaatgccatccatctcattttggcgaattttgttgctgattgtgagcaacttgttgctgttgttgttgttgttgttgttgttgcggcacagcagcgatttgttgcagttgcaccagttgttgctgttgttgctgctgctgctgctgctgctgctgctgctgctgctgctgctgctgctgctcggtgaagccgatgccgccaaatgagtgttgccggaacagtccgttggcggtagcggcgccggcggcagcgactgccatcgcggcaagccgttgttgttgctgttgctgctggtgttgttgttgctggtgttggagcagttgctgaacggaagacagtgcgttgctcagtgcgaccgccgcaaccgtcgctgacgcgttcgcggcgactgaggagggcgactgttgaggcggttgctgcgactgcaaaaggttggcaaccgcggcggctgcgggaggcggcggtcgaaatgcgctcggctgctgatagtcagggacgctgaacagatttggagtggaccgcctcatatgtgccggcaattgggctgaaatatttggaggggaattagttactactgatcagtcgggtgatcggaaaattggcagtgatcgaaaaagttgatcgaaaaatattggttccaatacgatatacaataaatgtgatcagggaatttgatcaagaccacgcgatatacaaatggatgtgttcagggggaatttgatcagc

SEQ ID NO: 44451 - DNA, 1125 bp, Heterodera glycines
  unsure (1)..(1125): unsure at all n locations
aaagttttttcccagaaaccggatggtcaaataaaaaactaaacatctcacatgaccaatttaaattccctacattttggggttacttatttatgctgccccataaaaaatgggagtttttccgntgccaaatttttgtgaattttcttcgggcccgtcataagcggtttgtttgggggcaaatgaaaacaaattttgtgttattcctttgcgctaggagagctctagattttcaaatgtataaaaaaagtgtctatctcgactctctataaagttatgtgcagccaaagcagagtggaccataaacacgaatttttttatctttggtatttcctctattttgagcctgctctacatttatgtattgtgccaatatgcctattgcaactgaaatttattcaactttcccgacaaattgttgagataattattctagacgatttttttatatctcaaagcttaactattgcctttttgtatgataactggtagatattgggagtaaaaaaaagtttttttgtgactatttacaataaaaatttatgcagcatttctaaaaaggatctaaaaataatttcttgcgtaatattttttacattatgttgttgaagaatttgaggctgcttctgatgcgattgaaaatttttcagcttttcttgaaaagttttttcccagaatttatacagctttcccgacaaattgtttagataattattctagacgatttttttatatctcagtgcttaactattgcctttttgtatgataactggtagatattgggagtgaaaaaaagtttgtttgtgactatttacaataaaaatttatgcagcatttctaaaaaggatgtaaaaataatttcttgcgtaatattttttacattatgttgttgaagaatttgagtctgcttctgatgcaattggaaaatttttcagcttttctcgaaaagttttttcccagaaaacggatgggtcaaataaaaaactaaacatctcacatgaccaatttaaattcccttacattttgggtttactttattatgctggcccataaaaaaatggagtttttccggtgccaaatttttgtgaattttctttcggcccgtcataagcggattgtttgggg

SEQ ID NO: 44452 - DNA, 777 bp, Heterodera glycines
aatagagagtgcagagaaaaaacatctctctttttgacgtactatttctttatttctgttaatagagaaaaactgaatttacttcgccacatataactttttttctactcatacaatttacaccaaattttgcatgtcgatagagaaaaaaattacgaacaaaatgtaagggtttttaaaagcaaaaaaagggttaactaaaaagttattcgagaaacaaaatttcgaaccctcatatctttttcctaatcaatccaattgcttagcatttgcttagaaaaagcttctccacatcaagggctttcgaatgatgtcaagattgtacaatttggttggtaaaaacctccaaaaataattcccaaaaatggtcattttttaattttttgcacaaaaataaataaaaatattcatgttgcacaacggactcgaaccaacaccctttgtccctttactatcttacaaaaaccactgagccacacatgcaaatctttttggaactgggaggccaaaattgaaacggtgtgtaaacagaaagagcacaaaattctctacaaatttagaatgagccattaagcgtatggaaagccaaaattttagaaaacaaaaattttcaaaaaaaaatcaagtacttgacgaaaaatcatagacaaaatcaataatttttcaaaatcttagctcggattcgttatcagtgcagtttttaccttagaaaaagtgatttgtaagaaaatatttatttatttttttcggtcgggacaccaattccgaaggattacc

SEQ ID NO: 44453 - DNA, 557 bp, Heterodera glycines
tcggtaccagcccaacaacaacagcagcaacaacaaaacgtctgcattggcccatgccccagcggcgaattgcccctcgggggtaaaaacccggtgttgtgcggcgatcggtcggactcaatcggctgtccttccggctttttctgcgccgatgggcccccgtcggtgtgctgtcccggccacaaaagtgccgcttctgtcggcgatgtccgacgaaagccgtccattggggcgcccggcggtgcggaaaagcaattggaggtcaatccatcggatgacgaggaggatgacgcggcacggacaacgccaacgaccgattggccgccaatctgtccggacggatcggacccactaaaaaataaaagtggcgagattatggcatgcggatcgggcatcgagatggacggacacgcgatgtgcacacagggcttcttctgctcaattaacagggagaaaaattgtacgaatggcggggagaggggggggggggggggtgggggagtgccatgggattggtagggagtcaattgggaaaggcattggctcatgggatggaa

SEQ ID NO: 44454 - DNA, 1168 bp, Heterodera glycines
  unsure (1)..(1168): unsure at all n locations
gggtaaggacacaacaaatttggcgcagtcagcaacaaaagcctaagcggctttcatcggacattttaaaaaacatcacctgggtggtgtaagtttccgctgtgagcggtttttcaactcaacaaaaaaacatcacctggggcgtgtaagtttccgcttggtgcggtttttcatcgaaaaaaactgatcacctgggggtgtaagtttccgctgggtgcggttttgaaaattgaacaaattttcgacaaaatttgacatgaacgcggcacaattggaacaaattttgaacgctgtgcttgcgcaatccgagacacggatgcagcaactgcttggaaatgcagcaccagcgaacaacaacctcagcaatgccaatttggcaagttcaattgatgcccggatttcgaaacacggattaggaacgtaaaatttttagcatttttgaaatatttttcactcatttttggatagtcctttttatcccctactttcattgcaattttgatggccagtagagtagaaatataattattcaaattaattcttatttacaaatgccgaatatttgttttttttaatgtgcaatgtaaaatcccgaagtaataaagaaaaatactgagatttaaaaaatcatgcaaaatttgtttcaaaaaattaaaaaattaataatttcttgtaaattacaatttttaaaatttcaacagttttttttctttgaaataaagcaacggtttattacagaatttaaataaaaatcatttaagaataaaattaaataattaagcgaaagattagtcttagtttattcaatttaaaatttttggtcaaatttatctaattttttagaagcatcaattcaatcctccaaaattttcttcgacaaattgtttcttccatcttataatggtattttggtgaattttcaatgttttggcaatttcattatcactcatttttgtattttctctttttatttgcgaataaattttcattttctcctttttttcttcctccgttattcttttcttgctaatgccaaattgtttcttccattttattattgtagttttgctaactccaattttcttacaaatttcggcataattttgtttccattcattttttgaatattntcttttttgcttatatttctctgtcatttcaataaatt

SEQ ID NO: 44455 - DNA, 1030 bp, Heterodera glycines
ggatgtagcctagctgcagctgacgaggaagatttttttgaaaagaaactttattttgcatgacgaattaatccttccaaaatttagcattaagcatttggatttatttgcatccagcgcttttaatttatttgtggtcgtgggaagagtcaggggccctatgtatcctataaaatattaatttgactatttttatgctgaaacttccaatttttattccattatgccgataggcaccgcctgggcattttgaaaatttattgtttttatttgatttttgcacaaaaaatgacgaaaatatagacatattcaataatagatttttcaaaaaaaaaaccatttgtctgggttttttgggcgaattgtcaaaatttctggagaataggcacagggatgttgcgaatcggaaattaaaacagaaaaataaaataaaatatgaaatacgaaaaaacacgaacacaaacgccctaaaaacacgaaaaggcgaaacaagaaatttttttacggaataatttaaaaatttttatgatcattctcaaaatttgatcaaaaattttttacttttctcacaatttcaaaaagatattttctctcaaccccatcccccttcttagcagtgtataaaaatttcgtgtttcatgccaaaatacgaaatacgaacatgaaaagccctaaaaacacgaaaatacgaaaaacaaacgatcaatatccctgataggtagggagtaaaattatatggaaatccatatttttttcctggactgtgggaggcctgaaacgtacgaaaaacatgtttttagcttggtttgaagcttctaggatggatttctatatccatatttattttttttgaaaaattgaatgaattgaaattttattaaaaattgttaaatttatatcaaaaataagcaaaaaaatggaaactttcggttttttggttgatgttctcttaaaaattgtttttttttcttctaaaacgagttcttataccatattcagcgattttagatgtattttacttgaatttaat

SEQ ID NO: 44456 - DNA, 1804 bp, Heterodera glycines
  unsure (1)..(1804): unsure at all n locations
accctggcttcatacccatttagagtttgagaataggttaaggacatttcgtccccaagtcctctaatcattcgctttaccgagtataactgcttaacgagctccagctatcctgggggaaacttcggagggaaccagctactagatggttcgattagtctttcgcccctatacccaagtcagacgatcgatttgcacgtcagaatcgcttcggacttccaccagagtttcctctggcttcatcctgctcaggaatagttcaccatctttcgggtctcagcgcatacgctctgtctccgccccatcgcatgcgatcgagacgggactatgttgcgccccaacaccgcagtgccagggatcacacatcagctccgtaagaagccttcactttcattgcgcctttgggttttgaacacccaatgacttgcgcatacgctaaactccttggtccgtgtttcaagacgggtcgaacagatgaccggcttttacaccgagaacgcacaagtgagagcccgagctggaccgaactggttgctggtacgtgtcgcacgcgaccgccaccgacccccagctcgagtcaacacggacccgaaaccattgcacaattcacccagagtaaacagcactcccccgatccgggtaccagaccccaaaaggctggcctcaagaccgagctcacgcagctactccgagcatctcagcgcactccgcctgcaaatgccccattcgccactgaacagaaggacagcaaaccccagtctggaggctagcagtacaacgtacagcaacaaacgggtgaatgcagaccagatacgccangctctgtccgtttccacctcatcggtttcacgtcctctttactctctcttcaagtgctttgcactttccctcacggtacttgttcgctatcggactcgtggccgtatttagtcttagatgaagtttaccacctgatttgggctgcgatcccaaacaacccgactccaagacacgtaaagatgggtaggcaccgccagttggacaggtcttgcaccttctctggagccccggtcaagggaaacttgaacaagcgggccaacccaagctcacggtctatacgctacacctcgcaaccccagaggagctgcgattcagcgctggactcttcccagttcactcgccgttactacgggaatcctcgttagtttcttttcctccgcttactgatatgcttaagttcagcgggtgttcacgtctgagttcaggtcgaaaaatcaaagcaggaatgccagtaatccaggcactccgccacagcatgcaaagcattggtgcgcttgagttacggtccgtaaaacgcgaattagaaccacaagttcgcgccagcacaccaaaaccccacagccgagctgagcaagtaacgtaagaacacgtacaagtacatgatcccacgaagcaacgcacaagcagtgcattttatggtaacgaccctgaaccaggcgtgccaatggatgtaactccaatggcgcaatgtgcattcgaatgttttgtgttcaaggtttctgcagttcgcactaattatcgcagttggctgcgttcttcatcgatccacgagccgagtgatccaccgataagactagaattcattcttcaacagaagtgtaaaaaaaaataatgaaaaaaaaagaaaaagctggcggtgcccgagctgacactcattgagtcttaagccacgtgctaggccaagcacgggcactaccgcgtcgtctcatcacggccacggacgtagcagcaagcacaaacacaccgctagttacggcacgtaaga

SEQ ID NO: 44457 - DNA, 1687 bp, Heterodera glycines
ttacccataaatgtcgcgttttttcgttttgtttttgtccacttgtgcgacatgcgagtcggcatttacctaattccattatacctatctattatacatagctacaaataagtatatgttgcatgtgattaaaaatttagcaaaataaaaaataaaataaatttggatgcatgagcgggtaaacacaaacattctttgtcaacagtaactcgtgaaaaatggtatagattgagtatttctttaaaaagtctgtgtatttattatggttgcttaagggtaccactgcgtcctcccaacttgagaaagaactcagtgcggaccacgtattttcgaacgagcatttctatggtctcataaatgtaggcattattttattactttaatttgaagattgtttttcaatcattcacttttagttcggcaacacttgttatgcaaattcagtgatccaagctctgtatttttgcaaacagttcagagaaaaaattttggcgtacaaacaaacacacaaaaaatcaggttttgtgcattagtgaaaatgccatttagaatttttcagtttagtcttttttaatttgtaaatgtttaagggatgcaacgcgataatttgctcacttgccttgccgatttgttctcaaacatttcgagtcagaagagaagggttggaacaattgctcccaaaagattcgtcacaaaattaaagcgagaaaatggtagtttcaattaaaaaaaagatcaaaatttaaacggttctaagattttttgcttttttaagaattgttcgacaactttatgcagcaagacgcacatgaattttttaattatttgttgaacgcaatttctgaagttttaatggaggagaaaaagaaggagcaattgggcggaagcctaaggaaagccaacagcgcaatggcaccaaacaaacggtcgttttccgcgaatgcaaaaggccaacccaacgatttgtccgcaaagcaattgaccaggtactatttatatgtaaaactatgttgtatacatgttatatcaaaaaactaaaaaaatgcataaaatgggttaggagattttttttttgcttttttactgtttatttttgcaaaatgtcgattttcaagaagtctttctttttaatgggtttttgttaaggcaacatccctaaaaggtattaaattacgtgccgagcattatgcattattacaaaaacttatttttttcttcgtattggccaaagaacattagcagaaaaacccgccctaatgatatttttaagcacttctgacatcactggtcaacaggagttgacgtggattcaagaagttttccaaggaacgcttacgaacgaaacgaaatgtctgaactgtgagacaatcagcagcaaagacgaggactttttggatttgagtgtggacattgagcaggttttggccattcgatgtgccattgtcaagccgaattggctctttttcagaatgtttccattagccattgtcttcgcaatttttccaacatggaaacactgtcgggtgaccagaaatatttgtgcgaaacatgcggcagtaagcatgtaatggaaaaagaggggaaatgccacgaaaaaacagttacctaattcatccactgctccccattaggaagcccagaaaagaatgcgcattcgcaaattgccccaactgctcgccctccatct

SEQ ID NO: 44458 - DNA, 1065 bp, Heterodera glycines
  unsure (1)..(1065): unsure at all n locations
aaataaaacccgctcctaaaagtgccgattttttctgaccacagctttttgtagagctcgagctgctctttccaatggtctatcctcggtctcgatccatgcgggactcacaagatattnaagagaaattgaaaatttgttttcaaataaggaaattgttctacaaatttggaattttctcagaaaataaaaccgctcctaaagtgccgattttttctgaccacagctttttgtagagctcgagctgctctttccaatggtctattcccggtctcgatccatgccgaactcacaaagatattaagagaaattgaaaatttgtttttcaaataagggaaattgttctacaaatttggaattttctcagaaaataaaaccgctcctaaagtgccgattttttctgaccacagctttttgtagagctcgagctgctctttccaatggtctattcccggtctcgatccatgccgaactcacaaagatattaagagaaattgaaaatttgtttttcaaataagggaaattgttctacaaatttggaattttctcagaaaataaaaccgctcctaaagtgccgattttttctgaccacagctttttgtagagctcgagctgctctttccaatggtctattctcggtctcgatccgtgccgaactcacaaagatattaagagaaattgaaaatttgtttttcaaataagggaaattgttctacaaatttggaattttctcagaaaataaaaccgctcctaaagtgccgattttttctgaccacagctttttgtagagctcgagctgctctttccaatggtctattcccggtctcgatctgtgccgaactcacaaagacattaagagaaattgaaaatttgtttttcaaataagggaaattgttctacaaatttggaattttctcagaaaataaaaccgctcctaaagtgccgattttttctgaccacagctttttgtagagctcgagctcctctttccaatggtctatttccggtctcgatccgtgccgaactcacaaagatattaagagaaattgaaaattgtttttcaaa

SEQ ID NO: 44459 - DNA, 1120 bp, Heterodera glycines
  unsure (1)..(1120): unsure at all n locations
cgcatatatatgcaataattattctttattatgcctttattacaataaataataaattaatgaaatccaattaaataaaatcaaaaataattatgtatcacagaaaaggaaatcaaattgtggaagagttggaatggattaattaattgtgcatgctcaaaaatgaattatgcgacaatttaagcaaaaagtaatgggaaaatagaagagacgaaggcttaaaagtcgtccacaattatgtccaaattacacctgcaacaataatttacgctcagcggcaaacttttggccattgtatgactccgcgagattcgaccaccactcagccaatttcgcgtcaaattgctttttgtttttcgtgtacacattgaggtaaattgccagaaggaccaccaaaccgccccacaaatagcccaaagtgaagggtttggcgaaaaagtaaaaggagaaaacaatggtaacggcctttctcattgtggtgacctaaattaacgaatgggaaaagaaagtcggactctgttcggctccaaaccgtaacggtgaccaaagcacccgaagttctgaccattgtgagcacaacattgacgccgaaatagccgacgatgccaatcagaacggaatagccgtaagtttggagagggcgctataggggcggggaagggggacagaggaggacgaagaagacaaacttgggcaaagaaaaggaaagcctcgccaatctgaccggaaaggcaaaggccgaccaaaatataggcgaaaccgatggaataggagaacagcaccttcaatttaaccatcaaaatggacattagccatagccataaactgcgaacggaaccgaacctttaaatgactatcggttcgattttagggcatgaaaatccccaaaaaatttaaaaattgtcatttttcgctttattcaatttgtcagcgccctatccccgtccattcaccattttcgtcgtttgatgcattatattccctcatcgctttctcctgcacattgccaataatcgcatccgccaccaaagcgagtgaaatcattcatagnnccgcgngggtcgaaattgngcaacactttgctgtcagccaatgagaaaaacacgagtcccaggctcat

SEQ ID NO: 44460 - DNA, 971 bp, Heterodera glycines
  unsure (1)..(971): unsure at all n locations
cccctggcctgcagaaaatggcaactgaagcgtgctcaaaaagtacacttcagtaccaggcgaataccgcgtcggcgtttgatctgagggaaaggtgcccagcagacttattgtagagttttggaagctcgattttctgaaatttaaaaatttcgaaaattttcaaaatttttcgagctaggcctaaaaaacggtttttgggtttttgaattttaagaatttttaacgaattttcccagaaaaacgaagaccacttccaaaacatagtttttcgagctctatcgactggtatttttttcggaaaaatttcgattttttcccggaaatagaaaatttttttggcctcagcgggacatttgagtcccgggcccataactcgtcaggggttgattttagcgaaaaattgtcttagatcaaaattgtagagctttttaaactctatcgaacggtgtacttcatgttcggaaattttcaaaaattttcgagctaggccccctagaaattttcgaaaattttttttgggttgaaaatgggggtcaaaaatatttttctggggtattttggggtgctgaatacgaatatgacctttgttttttgtttcggaatttttggaattttttaaaaattctttattttttggcaattttttggccctcgggattttggcctaatatttgaaaattcataacaaatcgaagggttgatcaattttacaggaataaagccttaaaaatagagaaaaatcatagaattttatggggtttatttgggatttctatcccccaaaganaaaaagttattccagaatttctggaattttcgatttttcagaaaaaattcataactcggttctgaaagtcatactgtaaaagtaaaatactaaaaaaatccgcaattttttgctctatatataattttattttacattttatcacttttttaagaattttataaaaataaaagtgattttg

SEQ ID NO: 44461 - DNA, 1146 bp, Heterodera glycines
  unsure (1)..(1146): unsure at all n locations
taattcatgccacaataaatcggccgcaatttttcgtttgtttttcattggcgaaaaggcggtcanaacgccaaggtaatggttgagcagccaattntcatttgaaaagactaatttttgtaaatgataggggagatattattatttattaattttgtacttttgaggcttaatttagattttaattggaattttatggatatatattttaatcatatttcatttttggattgttttttgcatattttatagtttttatcgtattaatgatttttgtccatgtaaattagtcactattaatatttttaaattaatttttcattttaattaattgtgattaattagttataaataaataatcattttacattttttattcatcagttttagttgcatttttggcctttcgcacagtttaagtatgccgtttaggtacagtaattgctcaagtttcgctaccgtaccgcgctgttcgcgtacgataattaaaaattcggcgttttcttcagtcccatcatttaaaagcgtgtcgattaattcaaaatgtttatttttcagcattttgcgttgctctctcacagtttttgccatttccgcaccataacattgccaattcgctggccatttctctttcgcgttaaacgttcggtccgtcaaatatttcaaatagtcaatcagcggacaaacgaaacgccaagtttcgtttttgccgtttttgaaatgggcgatgattcggaggatggcaattgtttcggccttcgctttggcacagtcgcgcattatttgcgaattttccaacgcgtcgttggccaaaatttgttctcgatattttatggactgagttaacaatttcaatgacagaatattttccgcggaaatcgcttctgccgaattgccattttgaagaatttttttgtacagcgaaaagatttcgttgtgctcaaaatttgctaaagaaaaattcattcatttttaaaattgccaattaacaaaccaaagtgactaaatgcgggaaaatctaacgcattttcattgaaaaattgaaggaattgnggaaattgttggaataaaaagcgcaaaacgaacgaatgaatctgctcgaatttcggggaattgagcagcgaccggcgcataatatcttttgct

SEQ ID NO: 44462 - DNA, 887 bp, Heterodera glycines
tttccgaaaatttctagggggcctagctcgaaaatttttgaaaatttccggccatataatacactattcgatagcattttaaaagctctacaattttgccctaaggcgttttttcgataaaatcaacccctaacgagttatggacccgggactcaaatgtcccgctcaggccaaattttttttctatttccgggaaaaaatcgaaatttttccgaaaaaaataccagtcgatagagctcgaaaaactgttgcttgaaagtggtctccgttttcccaggaaaattcgttaaaaaatcctaaaattcaaaaaccccaaaacctacttttaggcctaactcgaaaaattttgaaaattttcgaaattttaaaatttggaaaaatcgggcttttaaagctctacaataagtctgctggccaccctgcgctcagctcaaagcctaatgagttattcgcctggtactgaagtgggaaaaaaaaattaactgagtctccgtgtctgtacaggtccgggatttggtctgatcaaaaaataaaaaataccggattatagaggacacttctgcggagtgccctcacagcgggcactttttgattcgggttttagaaaaaaagttaggggccctaaactgcaagaaaaagtgagaaatcgcttctcgggactcagtcgtccgcgctgaatttttttctatagttttcccggattctcctcaaaaagttgtaagacccttccaccactttcagggcgctcccggccttcggccgggagattttgttttttgaaacgaaactcaaaacctatataacatatatataactagcgggtgcgtgaaccgtcggctctgggctggaaaaaagcgcttcgcgcttcttgagcttcgctacctaga

SEQ ID NO: 44463 - DNA, 1241 bp, Heterodera glycines
agcagaagcgtaccaaactttgcagggatactccccggttaaggactaacttacactgaaatgagcgccgagctagctggctcaaaaaaattttcgaaaatctgagtctttcgtttttatttattttttgcaaaattaattcttaaatattttttcagaaagggttctgaaacgcaccaaattttatttacatgttagtttaggcactctgatgctttttctatcaaaaagggagatgaataaaatttttaaaaatttttaattcctttttaaacaggccaaaaagtttaggcttaacttttttttcagaaactgatcagaagcgcaccaaactttgcagggatactgaaaggaagagaaataacctattttaaatattatctagtcagttcatttaaataatttttatccaaaaaatttttttttgggttttcggggcagtccccctgaaccgatgcgcccagatttataaggagtccgaatccttcgggaatagcttcgatatacctctactttatttttaccttggatttttgctccccataattgtttgagtaccccaaacggacacttgaaaaaatcgatttttttgttttcggggcagtccccccgaaccgatgcgcccagatttatggggagaccgaatccttcgggaatagcttccctatagtctgtactttaattctgcgttggatttttgctccccataaatgtttgagtaccccaaacggacacttgaaaaaatagatttttttgttttcggggcagtccccccgaaccgatgcgcccatatttatggggagaccgaatccttcgggagtagcttccctatagcctgtactttaattctgcgttggatttttgctccccataattgtttgagtaccccaaacggacacttgaaaaaatcgatttttttgttttcggggcagtccccccgaaccgatgcgcccagatttatggggagaccgaatccttcgggagtagcttccctatagcctgtactttaattctgcgttggatttttgctccccataattgtttgagtaccccaaacggacacttgaaaaaatcgatttatttttgttttcggggcagtccccccgaaccgatgcgcccagatttatggggagaccgaatccttcgggaatagcttccctatagtctgtactttaattctgcgttggatttttgctcccccataggaagattgagtaccccagaacggacactgaaaaaat

SEQ ID NO: 44464 - DNA, 1120 bp, Heterodera glycines
tcgggggttggttttagccaaaaaatggccttagagcaaaattgtagagctttttaaatgctatcgaatggtgtactatatgtcgaaaaatttcaaaattttcgagctaggccccctagaaatttttgaaaatttttttgggtgaaagaatggagtgaaaaatatttttctggggtattttgaggtgctgagcacgaatatgacctttgtttttcgtttcataatttttagaattttttaaaaattcgaaatttttttcaatttttttgaccctcgggattttggggtaaattttgaaaattcatatctagcctaagggttgaccaattttacaggaataaagccttaaaaatagagaaaaatcaggagaattttatgggttttatttggattttctagcataaatatgaaaaaagttattccagaaattctggaaaaattcgaatttccagaaaaaaattcagaactcgcttctgaaaagtcattctgtaaaagtaaaatactacaaaaatccgcaattttatgctctattatataaattttatttggtatttttatcacttttttgagagatgttacaaaaataaaagtgattttgggattcgggaccataggggggtgaccaggatttttgggtggaaaattttttttcacaaaaatcttccaaaaacatgtctttaggggttatttgggccgctgatcacgaatacgtgatcagattttagtttagacatcgttaagacctcagaatccctgtgtgattggggattctgaggcatcattttgagtggggggaggggcgaagttcgaatccggacggtgtacattatttttctatgcatttttgcgttatttttaatgttttaattcatttaaaagagtgtttttttcttaataaaaataaaattttttaatttaaattaaattgtttttttgtgaaaaatgttttaaattaaaataataatttatttacttttattaaagaactcctgtattttttaaattagaatttgtaaaattaatttcaatttaaataaatattcaatccttgtacatttcaaactttctttttaattaataaaaggaataatttattttattttttaaaatttattaatta

SEQ ID NO: 44465 - DNA, 338 bp, Heterodera glycines
  unsure (1)..(338): unsure at all n locations
ttttgaaaaactttgaatttttgactttttgttcgagtttgggtccgggattcgaaattagttaaaatgaatgtcagattcgtgatcagcgacccagaaaaccccaaggaaaagcgttttacacacgacttttttaaaaattggggggggggggaacaaactgcactattaccttgtttaatttatntntttncncagcggcccnnttttgggctccccgtncnnttatgcttnttttttntttagtnatcagaaaggcnnnnctttgcnnnncttnnnnttttccggngctttttacgagcaaaaaaagaagagccgatctcgagttaaaaactaga

SEQ ID NO: 44466 - DNA, 1084 bp, Heterodera glycines
cgcttgcgtatgagacggagggctgtgcacaatcgccattttatttcacagaggatttttatatttagaggttatcccagaaaaatggctatctctttttttgataaattttatacacatacaaatgctctcgagcatgatagggagggcggtgcgcaatagaccttttatttttgagggaatttttaaatttatactctatcccagaaaaatggctatctctttttttgataaattttatacacatacaaatgctctcgagcatgagacggagggctgtgcacaatcgccattttatttcacagaggatttttatatttagagggtatcccagaaaaatggctatctctttttttgagaaattttatacctcacaaaaacgcttgcgtatgagacggagggctgtgcacaatcgccattttatttcacagaggatttttatatttagagggtatcccagaaaaatgggtatctctttttttgataaattttatacacatacaaatgctctcgagcatgatagggagggcggtgcgcaatagtccgattatttttgagggaatttataactttatactctatcccagaaaaatggctatctctcgtttgaacaacgtctaaagcatccaagacctcctgcacagagtcgcggttcgagtcggcctgaaacaaaattgaaatgtccgcgcaaaaaaaaacagaaattccgggtgcaccccaaaatttagccgggacataatttcaccgaagaaattttttaaaaagtttttaaaatttcaagaaaaaatctaacaataagaaaaatttttatatgaaaattccagaaaagaaccattgacaaaatttttcctcaaattttcttgtaaaaaataagattttttgaaaatttcaaagtttaacggcaaaattcggtgaaattttttcccgtccctaaaattccatgatcttccaattcaaaaaacgaatttctaatcaattccaaagtaccttgaatgtagccgaaagtttcttccgaatgattttagactttttggtctgcggtaacggcgtgtcatccgaagagccgcacaaactgtccatgaag

SEQ ID NO: 44467 - DNA, 1048 bp, Heterodera glycines
  unsure (1)..(1048): unsure at all n locations
attgaattgttgacgaagtgcatgcagcagcagtgaaagcactagtatgagtggacaattgacctggaccatcagcttgtttggacgtggaagagactgtgcaggcgtacgatgatgaagttgtgcttgcagcgtaatgctgctgctcgtcaatctccgcctgacgtattgtgctgttgctgccaccagcatggtccgctgcagctgaatttgttgcagcgtcttcgccgttcgtttgattgctcgacgtgccaaacatgctggagacgatcacgtcggctaacagctgtcgctcgtcctccgtcaactgcctctttgctgtcgttgttgttgatgttgtcgtgtacgtacgctgaagcggttgctgctgcggttgttgaagtttgtcatgcggcaaaattgcgtcaaaaaatgcctcggccgtttcgtcgcaacaaatatttgttgaggacgatgtgtcgcttttgcgctgcatgcggtcagacagtgtgatgtcactttccgttgttggcgttgtgctcttctcgctgttctcctcctgctccatttcgttggttgtggtcggttcggatgcaatttgttttgataaacttaaaattaaataaaaattaaaacaaaaaacaatataaaatgaaattctttttaaatatcaaaaaattttaaatatataaataaaggaattgtgaaatgttttgaaatttagtttgataatcaattaatgaaattttacacatgtttaatttaatttttaattattttttaaattattacttanatttttaattattttttaaattattaatttatttttttanattattaattagattttttaanttattttgttttcacccgaatgccctnggcgaagctttcgtncattgcctncacttcgcgctgncatttttccacctcttccgccgccgcttctcttccccgccgcttgtcgtgtagtcaaagggtgcacccatcgcgcggtcagaaacagcggcgacggatccggcgccgtcggcgtcagccgtgccagcatcaaatggacgccgttcaa

SEQ ID NO: 44468 - DNA, 1552 bp, Heterodera glycines
ctttggcatcactttgcccaacgaacattcgtttcggagcattcgcttcaaaaaagactaaaaaagtgaaatggcaatggaaaacggtacgggacaaaataattacattgaaaagggtcgaaaaaacaaaattcactgatttttgattctttgccattttcttttttgtttattaattattcatatatttagcaatttcgaggtatttacggagaatcagcgaaggtgcggatccgactttggtggacattgagagtttagacgaggaaagtggggacggggaggagcgggacgaagacggaccaatggtcggacaaacggtggccgcgtcgtgcgaagcattcgccaacagtcgaatgaattgtggtaagaacacagagatggatgaaggggtgttgtcagagagagtggcgagctcaaaagtacaaaacacagcagatagtcataaccacaaaaacaaacaggaattctcgcttttctatgacgaaatttttgttattttggggttcaattttcaactaatgataaaatgggtggtccagcggtaccgtcggaaagcgccgccggaaatttttttaggaaataaaaaaggttcacatttttttgaatttttaaaaatattataaataaagaaattttcgataattttttcgctgggttggggagcaaaaaaatttaatcagaaaaagaacaattaatgcgtgctatttgtgagcaccgtggcgcagtggaagcgtgctgggcccataacccagaggtcgatggatcgaaaccatccggtgctatcatttttttctttttttactgacaataattgttccattaccactaaaattattttattgtataatttaggaagacgagcaaaaccgaaaaggcaattcattacgccgaaagtacggcaagcagctccaaaaggggtgatactaaatgggtaattgttttggaatcattttaaatttattttgccagagtaaatttgtgtctgccattacccattcgcattggaagtgcaaattgtgcagtgccgacatttacgcggcggttattagtgccggcgttataaaacacttcaaaaaattccatcgttcatttttgtccactgttcaatttgagctttgcaaagtaaacattttattggacacataaccgtaaaattctactcgaaaattaaggcgagactcgagaaaataagcgacggaaaaatggaatttgttggagaaaagctaatcgaatgttcaatttgcagccaaagttttcccgtgacacctccgttcaacatttgtagagccatcagacacatcaaactaaagcatccggaagtgatgccggaacacagaggcggacagagtgcccgggtgggtgggaaaggtgcaatacgtttccatccctcttcatcgtattcaaactccgcccgaaaaaattaaaaaatttttttaatttaatgagattttctagtaacaattataaattttgttttttaggatggatttcaatgccaagagaagcagcagaacggtaatggaacagaagggccatcgaagggagaaga

SEQ ID NO: 44469 - DNA, 1393 bp, Heterodera glycines
  unsure (1)..(1393): unsure at all n locations
ccggacccgaattcgaacaaaaagtcgaaaattttctcatctctcacttntggttccaaaattgaccaaaaaatctaaatttggtcataaaccattggaatatcaaagaatgatcattctatacagctacgaacataaaagtgaatttcctgggaatgcaaagaaaatggtcaataaatgaattgtttcattctttcaggatttctctaatatggggtgggcgataacaatttacattttaaaaagtaaatttttaaattttgctttgaattggcatgtcgattcttttttttgcttctcttcccactctcatagctatggtcatgaccatggtcatttttgtcaaaatctttataaaagaaattttcgatccgtcatttgttgattctatcttttcacacacaatatttcatttttatatttacaaaccgatttttttttttgccttttttttcgtttgcctcagtgaaacaataaatttttgtttcgaaattccaagttcatacataaaaatataccaaattttatcgaccctcgacccttataaattatggccaacgtgcgcaagacgggaatcatttgcaccataagtattgaagaaaatgaatattcactaaggctggccaagaactgttttcccttttcagggccgcccgtttgtcgttctgtggaaatgcttgtccaaatgatcgaaaatggaatggacgtcgcccggatcaacttcagtcaagaggaccaagaagtgagttttttcacttctttgaatttttgagggccatcttttagtaaaataataaaattgcagtatcaccgtgttaccatcaaacatgtacgtgaagcagctatcaaatgcgacggaggacgtgaacaagcgcatcgcgtacggcatcggagtgggcaaggagcgcgggttcatccacaacggcgactttgtggtgattgtcaccggatggcaagcgggtcagtgtggttgggaagtgacgcatttactcattcatcccccgtctttgcctccccaaaatttcaaaaaatagagaattttgatcattgattgggcatggcctaattagagcattccttgcttatctttttgtttaattgacaatgagtatcccaccacatgtaaatgattgattgccccatttgttctcaggtgccggctccacaaacacaatccgtttgcagaaagtcgaataacagagggacgtgtccaatgagcttttgaagacttcgcgtgaccgatgaaaactttttttaggaatttacgcttttgtgacttttgttttcatatttttgttgactcggtgtttatgctcaaataaagaaccttaggctctttttattggccagcttatgannaatgacctgatcagcgaagggccttgcgatcggc

SEQ ID NO: 44470 - DNA, 1455 bp, Heterodera glycines
gtatatgcagcgagcaataaaatattttattgactattatgcgctaaatgatataactcagctgtacgctctcctaaaatccgaaatagactctaaaccgtccaactattatccaaatcctttgcaatcagttccttgtgtacaccttgtgaacgaagagtacgaaaatcagcctgttgttgtagaaggaacacttgatctgataggcgatctgttcttttcaacatgttatcccaagaagagacagaggatcgattggtaaaaattttaattattatttaaatgttgatttaattctttttatttattcaggagcgaacctctgtatgcggaattgaaggatctgatggtttgtccgggcgatttgcggaaatgtctgtcacacttcggacatcggaaggatcagcgcaacttggtcgtcgacgagctggattggcacgacgacgacgacgacgacgacataacagaaggagcttggtgaaagagctatgcttgtttaataaatgtcgaccggaatatctcgcgatgatgcttcgaagaaggaagaaggaaaatatcaaatttataggcgatcggaaaatcgaaactgtacatcttcgacagaatttacaaatttatccggaatcatttactctttttggtgctaatcgtatgtacgcctatcgtggtatgcttggtgtcacggtagagcaacatttatacgctaagcatcgtgtccgtctaaaatttcccaacctcccatgtgttgtacaagatggcggcaacggccatcaaagttatttcccacttgaacttttgaaaatatcttcgttagctatgcaagatgaaactgcttaattatttgttgtatttttttaatggctgcaattataaagaaattaaatagtaaactgaaaattttatacattcaaaaagatcattcatatccaaacggtaaaacctcaagggtttgattaataatgcctttctgacagacaggtaaatatatattattttgtttcctagttataattcgatattccgtcgtctgtattactatatgaaggtcgcattatcatgtcccctctttacgtagggatctcttgcgttcaaaatgatcaatctgaagctcctgagaattgttgacgttcgatatgtaatgcctttgaatctattcgcacaaaatttgttctgcttttgtgtgcttatgccccattctcattacatatgtcttcgctccaccacatgcaaaagttaaatgtcgtaatcgggtttcccgctcaaaatccaatctcgcccggcgactggacaaggtctcgtatattccgaacaattacactgtctgtgtcagtgtatagtaactcggtgtccggtgtattatcacattgcagcatatagtcaagcagtttcagcatagctagattcggtgtccaaagccttaggccaatattgcttgacgtaagttatacgacgaag

SEQ ID NO: 44471 - DNA, 876 bp, Heterodera glycines
tacatcttaattaccctcattaattaccccctcccctcctaattagacaatgtctttctccccccgggcgtccgctccttccgttctttgttggtcaaccaaaggctcagttccctttacgtcggctcccgtgaccatttcttccgtttgtggctgttcaatgtcaacgacacttcctccgccgctttggtccctccctttaaaacgtttctctttttgaacttttttcacagtttgcccatcggtcgctcaatgtgcgggcggaagagcgcgaggaatgccttcggttgggcaacagcgaaagggaatgcgacttttgggtgaattcggcacaaaatcacccaaaatgctgccaacaaaagggtttttaggtgagaaacatttttgtgcgcagcgacaacaatttgctggtagaaaaaacataaaaatgaaggcaatggtcaagaattggtgtttcgacgaaaaaaaatgttaaaaatttcggaggtattttttctaggcttaaaaaatgcgctgatcacgaatctgaactcagattttgaaaatcattgatttttatctaggatttttcatcaactacttgatttttttccaaaattttaagaaaattagtcgggcttaaaagtcacacacagatgttgtagagcctaaaaagagctttcgaatgagctattgaatgtatggaaaagtcaagttttcaattttttacgattttttgaaatttaattattaatcgagacgatggtctggggttcgagtccgcttggctgcggtttattttttttatgacacgatgaaaaaatcttagataaaatgaaggttcatgtataatcatagctcagactcgtgatgagaatatttttaaccccaaattca

SEQ ID NO: 44472 - DNA, 1059 bp, Heterodera glycines
  unsure (1)..(1059): unsure at all n locations
atattggtaatantttcggggattaatttttcttacatttaattggcatcctaataattaattgttctccaaatgtttttaggctgctcgggacgctcctatgaagtgcggcagtgcgccgccgcttcgtcctcccactgtccgacgacgcgtccgcccgtgccgccctcgcgccggaacaccggcgacactgccgccgctgctccgccgatggcacaatcgaacggcatacttcgcctacggcatttgttgtggaggagaagcaaataaaaagggagaggagaagcattttagcgatgccatttttcgatttgattttaaatttgttggaacatttgccgatgaaaaggccacacattttgaataataggtgcacaccctctttacattcagatgtattttatatattgccgccaatttctattatttatttttatttacatattaaaaatttttgcgaaaattaaattaaatatgtattctggaagaggtaatttggatttgtttttaaaaattttaaatttgagttaactgttttagggtaagattttttaaaatcacaatatcttaaaaaatgcatgcttgcgtccatgaaatggttagattcgagtgaattttcttgatttagccgagccatccccaattttacctaaatgccgttcgaatggtcaatgtttttctgtgccaaataaattaaaagttaaattttaatttttaaattgtttattccatcggtcaaatcagcgcatttacaatcatgtgaatgaatttgaaatgattttagcattcacaatgagaaatgcgctgatcaaaacggcggagaacagaagcaaaattaattaattaccaaaagaatttgaaggaatacctaaaaatgccaaaggcaattggacttttagagccaaattcgaattgtgccgagataatgaagacgctaattatgcaattagcaattccatcggttaagaccagcgcattttcatcatgtgaatgaatctgatcattttcacattcacaatgagaaatgtgctggtccgaacgttggagaagcagcagaaa

SEQ ID NO: 44473 - DNA, 927 bp, Heterodera glycines
  unsure (1)..(927): unsure at all n locations
tttgtttctctgcgcgtttgtttgggaaaaatttggaaaattggctatctctttttctgctcaacagtaataggaattccaaccgcattctcagaataattacgccgatactaattgttctggaatttgtttctcggcgcgtttgtttgggaaaaatttggaaaattggctatctctttttctgctcaacagtaataggaattccaaccgcattctcagaataattacgccgatactaattgttctggaatttgtttctctgcgcgtttgtttgggaaaaatttggaaaattggctatctctttttctgctcaacagtaataggaattccaaccgcattctcagaataattacgccgatactaattgttctggaatttgtttctcggcgcgtttgtttgggaaaaatttggaaaattggctatctctttttctgctcaacagtaataggaattccaaccgcattctcagaataattacgccgatactaattgttctggaatttgtttctctgcgcgtttgtttgggaaaaatttggaaaattggctatctctttttctgctcaacagtaataggaattccaaccgcattctcagaataattacgccgatactaattgttctcgaatttgtttctctgcgcgtttgtttgggaaaaatttggaaaattggctatctctttttctgctcaacagtaataggaattccaactgcattctcagaataattacgccgatactaattgttctggaatttgtttctcggcgcgtttctttgggaaaaatttggaaaattggctatctctttttctgctcaacagtaataggaattccaaccgcattctcagaataattacgccgatactaatttgtctggaaattgttnctctgcgcgttngttgggaaaaatttgaaattggctatctctttt

SEQ ID NO: 44474 - DNA, 866 bp, Heterodera glycines
tttaccattgctatttgcaaatagttatccaaattttttttagaatcaaatcacaataattttcaataaatgacttcgcagaaaccggcggaagacgatccgattggtgctgaagaaacagttacgacagctgcagattgtgtcaatgaactgctggaaacaacagaaattcaagcggaagttgatgaattggtaaagagtgtcgttgaatttgtttcggaagcggcctcagcagcggcggatgatgttgaccatcagcagcagcggaatgcggcggatgagtcggcaaagagtcgttttggcatttcgtcacatgaaattgccattccctgcaaggaattcgaccgtctgttgcgtaaaatcggtttaaaatcgggggcaaagaggcaatgccctgggaagaggatgtgccctccgcgcaaagtgaaggcatcggcatcggacggagtcagtgcgaaaatcccaaaactgagtgagaatggcacagctggtgggaagcagaagaagaagaaaatgcaaaacattgtggaatttgaccaaggttatttggggactcacgatcagaattaaaaaaggaaacgagcagggattttgatatcatattcttgtctggcataaattccgaatttaacgaaattactgatgattgaaaatattccttattataagggtaaatcgctaatttgttttgttctttaagtgatggcttcccttttgggcaacttcgaagatgacccaatctttctgaagtgcaaagaagttcagggaatgaccaaagacttggctcaactcacctttcaaatcaaccaatttttgtgccatttcattacgttcatacccgtcgagatgttgggcaacatcaaaaa

SEQ ID NO: 44475 - DNA, 1100 bp, Heterodera glycines
  unsure (1)..(1100): unsure at all n locations
aaaaacttttggttaatgaattattttttgaagggggtcaacccccttattagtgttttgtgttgcggggaaccgcaggcaaatggttggctttaattttccaggaaattgaatggccattagtggttgttaaaaacttttgggttaaggatttttttttggaaggaatcaaaccccctttttattgttttgtgttgcggggaccggcaggcaaatgatggcttttaatttgcaagaaattagattggcaataagtggttgtaaaaaacttttgggtaaggaattattttttgaagtgagtcaaacaccctattagtgctttgctgtgccgagaaccggcaggcaatggatagctttaaatctgcaagaaattagattggcaataagtggttgtaaaaaacttttgggtaaggaattattttttgaagtgagtcaaacaccctattagtgctttgctgtgccgagaaccggcaggcaatggatagctttaaatctgcaagaaattagattggcaataagtggttgtaaaaaacttttgggtaatgaattattttttgaagtgagtcaaacaccctattagtgctttgctgtgccgagaaccggcaggcaatggatggctttaaatctgcaagaaattagattggcaataagtggttgtaaaaaacttttgggtgatgaattattttttgaagtgagtcaaacaccgtattagtgctttgctgtgccgagaaccggcaggcaatggatagctttaaatctgcaagaaattatattggcaataaagtggtgtaaaaaacttttgggtaatgaattatttttttgagtgagtcaaacaccgtattagtgctttgctgtgccgagaacccggcaggcaatgggatgggctttaaatctgcaaagaaattaatttggcaataagtgggtgtaaaaaaacttgtgtaaggaatttattttttgaagtgaatcgaacaccctattagtgctttgctgtgccgagaaccggcagcaatggatggcttcaatctgcaagaaatagattggcatatgtgngtgtaaaaacttttggtatggattatttttgaagtgagtcaacaccctat

SEQ ID NO: 44476 - DNA, 1071 bp, Heterodera glycines
  unsure (1)..(1071): unsure at all n locations
tcaaagggaaaatggcttaattcaggccncaatgtgcgcctgaatcgctatntagcttggcactttcgaantattacatataaattagccctctcaaattttccttcgggcctcagaaaatggctatctctttttcggccaatttcgtaccgatcaaagggaaaattgcttaattcaggccccaatgtgcgcctgaatcgctaattagcttggcactttcgaatattacatataaattagccctctcaaattttccttcgggcctcagaaaatggctatctctttttcggtcaatttagtaccgatcaaagggaaaatggcttaattcaggccccaatgtgtgcctgaatcgctaattagcttggcactttcgaatattacatataaattagccctctcaaattttccttcgggcctcagaaaatggctatctctttttcggccaattttgtaccgatcaaagggaaaatggcttaattcaggccccaatgtgcgcctgaatcgctaattagcttggcactttcgaatattacatataaattagccctctcaaattttccttcgggcctcagaaaatggctatctctttttcggccaatttagtaccgatcaaagggaaaatggcttaattcaggccccaatgtgcgcctgaatcgctaattagcttggcactttcgaatattacatataaattagccctctcaaattttccttcgggcctcagaaaatggctatctctttttcggccaattttgtaccgatcaaagggaaaatggcttaattcaggccccaatgtgcgcctgaatcgctaattagcttggcactttcgaatattacatataaattagccctctcaaattttccttcgggcctcagaaaatggctatctctttttcggccaatttagtaccgatcaaagggaaaatggcttaattcaggccccaatgtgcgcctgaatcgctaattagcttggcactttcgaatattacatataaattagccctctcaaattttccttcgggcctcagaaaatggctatctctttttcggtcaatttagtaccgatcaaag

SEQ ID NO: 44477 - DNA, 1569 bp, Heterodera glycines
  unsure (1)..(1569): unsure at all n locations
aaaaaaaattttggatataaaattttgggccatactttaattctaactttgattagaattatgagatggcccttcgctgcgctttgctcatcaaacaaaaacggttaaaaaccgttatgagtccattctgaacatggccgaaattcactttcaaatggcaaaagcattcatacaaaaccgacaagaggaagaggtaaccgaacgaacagtcattttctgaagtcaaagcaaatttcaaatttaaacccttaggcattgcgttgcctcgaggaagtgccacaaacggagataacgcccaaaatattgttcacaatggcacgactcagccacaatttgtccattgcactgctgcagagcggcagaacacagctgagcaaaaggaacaacaacgacggaccaagccaacggaccatcaaacacacaaagtaacgcaaaacggggggggggtggttaaggacttgagaaagcgggaaggtcaacggcttgaggggggaacggtaacgcccttcttttaccgtatatgctctaattatagcccagtctctattaatcccgcagtctccaattatcccccagtctacgaggtgttttgaaaaataatccctctatcataatcccccagtctctaattatccccccttttctgaggaggttgaaaaataatcccccatgagctataattagagcaatacggtattccctcaccccacccgaatttttttaaagaatatttcaagaccaatttcttttagtttaaagtttttttgtttttgttttttctcaaatgtttatgatgaattacttagttttttcaaatttatccaaacaaaatcgctgtgaaaattttctaaaaatttttttgaaaaattcctaattgtggatagggcttgtctaaatcttctgtgtaatgttaagaaaactatcgtttcagggcgctgatcaaagaagtgcctgaagcgatattttgccgaagttttctcctctccaatggctcgctgaaaattgcttcttcaattctgaacgcaaaaaaggccgtttctgcttcttctgatgatgatccgtccttcatttcggagttcgttttgtgcggcgaggcgccgcgcctttgggcaaaagtgaaacaattggagggccaaaaacgctttttggaggcggcgcaacttttggacggtgtcgaagtggagaatttgcggttgatccatcaattcttggccaatcaaatgacagattctctcagacttctactggaccaagcccgtctctaccgaattgcgggaaacacaaaaaggcgttgagctgttaccaacgagcgcacactttggactgcacanatgccgaaggaatggacgcatttgcggcacttctcggcacagttagcgaaaggtaaggagacgaatcgaaaaaaggttttggacagcacaacagctcacgaacggagagcagcgggagttgggacggatggcacacgcatggcacagcacacccgcgcggggcgagccgttcctttggtttttggatgggcggccgacagtgcatcggacgcaggaaggcgaagcattcgcgcaaagg

SEQ ID NO: 44478 - DNA, 1047 bp, Heterodera glycines
tttttgagagaaattttgcatcgaacaaatgctctgcagcatgagtagaggggcggagagcaatggccatttattgttccgagaatttttaaatttcacgattaggccagaaaagtggctcctcttttttgagagaaattttgcatcgaacaaatgctctgcagcatgagtagaggggcggagagcaatggccattttattgttccgaaatttttaaatttcacgattaggccagaaaagtggctcctcttttttgagagaaattttgcatcgaacaaatgctctgcagcatgagtagaggggcggagagcaatggccattttattgttccgagaatttttaaatttcaagattaggccagaaaagtggctcctcttttttgagagaaattttgcatcgaacaaatgctctgcagcatgagtagaggggcggagagcaatggccattttattgttccgagaatttttaaatttcaagattaggccagaaaagtggctcctcttttttgagagaaattttgcatcgaacaaatgctctgcagcatgagtagaggggcggagagcaatggccattttattgttccgagaatttttaaatttcaagattaggccagaaaagtggctcctcttttttgagagaaattttgcatcgaacaaatgctctgcagcatgagtagaggggcggagagcaatggccattttattgttccgagaatttttaaatttcacgattaggccagaaaagtggctcctcttttttgagagaaattttgcatcgaacaaatgctctgcagcatgagtagaggggcggagagcaatggccattttattgttccgagaatttttaaatttcaagattaggccagaaaagtggctcctcttttttgagagaaattttgcatcgaacaaatgctctgcagcatgagtagaggggcggagagcaatggccattttattgttccgagatttttaaatttcacgattaggccagaaaagtggctcctcttttttgagagaattttgcatcaaacaaatgctctgcagcatg

SEQ ID NO: 44479 - DNA, 929 bp, Heterodera glycines
ttcagaattttgaaaaaaaaataaaataataggagactcagaattttgaaaattttttataaaaactgatgacaagctaatgtgataaaacaggttaattcttttcctttcagtatccctgcaaagtttggggcgcttctgataagtttctgaaaaaaaagttaagcctaaactttttggcctgtttaaaaaggaattaaaaatttttaaaaatttattcatctccctttttgatagaaaaagcatcagagtgcctaaactagcatgtaaataaaatttggtgcgtttcagagcattttctgaaaaaaatatttatgaattaattatgcaaaaataaataaaaatttctaaaaatttgatcgtccataaataatttgtaattgatcaggggctcaccaaattttgcagggatacgtatcggaacactacaaatgcttactaattttcctagattttttaaacccggtgctaaattttttgcagacaccaccattttgcacttaaaaaaatttctaaaaactttaaaaattcatagaaaatttaaattcataggtactactgctaaatcaacgcagagacgcctttccttgacctttttaggcccctgcaaaatctggtgcgcttctgatcactactcgaaaaatgagtgattgaattttcactaaaaagttaagcctaaactttttggcctgtttaaaaaggaattaaaaatttttaaaaattttattcatctcccaatttgatagaaaaagcatcagagtgcctaaactaacatgtaaataaaatttggtgcgtttcagaaccctttctgaaaaaaatatttataaattaattatgcaaaaaacaaataaataatgaactctcttccttaataattttcctgcaccgaaggtactcactcggccgcttcgcggcctcgtggtgtgcct

SEQ ID NO: 44480 - DNA, 355 bp, Heterodera glycines
cttgacctttttaggcccctgcaaaatctggtgcgcttctgatcactactcgaaaaatgagtgattgaattttcactaaaaagttaagcctaaactttttggcctgtttaaaaaggaattaaaaatttttaaaaattttattcatctcccaatttgatagaaaaagcatcagagtgcctaaactaacatgtaaataaaatttggtgcgtttcagaaccctttctgaaaaaaatatttataaattaattatgcaaaaaacaaataaataatgaactctcttccttaataattttcctgcaccgaaggtactcactcggccgcttcgcggcctcgtggtgggccttcgccgcaggca

SEQ ID NO: 44481 - DNA, 365 bp, Heterodera glycines
atcacaaataaaactacttagtcactcaatttttatattttattttttttttgtttttttttttttgacagttcaacccataaatagtggtccacaaaagtcggtccgcaaatgtcggtccacaaaagtcggtccgcaaatgtccgtccgcaaaagtcggtccgcaaatgtcgcactacgattttatgggattttattcaggggttgcgccgtaagggggcggctgtataaaaggtgggacggggaagggtcgttggtgaagaggaaaagagggaaatgcctgaaaatattgactttttctctacaaatttcataaaattttaaagtttttatcggcggcctctgccggcaccgccgcccccccc

SEQ ID NO: 44482 - DNA, 934 bp, Heterodera glycines
ttatttcacagaggatttttatatttagaggttatcccagaaaaatggctatctctttttttgataaattttatacacatacaaatgctctcgagcatgatagggagggcggtgcgcaatagaccttttatttttgagggaatttttaaatttatactctatcccagaaaaatggctatctctttttttgataaattttatacacatacaaatgcgcttgagcatgatacggagggctgtgcacaatcgccattttatttcacagaggatttttatatttagaggttatcccagaaaaatggctatctctttttttgataaattttatacacatacaaatgctctcgagcatgatagggagggcggtgcgcaatagaccttttatttttgagggaatttttaaatttatactctatcccagaaaaatgtctatctctttttttgagaaattttatacctcacaaaagcgctcgagcatgagacggagggctgtgcacaatcgccattttatttttgagggaatttttatatttagaggttatcccagaaaaatggctatctctttttttgagaaattttatacctcacaaaagcgcttgcgtatgagacggagggctgtgcacaatcgccattttatttcacagaggatttttatatttagaggttatcccagaaaaatggctatctctttttttgataaattttatacacatacaaatgctctcgagcatgatagggagggcggtgcgcaatagaccttttatttttgagggaatttttaaatttatactctatcccagaaaaatgtctatctctttttttgagaaattttatacctcaccaaagcgcttacgtatgagacggagggctgtgcacaatcgccattttatttcacagaggatttttatatttagaggttatccccagaaaaatg

SEQ ID NO: 44483 - DNA, 903 bp, Heterodera glycines
  unsure (1)..(903): unsure at all n locations
tttcgaatattacatataaattagccctctcaaatttcctttcgggcctcagaaaatagctatctctttttcggccaattttgtacncatcaaagggaaaatggcttaattcaggccncaatgtgcgcctgaatcgctaattagcttggcactttcgaatattacatataaattagccctctcaaattttccttcgggcctcagaaaatggctatctctttttcggccaattttgtaccgatcaaagggaaaatggcttaattcaggccccaatgtgcgcctgaatcgctaattagcttggcactttcgaatattacatataaattagccctctcaaattttccttcgggcctcagaaaatagctatctctttttcggccaattttgtacccatcaaagggaaaatggcttaattcaggccccaatgtgcgcctgaatcgctaattagcttggcactttcgaatattacatataaattagccctctcaaattttccttcgggcctcagaaaatggctatctctttttcggccaattttgtaccgatcaaagggaaaatggcataattcaggccccaatgtgcgcctgaatcgctaattagcttggcactttcgaatattacatataaattagccctctcaaattttccttcgggcctcagaaaatggctatctctttttcggcaattttgtaccgatcaaagggaaaatggcttaattcaggccccaatgtgcgcctgaatcgctaattagcttggcactttcgaatattacatataaattagccctctcaaattttccttctggcctcaaaaaatggctatctctttttcggccaattttgtaccgatcaaagggaaaatggcttaattcaggccccaatgtgcgcatgaatcgctaattag

SEQ ID NO: 44484 - DNA, 264 bp, Heterodera glycines
ccgattttataatggttggcgtcataaaaaaaatcgtcattgaataaaggaagaaaaatgtttttttttatcttaataaaattttaggctaaatttttgcagaaaaatagaaaaaagataaagccaccgaagaattccaaaaatgcttaatttgtttaatattgaatcattattttttttttaatttggcgttttaataaaaagccaatctttaaaactcgacccattctccccaccacccgcccccccccctacgtttgcggg

SEQ ID NO: 44485 - DNA, 931 bp, Heterodera glycines
cagaaaaatggctatcttttttaggacaattttctatctcgtaaccccgatgctaatccgttcctgagagctctttcaaaatttttcccattaccgtaagagctgcggaaattgtgaattaattctcagaaaaatggctatctctttttaggacaattttctatctcgtaaccccgatgctaatccgttccggagagcctcttcaaaattttttccattaccctaagagctgcggaaattgtgaattaattctcagaaaaatggctatctctttttaggacaattttctatctcgtaaccccgatgctaatccgttccggagagcctcttcaaaattttttccattaccctaagagctgaggaaattgtgaattaattctcagaaaaatggttatctctttttaggacaattttctatctcgtaaccccgatgctaatccgttccggagagcctcttcaaaattttttccattaccctaagagctgcggaaattgtgaattaattctcagaaaaatggctatctctttttaggacaattttctatctcgtaaccccgatgctaatccgttccggagagcctcttcaaaattttttccattaccgtaagagctgcggaaattgtgaattaattctcagaaaaatggctatctctttttaggacaattttctatctcgtaaccccgatgctaatccgttccggagagcctcttcaaaattttttccattaccctaagagctgcggaaattgtgaattaattctcagaaaaatggttatctctttttaggacaattttctatctcgtaaccccgatgctaatccgttccggagagcctcttcaaaattttttccattaccctaagagctgcagaaattgtgaattaattctcagaaaaatggctatctctttttaggacaattttctatctcgt

SEQ ID NO: 44486 - DNA, 785 bp, Heterodera glycines
gcaaattccaaatcaaaatgtcaagcgatgtgaagccaatttttgttcacatatttacacttaataaacaaaaagtaatcttaatgaattgtcaaaataataaattcaaatagtattttctgaaatttttgggaccgattcttagaggtgcatttttcgtttttagtgcatccgtaaaaacttaaaaatctcagccgggattttgcggggtcctagcatttcatagaaattgcgggattaaccccgcgggatcccctcccacaaaaattatgagttacaatccttcaacgggatccgaactgctagataggggtcgcacctgttatgatttatcagaaatcttctaatttggatttatcataaatagggatacgatttttaggtgctaaaaactgctaaaatagttaggttttaggttctaaaaaaccaccaaaataggtgctaaaaatgggaaattaggtgccaaaaatttcggaatttatgggtgtaaaatcgaaaattttttcaaaaagcaaaaatattatgccaaatcataaatgagatacataattttaaaaatcaaaaaaatatataaatttttgagatgattttttgagaataataatttgttaaatgccgtgaaaaaataaaaaaatttcgtaaattttttttatttctgaaaataaagaatggacactgaaaaaaaataaataaaactttgtttttgggttttaaggcctaatatttaattttcactggtcaaaaagtgtaatgctggtctttaaagggatcaaagtagagttggt

SEQ ID NO: 44487 - DNA, 963 bp, Heterodera glycines
ggggtttgacaagtttattggggaaaaaagactttacaaaattaatacccgtggaagaaggggagtgggaaacatgatttcaaaaattttcaatttttttctagtctaatctactcaaagcgggtcaggaattcaataaaaataccattcacggtgcgaaaaatggggttgacaagtttattgggaaaaaagactttacaaaataatacccctgggagaagggagtgggaaacatgatttcaaaattttcaattttttatagtctaatctactcaaaacggttcagaattcaataaaaataacattcacggtgcgaaaaatggggtttgaaaagtttattggggaaaaaaagactttacaaaataatacccctgggagaagggagtgggaaacatgatttcaaaattttcaattttttctagtctaatctactcaaaacggttcagaattcaataaaaataacattcacggtgcgaaaaatggggtttgaaaagtttattggggaaaaaaagactttacaaaataatacccctgggagaagggagtgggaaacatgatttcaaaattttcaattttttctagtctaatctactcaaaccggttcagaattcaataaaaataacattcacggtgcgaaaaatggggtttgacaagtttattggggaaaaaaagacttacaaaataatacccctgggagaagggagtgggaaacatgatttcaaaattttcaatgttttctagtctaatctactcaaaccggttcagaattcaataaaaataacattcacggtgcgaaaaatggggtatgaaaagtttattggggaaaaaaagactttacaaaataatacccctgggagaagggagtgggaaacatgatttcaaaattttcaattttttctagtctaatctactcaaaacggaacagaattcaataaaaataacattcacggtgcgaaaaatggg

SEQ ID NO: 44488 - DNA, 1433 bp, Heterodera glycines
  unsure (1)..(1433): unsure at all n locations
ttcaaaatttggcgaaaaaatacattttcaaatccaattttgatttattattcaaaatgagatttgagatccggtgcgggagaggcggcggcncaattatcattaattgtggcggcggtggcggaggtcgtgcctatttaaattttaaaattcaaattttattttatttttatctatttaggaggctgtagtggtgaggttagcggttgtaagtacattgaaaaataatattttttcaaagttttcccgatttcaatccattttttggttttcgggtcaccctgaaggagtgatacgatcatggtggtgcaattgactttttgatcactaaccaatgttatttattcttaatcttagtcataaaaagttgtaccggatgtttttttcgatacaaaaaattgaatttttgttcgagttcctgtttgtaattagtaattagtcaaaaattgattcaggtttgtaattagcgaccctgaatgttctctttaacaattttcacaatttattatcacaaaaaattcttgcaaaccaaaagggtccctcctggtattttaataaattaaaaaaggggaactttgtaagtaataccaattgttttcccctgttttcaacactttcttagcgaaggataataaattaccactgggtcattaaagaggtcattgtgtttttttaataaaagggcggcgcaaaagttttttttttgttcccgggaaatgacccaattcctttttcgacagagagaatttgcaagcaaaaattcacttacgttaaatgataaaacaataaaattttcttttttattattagaaatgattttcaaactatttatggcatttttatttatttttatgctaaattgcttttactgcgagaagctaacaacatttgcaacacaaaaagcggaaagaaaattgaacacacgccgacataatgtgtatggaaaggcaaattacaaataaattattatgggaaacaaaaaaattttaaaaaattatggaaaattttttatatttcataacttgattgattctcaagccagaattaatgaaccttatttcatttagattttaagcaccaaatcaaaaatgggagacaaaaatatgcactagtttttctttttcttatctcaatgaaataagttcgtgataactttttttcctgagacttcacactttcgtcattgattgtacgcgtaaattagactaattaattgtgcattaattaggccatcggtttcacttttttgacaccagaatcaaccgtcatcgtccgcaacacacgcaaaagcgtttgatcactgcgccgatcagaaacaacaatgngagcagctccaacaaaaatgtcatgctcaaaacaaccaacaaaacacataacaagcagttcgtggttattctcccacaccgcccccggtcaaaatccccgttccaatt

SEQ ID NO: 44489 - DNA, 982 bp, Heterodera glycines
tttgaaaaaatgggtcctaatgtgagtaactttatactattcatactacttaagccctaacatttttgaatcggattacgcattagaacagatatccgaagttttctgaattttataactgattgtttgaaacttttgttcaaattacattaaaaaaaatcatattcaattttgaattaaatctttaatttgataacttatatttctatttttttaaattgaaattattttaattctaaatatattttttctggaattgaaaacctttttgtttgaaaagaatttatgcaaaaagaatgaatgtcaaaaaaatctctcttttgaatttaaaaatgcttctttttctttaatttctgtttttagttgtgcgattccaagcccaaaaaattgtcgtcaaaaggagaatcggtaagcgataaagcatgctttgactctgaaatgtctaaatttatgtttccattaattttaattaagtattcatattcagaatcgtttaaattttaccctttttaaattgctgcttccatttgtaaatgtaattgtaatttacttttaatcgttttgctaattgagcatttgtcaaatttggctgcttctctttttccttgttaaatgttctaataatttccatctttttttctttcgtgtaatgagtttttgctaaaggaacaatatgaaaattaaaaaatttggcgtttttcacagagctaattattttgagggttttcttcattaaaacggtcagcaggctaatgataagcataaaatattttaattgattttcagtgaaaacctataaaataatttaaataacaaaaaacaattcttcaaactgttacggacatttggacagaaccggacaattttgtccaaatcactttactgtcaaatgacatcactgtccaaatgtccgggagcccttcaacatcccgcattttgtgcatttaattttgaatccgacttttaaactcgctttccgtgc

SEQ ID NO: 44490 - DNA, 1542 bp, Heterodera glycines
cgacgaatcggcgtcctccaacacatggttgcgaaatctcccaagcactctaaaaaatgaaaagaaaaaaaagaaagtgttaagaaatagtcgagaaaaacactcgacaacgaaaaacattttacaaatttctcacaatttccgtgttgttcagctctgacttaacagcacttcgctgatccaatgatactttcagccgataaaattccacagcaatttccgcgataactctaaatatgaaaggcgtttgaatttaatttacttaaatattttttggcatcctcgaatttgcaaacaattaagtacaataaaattaaaacaagaacaaaaacaatattaaaaaaagaaaataaaaacaaaaaaataagaaaaaacaataaaacgaaagtttaaaaagaaaggaaaaaatggcactttcctgttttgagaccacaccaaataattttataagtcaaataaattataaaaaaacacctcctaatttggaatttctaaaaaagaaaatagaacttaaatcaaatttttaaaatccaaccccccccccccccccccaaagccaagggttttccgcccttgttatagacctcagcaaaagttcgagctgattggaccagagcaacatcagatcccgaatgggactaggccaaatgtcgggcagacttttgagcataagaacagccaaacccgaagaaagtttgttaatgacagaatgagacagagaacccgcaccaacggtcaaagtttggatgtaaaaatccttcaaggcggaaatcttgaaattaaattttagctttttatattcaaataaaattcgcacattttcgacatcttctacaacaatatcgaagtgatgactgatggtattgtgaaggagtttagcaccataaaattgaacattggttggatttggtgcggtgacgagggacactaaattggggataaataaaaatagaggaaacatttaatacagccgtacttgcaacattccaagaatatggagctgattgggaagataaaaagccgatattatattatacaccgaacacttaaaaaaaactaactttccaaaaattggtccaatattttttgcaattccatgcgtctaatttcgctggtggcattgtaaaactcggtgacatttcgggccaaaagttcgctatcaatatttatcatttttgcgatttttgcattgaaaatgggaaaattcaaaacgctttaaatgtatttaattagaatttttgttggcgttatgtcctgaaaatataattcaattgcaattgtagtaccaatcgataaatcgcttgggcaccgcttcgcggcgccaaccgctctgttttattttaaaaataaattaaaatcttgataaaatttaacgctttaatttattttcttcccaatatcatttctcttctccttttctcctctcactacttctctctttctgttccattcactttccccccctctccctccctattcttcctcctgctcctctctctctctctctctctctctctctctctctctctctctctctctctc

SEQ ID NO: 44491 - DNA, 1097 bp, Heterodera glycines
  unsure (1)..(1097): unsure at all n locations
aaaatgggaaagaaaaagagaaagaaaatttggaagaaaaaagaganataattcaaaaatattataaaataaaagaaaanataaagggaaaaggaagaaaatattcacaaaaagaatggagtaaaatacntcaaaaatagcgaaaaaattggggacaaatcgaatgaaaatttataaatggattaaagaatttggtcttcaaaaacaaacacagaaaagctacaaatcaaaaactgatgaagaaaaaatagaaattgttcaaaaattcattgaaatgtcaaatgaatttaaacgaaaaagaaaatattcaagaaaagaatggaaacaaaattatgccgaaatttgtaagaaaattggtgttagccatggaacaattaataaatggaagaaacaatttggcattcgctgtaaaagaataacggagaatggaaaaatggaaaaaataaaaatttattggcaaataaaaaaagcaaatcaaaaaatgagtgatgaaacaattgcaaaaacaatggaaataaatcgaaatatttttttaaaatggaaaaaataatttggggaaaaaattttggaggattgaagaattaacgatcggaagaaatcaaataggaaaaacaaatgaaatagtgaagcataataattattttttattcgtaagtgattttattttaacatctataataaaccttggttttatttaaaaaaaaattgtcgcaagtttagataactaatcatttagataaagtaattgaggctttggaaaaaagatcaaaaataaatggattagaaattctactgaaaaatgttttgttctttatttagggaaaaataacaagaaaaaagaatattttattaactcaaaaaagatttcataatcggataatgttcgagacttgggcattataattgactcaaaacttaatttctcaaaacatattaataaaattgtacgaaacgcatatcttagaattttccaaattttgagagtgttgaaaagcagggagagaaataaaaactctaacagcagcctataaaactttcgtaaggccccaattagaatatataacggaagtttggaaccctaatcttaaaaatgacat

SEQ ID NO: 44492 - DNA, 1395 bp, Heterodera glycines
aatagatattccagaaaaatggctatctcttctttcgagaaattttctatgcagcacacgctctcgaacatgaaacgaagtgcggtgctccatgcccattttatcgttcaaataatttttatatataatagatattccagaaaaatgcctatctctttttgtgagaaattttctatgcaacacacgctctcgaacatgaaacgaagtgcggtgcgccatggccattttatttttcaaataattttctatatttaatagatattccagaaaaatggctatctcttttttggagaaatgttctatgcgcccatcgctctcgtgcaagaagcgaagtgcggcgcgacatgcccattttattaatcaaataatttttatatttaatagctcttaagggggatacaaacgccaatgagtcccgaaaacttcaaaaagggtctttcataaacttatccttaaaatttctctgtactgcctcaaaattatttataaaatgaaaagtgaccatttttcccactaattgaattctatttttcagctcattttatgccaaaataaaggaaaaagtagaaaaatttaaaaaatccgattctttcaaatgtaaggaaaacatattaaaagaaaaatgacatcacaaaataggttttaaggaaatctaaagaattgtaaaaataaaaaccatttttttatatctcttaatgatttttttcgaaattttctttcgatttcgaaaaaaataattcattttccacccaaactttgaatcgaaataatatttactgttaataggaaggcaaattccaacaaatctttgttgcaccaaattttcagaatatcatgaagtacttcaccgtaacgtgtccaccataaatcagtaccaacatcgggcactttataattttcttctcttaatttgtatttttaatttaaaattgtttttaaaaataaaatcaatatttgttgttagaatgattaaataaatactaaaaataaatttttaatctatactttagtcataggaaatcatatggaaaattaaatctcggttcttacccccttttttgtgatccccagacaaaattttttaattagcgttttatatgaatgatcatcaccagacgaaaattcaaaaaaatgattttatcttttttaataaatatttaattcaaaaaaaatttaaatcaactcttttttgagttataaaatgacctgatcgagctggacaaaattctcatattccttgctagttgtttcttcaaattttccaggcttttcaacttttaatggattggctctgattaaaaaaccgcgataaaactcggcaatatttccgactttcttttggagggctttcttaacttaatttattagatttttcatttattttagacttctaga

SEQ ID NO: 44493 - DNA, 1064 bp, Heterodera glycines
tttcgggtccgtgttgactcgagctgggggtcggtgtcggtcgcgtgcgacacgtaccagcaaccagttcggtccagctcgggctctcagttgtgcgttctcggtgtaaaagccggtcatctgttcgacccgtcttgaaacacggaccaaggagtttagcgtatgcgcaagtcattgggtgttcaaaacccaaaggcgcaatgaaagtgaaggcttcttacggagctgatgtgtgatccctggcactgcggtgttggggcgcaacatagtcccgtctcgatcgcatgcgatggggcggagacagagcgtatgcgctgagacccgaaagatggtgaactattcctgagcaggatgaagccagaggaaactctggtggaagtccgaagcgattctgacgtgcaaatcgatcgtctgacttgggtataggggcgaaagactaatcgaaccatctagtagctggttccctccgaagtttcccccaggatagctggagctcgttaagcagttatactcggtaaagcgaatgattagaggacttggggacgaaatgtccttaacctattctcaaactctaaatgggtatgaagccagggttgcttgactctgaacccaggcgttgaatgtttgagctccaagtgggccatttttggtaagcagaactggcgatgtgggatgaaccaaacgtggagttaaggtgccaaagtgcccgctcattagacctcataaaaggtgttggttgatatagacagcaggacggtggccatggaagtcggaatccgctaaggagtgtgtaacaactcacctgccgaatcaactagccctgaaaatggatggcgctggagcgggccacctatactccaccgtcattggcttgtacacgtgcttgtcgcgtagtctggccatgacgtgtaggagggtcgtggtggttgcgttgaaggctttgggcgtgggcccggccggagcttccaccagtgcagatcttggtggtagtagcaaatattcaagtgagatccttgaagactgaagtggagaagggttccacgtgaacagcagttgaatgtggg

SEQ ID NO: 44494 - DNA, 1519 bp, Heterodera glycines
aaagaaagtttttttttgtggtttttttttacgggaaattaggaaacaaggatttgttctggtttggttcgactcggataaaatttccttagggacagggaagattcgagaaaattggctttggaggccttaagagtttgatagaaccaagttagttagaaataccaactttactaaaaaaccaaagcaagaataaatgtgaaaaaaacaaggaaaatgatcaggtgaaatgaacacaaaagatcggtttgatcgttttgaaggcggtagagagaaaaagcgatgaggccggtgaaggtgaagagcatcgaagaccgtccattcttttataggctcttcggtccacgtgggcggtgcagggggcggttccgatgaggcggcaaaatgggatatatgcgggattaaggggattttagggaatggggaaattggcccgatgggaaaaatttaaattggaaaggctgggaaaagggcttatgagagaagaagggataaaaaattttgaatttaagcctggagaggaaaaaggaatttttaagaaaaatttatgatgatcaacgatgaaaattaacaattctgtcagtgacagcgacagagatccccgccgaggaggaaattcaatcatccttctgtccgttttccttttcgacttccccctcctcctggtccgattctgcttcttcttcctcctcttcgtcatcaccgtttagcaaaggcggagggatggtgttcttcttcacatgggcgaagaagcgagagaactgaccagcgaagtgcgcgaattgaccagtgaagttgtgcacttcacccaacaactcggtcaggatttgttcgactcgcggagtcggagcgcgggctgggacagccttggcacccggactggtgggcatttgtggcgtttgccggctgttgaccgcagttgcggttgttgcggcggtaaggagccgcgcctcggcgctagggaaaggaaaaatgtttggaaaaagtgggtatggaaagaaaaaaggtggaggaaaaaatggttataagcgggagaaaaatttggtaatgagggaggggggtacaagcaacctgttgctgttgattgccattggcattttgttcaacattgggacggaccggacgaggaacgtgacccccaccggacggctgttgcatcggaggagcggcattaggtggcaccaccatttgcatcaacggctgtgccggctggtaagcctgtccattcgccgccgaatgaaaaggagaactggttggaaatgaaatgtgggtggaaaagccttgcttttatggcgccgtttggctccaccttttgatcattggtgatcagaaatgtgcggattatgtgggtatttgggaaaagttaatatacaagggaaaaatttacatatacacaaagtctcgcctcgctctccattcccacgactaatgccgaaagtcggcaattctacagttctgaggctgtattctgtcacggcggatcagtaagtgccgcagccatccacgtctccatagctgc

SEQ ID NO: 44495 - DNA, 1051 bp, Heterodera glycines
aagttttgtacaatttctgttaataaattgaactgaaattttaaaaaattccccggcggcgcctatcggcaccgccggacccttaaaaatccctatttttcttgcaaaatttgctcaaaatcgcaaaattttgtaattttttggacaaaatctgttaacaaaattttcccggcggcgcctatcggcaccgccggaccctaaaaatccctatttttcttgcaaaatttgctcaaaatcgcaaaattttgtaattttttggacaaaatctgttaacaaaattttcccggcggcgcctatcggcaccgccgtaccctcctccaagttcccaaaaagtttttgaaaaaatcgcgctgtataaaacgtgtaaaatagtcactccttttcccaaaaatgttctaaaataatgaaaaatgacaaaaaaaaaatttgataaaatattgaataattttttcaagcgtatactaaaaacatttgtgaaataccttttacttggttaagaattaaaaaatttagcctattaaaatatttagaaattttttattatattgtatattttttaaaaatttccgatttccgacgtttttgggatcggaattccgatttccgacttccgaaaatttttggggcctcggaatgccatccctgatagggaccggcggaccccctgttcctagttttttgaaaaattgcaccgcaaaaaagtggttttgaaaagaaaaaatagtcaaatttatgaaccgttaataatttgatttccgatcaactttttaccgtcggatccaatcgaaaaatcttagtcgacccatcaaccccttttaatgcatcccgccagcccttaaaaatttatttttcagcattttttgatttttggaaattttttgaatttaattgaaattttttcgaattttccaaaatcccgcaatcccgcgcgggatcccgcaaattttaaatgcgggatttgcgggattaatcccgcgggatcccgtcccgcaaagaattttcagtaccaatcccgcagcgggatccgcaaatttgaaatttccgggctcta

SEQ ID NO: 44496 - DNA, 1089 bp, Heterodera glycines
  unsure (1)..(1089): unsure at all n locations
tttaagtgagtntaagctctaaaaatagagaaaaataaggagaattttatggactttatttggaatttctatctaaaaaaggaaaaaagttattccagaatttctggaaaaattcgaattttcagaaaaaatttcataactcggttctgaaaagtcattttggaaaaataaaatattctaaaaatccgcattttttttctctattttataaattttatttcacatttttatcgcatttttaaaaaaagatacaaaaataaaagtgatttttggattcgggaccaaaggggggagcacatggtttttgattgaaaaaattttttcaccaaaatattccaaaaatatgattttaggggttatttgggccgctgatcacgaatacgtgatcagattttacttttgacatcgttaaggcctcagaatccctgtgtgattggggattctgagacatcattttgagggggggggggcaggttcggatccagacggtgtacattaatttactatgcattttttgcttacttttacattttttaattaatttaaaatattttgttgaattaataaataaaaaattatatttaaattatttttttttgatgaggttcggacccggacggtgtacattatttttctatgcatttttgggttattttcactgtttttaattaatttgaagattcgttttaatttatttaaatttatttttttataaattaaaaaaattattttttgtttttattaataacaaaataattttaattaaatttaatttttcttttgatgaatagatttatttttaagcaaaattagatttaaaaatttggatgcataataattcatttcaaaataaagtaaaataaattattccgtttattaattaaaaaataaacttttacattttttattatttagtttttttaaaatttttaaataaacctaattctataaaattatatttaaaattatgaaattatttttgtacatctcataaaaagttagacttttgtacctcttttaatcactgttgtacctcttctaatcacagtgaacgctcctaatcgctgttgtaccacttctaatcactgt

SEQ ID NO: 44497 - DNA, 139 bp, Heterodera glycines
ccccccccccatttcgcccgcaaagggcccaaaatgtcggaccatttcgcatcgacgggggccggtgtaaaagaggtggggggggggtcgccagcgaaggggaaaagaaggaaatgtctgaaaaattcggcttttttct

SEQ ID NO: 44498 - DNA, 991 bp, Heterodera glycines
  unsure (1)..(991): unsure at all n locations
aaaaggtaaaataatcatttgcaaagttcagcatatatgccgatttggctgcactatcatttaatgagcaccaaaaaagggattttgggaaggaattttagaaaataaaattaaaataagtgccaaaaaggtaaaataatcatttgcaaagttcagcataaatgccgatttggctgcactatcatttaatgagcaccaaaaaagggattttgggaaggaattttagaaaataaaattaaaataagtgccaaaaaggtaaaataatcatttgcaaagttcggcataaatgccgatttggctgcactatcatttaatgagcaccaaaaaagagatgttgggaaggaattttagaaaataaaattaaaataagtgccaaaaaggtaaaataatcatttgcaaagttcagcataaatgccgatttggctgcactatcatttaatgagcaccaaaaaagggattttgggaaggaatttttagaaaataaaattaaaataagtgccaaaaaggtaaaataatcatttgcaaagttcggcataaatgccgatttggctgcactatcatttaatgagcaccaaaaaagggattttgggaaggaattttagaaaataaaattaaaataagtgccaaaaaggtaaaataatcatttgcaaagttcggcataaatgccgatttggctgcactatcatttaatgagcaccaaaaaagagatgttgggaaggaattttagaaaataaaattaaaataagtgccaaaaaggtaaaataatcatttgcaaagttcggcataaatgccgatttggctgcactatcatttaatgagcnaccaaaaagagatgttgggaaaggattttagaaaataaaattaaaataagtgccaaaaaggtaaataatcatttgcaaagttcggcataaatgccgattntggctgcactatcatttaatgagcaccaaaaaagagatgtttgggaagaattttagaaaataaaaataaa

SEQ ID NO: 44499 - DNA, 1575 bp, Heterodera glycines
  unsure (1)..(1575): unsure at all n locations
taagaaaaaatgaatatntattgtatcaatntactaatttanatattcaaaaaaggaaatnttattttctttgtntaatagatggttgctttcattaaaaattattaattacggatatgcggaaagaaaggattcatttgttttaaactggctttggctgaggcggcgacaattttataaattgatagccatgggaaaacaaaacggcgatagaatttatttcatcaaatggttttgtttaaacaatttattttataatttaaaatataaaaatgatggcgtgggactggtccatttttatgaaaaatctccgctcaaaaatttgttgatgacttttgaaggtgaaacaaaaaataagtttttgcaataagatttctttttcagatccctaaaattctcaaaaatttaaaaatttttaaataaatccaaaaatcccgtgaaaatggcaccgccgccctgtgtttcttaaacaaacaaacccattattatcttatttatttttatttttaaattttaaatatgtgtaatgcactgtaaacaaaaactattaaacaaaacctacaataattaatgatgactcactcccaattttcattatttcattcatcggtcaccggcttttccatcgtccgccgctgggagcggaggaattggattcgtaaaatgggggagaaaggagatgagacgggctaaagtaattaagcagatgcagcggcggtggaaagcgaatttcgcaacggagagaaatgacggaaaatattttttttgttttttttgaattggattttgcattaattttggagacggactttggcgatggttgtccaatcgaatgaaataaatttagacaaaaaattgacgaaattatgaaatggaaaactttaaaaaatgttattgcattaaaatgtaatgaattgatgaatttagtgcgcttcatggtgcactttatgcttttttcaagaaaattttcaaaacaagtgatttttttcagaatttcccaatttttcccactttccaatttatgcacacatttgaacgcgctgaaaatgtcttactaagtatttcaatgccatggcattgaatttttgcagaaaaaacatttcgaattttcgataagaaacaaatttttcaaaatcgggtaatactagtaaaatttttaatttaaaaaattagttcatattaaaaaaatcaaaattttcctatcagccaatatccatcttatgtatatttcacatgggcaagaaaaaatagaaaaaaatcacattactttgattttctattattttcaagagaccaaataaatatcctatatattaaagttgagtgtttgtatgtatgtatgtatgtatgtgtccgtgtttgaatttgtgtggtgttatgaaatgttttgcgttaaaaatgaatttgaaaaaaagtagagtgagagaaaggtgggaaatagtgcactgtctgactgtctgttgatgcgggcagcggcgggtgggaggggtagacggtgaacagacgcgtgctgctgtgcagcagccagtctgagagatgcgtgcgtgtgtgtgggagagggagggagtgggaaaa

SEQ ID NO: 44500 - DNA, 1467 bp, Heterodera glycines
ctttaagatccgctttttgttgcttaaatttgtgagacacaaattggatggagtgatattttctcttaattccctccccccttattcttaccagtgcataaagatctcgtatctcgtgccaaaatacgagacacgagaactagaaacgagaatacgaaacacgagatgagtaacatccctgctatataaatataaaaaagaaaaattggcagaattcttcagcattttttttcgtcgtaaagtaaataaaagatgcttattagagcccggacgggaccggggccccgccgggattttgccgggacccccggccccggtcccggtttttttggacaaaccaccgggaccgggagtcccggaaaaacgggagtcccggggcccctcccgggtccattttccaagtcccggtcccggccatttgggtcggaaaaacgggactaaatttcaccagtgaaactgccccaaatgtgaaaaatttaataattatttttggcgaaaggtcttttatttaaaattttgaagatggaatttgggattttctacgatttaaactgttaaaaagatcataaaatccacctaaaatattcaaaattagatctaacatagcatttttggggaaaattacttaatatgagtgtaaaaatctataaaaattcttacgccgggcctataaaaatccttattctcttaaaaattgagttgaaatcgcaaaactttgtcatttttttggtgtaaatctgttaacaaatcattcacaaatttttaaaatttttcccggcggcgccggacccccccccccccccccttgtacccaaattcttttaaaaaatgcacagtaaaaaagggttttgaaaagcaaataaggacgatttacatggcttgatataattttaatatcatccaaaatcacaacttttagagtttacggtacatttcgaaagtgttctaaaagcacatctgcttttgaatgacattgtatagtagtaaacaaaataaatttattattgaaaaaaataaataatattaaatatttagataaaaaatccgatcaaattttcacaaaatgctcgaccaaaaattgaaattcttcaaaaatattgtaaacgcgaatttctgaacaaaaaatatcggcgaaaatgcaacaaattcgggtgttttatcgccacccacaaggtttcaatgttttgttttaacaaattcctttttctgataacatgttaataatttcgtatttgagccttaagaatgtaatttttaattttttttttcgctaatttttgttggtgtgatttcgactcattttggttaggcgggatttcgactcggcgggattttgacgcgacgagatttcgacgccacgtgattttgacagcgccgagataatttgctaaaaaatgttaatattaattaattttcgctaaaaacaaatttactgatgtttatgcattaaccaaattattcgatcga

SEQ ID NO: 44501 - DNA, 988 bp, Heterodera glycines
  unsure (1)..(988): unsure at all n locations
tttaattcaactttatcaattaattcaatttttggaattttggttttcgcggtgatttgatcaacttctatgaatttgttgtccaagcgaacaatttggtactgtgactcagaacacactctcttttcggaagtttctcttatttccatgctatacgtgtcgataaaggcaagcctttcaactccaccatgcctgaatttgatcggtaagtgtacaaagcattcgcttttgccttgaccagcttgactgatttcccctaagggaacaaattcgaaatctttttgcttgatctcaacacatggccagactcttataagccctggagtaacgctcttagcatgtaagaaggaagaattgaacaaaatacgagctaatgtcgaaggatcagaagaaatagctgacattgcccaccttttgatttggtcaaagtgttcacaaagactttgtattgtatggctaaacgaaaaacgcatggagtgagtgacctgaaaacttaagtaggaaagttcagattgaagttgagagtctaccaccatactttcaacagcacgccttttcctctgtttcgtcggtgtcggtgatttgagactttcaaccccgtacccctgctgagaaatggtgagatttttgccacatgacgccacaatttttgggttttcctcaaacgtgagaagaagagggtctttattcgctacccaagtcctacccattatttgcccttcaaaaacgtgtgttttaatatattcacaattttttgtactctttgtttgccataaaattagggtactgtcatttagtttacaggagccaaggttaaatggacagttctcagagcttcccanagtgctctcgactcggtccgttcaaatcttacaacattttcgttttaaataagtagcagttttcactgcttacttngaccatgcaaacgaccaanntcaacacatgcggggggataaatcaatcttgttaagagtttggaaaattt

SEQ ID NO: 44502 - DNA, 962 bp, Heterodera glycines
aatgaaaatccaaaccctccgaaatgatcattttccccacatgtaaaggttgttgtggcatccgcggtccgcgagctgtccttcatcgttgcgggcctgttcagcgggcacgagtacgacttccgggtcagcgcatgcaataccaacggccaaggaccgccgctgatgtcggagaagccaattgtggcacggttgccgtttggtgtgccgtccccgcccgtgctgcccggtgttgtcgacgtgggctgggactacgcggtgctgtcctggcagcggcctgagcgtgacggaggcggacgcctgcgcggctacatggtggagaagaaggaggaagggaccggtgagggtgactaattagccatatggcaaattgggcctaattatggcatatttaattggataattgaagactccaatttagtttttggtccgaatataatttgaaaaattttctcgggttaagattttaattcttcgatttttcagattttctttcaaaaaaattttcttattgatttacaatttcaaaaataattagggtttttagaaaaaattccgacaataaaaatttaaaaataaaaaatttcgtgaaagtctttttaatctaaaaaaaaaattctttaataaatcatattcgacagaatattggcaaaaatgcacacaagcaccatccccgtcaacatcgctgagcgtcaccaatctgatcgacggccgcaaatactcattccgaatcatcgctgtcaatgatgccggcgactctgagcctgcgctaatgtgtgtgataaaaaaaattaatttatatataacaataaataaaaatataaagttgattttgtatttactaaaaaaaattcgggaatcatattttttaatcagtttcaatttcataaataaataaagctctctgtgcttgagggttatatgtataacaaaagatttaataaatgtactttacaaaatgc

SEQ ID NO: 44503 - DNA, 1568 bp, Heterodera glycines
ggagtttgtctaatgacacttctctacccagacgaaacgtggaatgggctgttttcccatatggcagcaaaatggctgcacacccagtggatgccgtagcaagcactttgtaggtgtatggggcctttcgcaagcgcctaataatttggccaaacaggaatgtctttcctgtgcctccatcgccgtatatgaagaaacggcgggggacagtcgaatccctagggttcgactgtattgccaacaaaacagcatcaaagaccttctgttggtcgctgttaagtggcggaggggtatttggctgtggacgaggatttggttgccctggaggcaaattcaaatcatcatcgccaaagaaaaactcttcaattgccgcgccagtatttttggcaattgaagttggcgggtctggcaggccaaaatggacacaactgtagccaaagttgtggagccgccaatcaatgtcggctaaggctctatcctctgctactttatgctgtgccggagtaataatgccttgcggattgtacatttggtctttgtacttgttccacaattctatggcattactcggctggccatagagcaggatgctcacatagagccatctcatctgatctggccagcgcgacagagctgcctccgccagagttttgtcccaaattttgtcgtcttcaagaagaccatgcattattgcagcctcagtgaatgaggtacaaagcaacccattaaccatcttaagatggtctgggtctccaggaaagtgacgcataagtgaatagagcgcgaacctttccgggtccgatgggggtacaggaacaattcggccgataggtggccttttaatttgctgccttttgtacaggacccatttgtcctttgcccatcggaaccgctctgggactttttcgaaaagaatgtccttaaactttggatcattcttccactcattttgccattgtttccaataggctgaacactgcgtttctggcagttcgccttgctggatttgttgagctttgctcaccagctggaatgccctatatacaatgggctgttggtttggcaaatgaattgccaatttgacaacatgatgcgaaagacgggcaaatggcattgaatgaacaatggcatatgcttccgttgcaccacggaagttcatcttggcatattgagccggctcgtcaattttgattttattgccggactcttctttgcactcgacataacaatgtcctggccctttaaaagggtacttgagtgcgtatttaatatttgctttgttaccatatgcaaacagtacattatggtgtactcggtaacgtagcagaatataaggattatacggcacgacatgtgagttgtcgtatattaagccgtttacctctaattgggcaccaccatcagttggtgaaggccggaaatacatcgcgggcctgtccgggcgcaaaatcgtacattttgagtaaggggctgggaaccccttcttgcaccgcccgtaaattgggtcgctaggaccacaccaactgtaggagcatctgtgcagttgcatatgcattgtttcgcggatt

SEQ ID NO: 44504 - DNA, 960 bp, Heterodera glycines
ttttattttgtcaaccaaatccaaaactattaggtatcattcaatagccctaagtgtcctctattagcctgcaaaattctgaaaaacctcgttaaggttcaaaaaagttatggttagaagaattcaaaaaacagattttccaagttttttggcttgaactttttttaaacttaatgaatttttttggaatttcgcaggctaatagagcatctgaagggctctcgaacgatacaaagatatttggatttggtttgcaaagaaaaaagttatagtccaaaaacatgtgctcgtacgaaaacgacctggtccgtctcgagacaccccttgtatatgtatgtctcagggtgtttgctatttgtttaccgtagcttttggcttcctataggcgtctatactactagaagtggttttgtccctccgtaccgtaaccttagtgcgccctatttcattactatgatttaagtaatccccgtaataatgttaatcactaactccattccagcgctggtaaacctcgaggaccaatcgctgcagtttctcaaccagtctttgcacgacgcggagatggtaattgcggtgtacggtggacatgacgaggacgaccatgatgatgcggaacaacaacaacagcagcaccagcagatggccaaggagtacttgctcgtcttccaaaagctgggcatttacgtggatggccaaggtcaacccgaacagtgatgaacatgaagcggacttataaataataaatttcaaattttctcaggaaatcttaaatcgttatttctcaaaaaaaaatattatgaaggaaacgatgtagcccatccatctttaatgctaatccccatccaccacttcctttctcaggccgtcgctcgcgtgcccacgaaatgatgttcccgtgccggctgagcgcgaccggcaaattcgccttccggcgcccatttctgctccacttctctg

SEQ ID NO: 44505 - DNA, 756 bp, Heterodera glycines
  unsure (1)..(756): unsure at all n locations
ttcgcaggattctcaacgaccatcccacacatcgagcttccagcggngctgcgatccggntacagagntacccatgtctttcaaaacggacgnnnnggccgcngnnanngngannggagcaacggccncnnccacnccnaccncaacaaanncctgttcataaaatttgagggtaattttatcagcaatcaaaactaaattaatcaataatcatttagcgagtggattccctgctgattgtgccgttgatgacattgacgaggaggagagggaacgccgaaagcagcagtacattgacaacccatggaagggctgtacggtgcggctcgacgccaacaacatcaagccgaatcccggcatgcggtacctttcgaagctgtgcctcaactcgctgtggggccgtttcgctctccggaatcggctgacgaaaacggagatcatcgactgccacgctgatttggccaagtttctgaacgacgtcaaaatcgacatcagcagcatcgaccaactgacggagaaattctggatggtgtgctacaaggcgaaggatgagcacgtggtggagcacgacaccagcaacgtcgccattgccctatggactacggcagcggccagagtgcacttgctcaactcacttcaattggtctacaggcagcaagatctggttcagcgctacgacacgcgcattttatacatggtaagagtgtgcaattaaaatgttcataataaaatattcttttttcacgacaccgacag

SEQ ID NO: 44506 - DNA, 861 bp, Heterodera glycines
  unsure (1)..(861): unsure at all n locations
ttttcagtcagtttattttgaataaccgcgatagatctttggaaatcaaatgcattggcagtgcttccgagcttccagatttgccgttggcacaaattgttcaatggcaatgggatgggaatgggcaacaagtgatcaaaacagtgagtttattcgtattaaaaaatttagttttttaaattaataaattatctacctatactatgattatttattcgattagagtaaaatgatcaaagctcgtgagacatttaaattctacgtcaattctctgtgttccattgtgattagaattctcaaaaagcgggaaaaaagtgccaagaagtaatgccaatttttgtttggcaaaatataaatgtattttcttgttttagtctgtgcccaccgatcagtttgccagacgaccaatttacggttctcattggtgataataaggtgaagtcatacactgtttatcagatcacggcacctttaggctaggttcttaaatccgccagaaaggtcggatcgacaaataaaaaaataaaaataaaacttgcaattttaaatgatcaagaaattttaacaaatacatttttatattataacaggcttttaaaaaattatgatttttaaaattttagggctaatagaataatatgtgaactgtagaatgattttaaaattgaaaattcgttgtttttgacaatttttgatttatttaaggagttttcgcaagataaaatcatcaagaaaagtaaaagacgctcctccccaaaaattaaaattaactattttattanattcaannttagaatnnttgaaattttttagatcgatctgtcctccatttttctatgtccgtttcgccagtgatcaatc

SEQ ID NO: 44507 - DNA, 1029 bp, Heterodera glycines
  unsure (1)..(1029): unsure at all n locations
catatattttacgatntgtcatgggaagtatgggggtttggaatttctatttcttcttaccattggcttaaaaatgccaaaaattacataaatatttctccccgacaacttctaaatttttgttcgaccttgtttctgatctatcaagaatggttgaaacttcggactttatatgtcccaatgattttgaacaagatcaaagcgagacgagatccagttttcaagactctctctcgagtttacaaatcaaaaatttgtatttttgcccaaaatcacaccataattcagcataaaaattttatggtgtgtatatgcaggcagtaaaatgtgtgcacttattgcaaaatgtgacgagaggggaggaaccataaaagtgcatcagtttttcgcggaaatttgattagagagaaacggtgggtggttactggatggttagttggttgtttagtgaattgtgatgaatgggatgggatggatgatggaaatatgatgggggaggggcaccgaaattgatataaatctgtgtgcgtatcacataacgccaacaactgcagcggcgcggggacggacgaagggtggcggtctgttcagtccccaacctttgagtctctcgccggaggggatttaggccttcattgtaatttgcctattttagatattagatacctaaataagcgcatccttattatggcatttttggcatttcgccctttttttgcggctattttggcaacgccggaaaacccagattttttttttgcaattttcattttaacaaattacagggttattgcagtggtttttattttggaaggctatagagcttcaagggagtattaagcccgacccggacctgtgcccagcagaccgggattttcctcgatatattttggccgggctggatttcattgccccagatttccctggattgttgtccaggtaaactgtttagcttcacaaaaaaaacaaaacaagtctagaccttttcaaactattgactgatcaaacttatcacaaattgatcaatag

SEQ ID NO: 44508 - DNA, 663 bp, Heterodera glycines
tggattttgcatgtgaaaaagcgtcacaatttaatttctatggtggagaaaaaatcaaaaaaaattcggtgcaattggtgtcatgaaccccgagggttcgatttttttttttttttgctttatgcccaatttttttcactgtgccatattttattaggttgtccataaatattgtcactccataaaaaatggggtaacttttgaattctcacaatttttcttggcataattagtgtcattctctagagtcagctatattttaattacgcgttttcggaaatttatttaacttaaaattttacctaaatttttggcttgaaaaagcgcgtaaaacacacggaaaatttaaaattgaaaaatttacgaattgaatcagcttcatttgattcaaactgtttttcttttaattctaaaaatttgacttcacttttttagggggtgccaattattatgagacaaccaaatacaaaattttgcaaatcggattgaaaaaaaaaacaaatttagccatttaacaatttgtccccgacaaataacagattttgaagatttggggtcaaagctagaaaaaattctaaatgtaagaaaaagtcaaccggtgggaaaattttaaaaattgtcgaaatttccaaaaaaatttgcacatttttctcgaaacaaatg

SEQ ID NO: 44509 - DNA, 1111 bp, Heterodera glycines
tggaggaccaccgcaaatgcgcgggggtggcataacgcagcaacaacaagcgattggcaatcatccacagcaaatgctctgcgcgggcagcggcggtggacagccgcaggaatcggtgaagcgcaagctgatccagcaacagttggtgctgctgctgcacgcacacaagtgtcagcagatcgaacgggtcggtttttatcctaatttccattggtttcattcatacattagtagtgtctttttttatgttcgtgagaactgcaatagagccgtcgggtcgatccccccccccccccacatttctaaaatctctattttcagtctgaactgcgacaaaaccgtgcgccctgcacattgccctactgctcggtgatgaaggccgttttggagcatatggtcggctgttcggccgggcggcagtgtcagtacgcgcactgcgcctcctcccgggaaatcattgcgcattggaaggactgtcacaaggacgactgtccggtgtgcaacatggtcaaacggtacaccaacggaacagcggctgaccggcgacaaggcatggcaaaacatcgaactaaattcaagaaacgggaaaaaaatgtccctctattttcggtgtcttttcaagccactaactttggtagctgtctaactgaattttattattttaattttccgacttttcgttggtaaattgctcccatttagctgacattatgctgggtgctatcggttttccctctgtgactttgcctcaagacgcggttgggcaacaggtcaatttatttgccaaaaatttgaaaaaaaataagaaatttatgtgcgtggacattagagctatgtttaaaaattaaattttctgaaatcatgtttcggctgattttatggttgcatttataagtcaaaataaaaaattagtcacaaaaaaatgagaaaaaacaaatttgacctcctccctttccaagtatgatcaaacaattcttgcaatgggtgcaaataatcacttaatcgaattgtttccttgaatttacgaccgtttccttttagcaaccctcaagttcggcaagtgtttgtagtggaccgttctctgtcggaagcactcctattttattgaaga

SEQ ID NO: 44510 - DNA, 724 bp, Heterodera glycines
caaaaaattgcggattttttgagtatatcatttttatcatatactttttcagaatggagttaggaatttttttctgaaaaatcgaatttttccagaaattctggaataacttatttatattgaaagataggaattctaaataaatcccataaaattctcctaattttttgctatttttcaaactttattccactaaatttgaccaaaagcgaagagagttataaattttcgaaatttcactggattttccagggcccaaattgtgacgatttttcaaaaaattttaaacactttccaaaaaatctgaaacgcaaaataaagcgtatatacgtattcagcacctcaaattatgccataaaaatgcattttggctaatttaggagcaaaaaaatttttcatgaaatgcaaaaccatggggtcccccctatggtttttaatttcaaaatgcatttttattttataactttttttaaactcatggtaaaaacatgagataaagcacattatattgggcttaaaattctctacaaaaaagctcttagacgattttttgataaaatcaactcctgacaagttattgcgccagaactgaaattgaggcctactaaccaaaaattttctatttccaaaaaaatttttaaaaatttttctgaaaatgacaccaatcgatagagcatgaaaaacggttgcttgaaagtggtcttcgttttgcccggaaaaatct

SEQ ID NO: 44511 - DNA, 812 bp, Heterodera glycines
tattgccaatctaatttcttgcagattgaaagccatccattgcctgccggttctcggcacagcaaagcactaatagggtgtttgactcacttcaaaaaataattcattatacaaaagtcttttgcatccacttattgccaatctaatttcttgcagattgtagagctatccattgcctgccggttctcggcacagcaaagcactaatagggtgtttgactcacttcaaaaaataattcaatgcccaaaaagttttttacaaccacatattgccaatttaatttcttgcagattgaaagccatccattgcctgccggtctcggcacagcaaagcactaatagggtgtttgactcacttcaaaaaataattccatacccaaaagttttttacaaccacatattgccaatctaatttcttgcagattgaaagccatccattgcctgccggttctcggcacagcaaagcactaatagggtgtttgactcacttcaaaaaataattccatacccaaaagttttttacaaccacatattgccaatctaatttcttgcagattgaaagccatccattgcctgccggttctcggcacagcaaagcactaatagggtgtttgattcacttcaaaaaataattccttacacaaaagttttttacaaccacttattgccaatttaatttcttgcagattgaaagccatccattgcctgccggttctcggcacagcaaagcactaatagggtgtttgactcacttcaaaaaataattcattacccaaaagttttttacaaccacttattgccaatctaatttct

SEQ ID NO: 44512 - DNA, 864 bp, Heterodera glycines
aaaaagcatttcaaattcgcgatatgaggggaattcctgtgccatcgtcatgtcaaaaacactaaatgaatttttgagatggggtggggtggtgctgatctgattctgtccgatcggaattgctctccttaaaatcaacctcctaccgtatgcgcttttgctgctcgtcttccgacgagttccaaactcacattccccccccccccctctcctgttgttcttcagcactccctctctcattaatcagcgtcggtttgtccgtcggtccgtgcgttgtttaacgtcgtgcccctcccccccccgtcccctcccatttttggttttccccacaaataccatccatcatctgatctgatcaacatcccccgcccgcctgcccgaccgcaaatggtgttcaacaacacgcgtgagcagcattagagcagctggcgcaccccgcgccataccccgcggcgaagaacgaaccgttagttcacgcttgatcgaactgcttgctaatgaaattaggggggcgggggggaaacaccactctctggtgagcgaacaaagctccctcacccatttaaagttactctaatcagagttggcacttccgcggggggggaccttcgtgttcaccacaaaaagtgatggatggagcgcggaagaagaagtgagtcagtcattgagcaaataaagggatggaagatgttttcaacggaaatgcatgtaaaaatgggctggcagagatgttttgtgcgttcggcggtgatcagcagaattcggatgatttgtgttcattttgctgattatcgtacagtaccacggcacggcgaaaggaaatgaaacgaacgaaacgcaatttaatgcaaaaaatggacgagt

SEQ ID NO: 44513 - DNA, 1135 bp, Heterodera glycines
ttaacggcaacgcctgaccctaagaatcctttgttttattaaaaattggctcaaaatcacaaaatttggacaatttttggacaaaatctgttaacaattatacccaaatttaattttcaagcgaagtctacatcggtttgctcttcgtgtaaatggcaacatttaaacactataattttggattataattttttaatttttttttatctcattcagttttgattataagcaaaagagacatttaactattttatcattttaaggaaatccaaattttaataaatgtatcctgattaattaatatatataaattttgttttcactttgtaagaaataattattatttttgaatttgagataataaatccatcaaatttaattttagaatgaaaagaaataaaaattgattattcgcctggtacttaattgtacacttttgacaacaaaaagttgtaggagcacccaggccagagggttagagataggggttaggggtcgctggcaacaatgtcaggcatagtccaacttaaaatcctaccagcaaaaattttttgatttgagcaaaagaaaaaattttaatcatagaactcccttatatatagtacgattttgattatttgtgtagtaaataatatttcaatttgttcttactacgttccttcgaactcttccgttgatccatcgtatcttttgttaatttttatatgctttatcaaaccgttatcatatttaattcagtactttgtgttgcgctttagctgatttcgcttcatacatatttcttattccttaccgaatgaggaattttgatttctttcaaccaggtatggctaatttaatttttaatttgaaatactaaacaatttaaactattttggattattttgcagatccaatattaatttatattgccttgttttgaacataaaaaatttttagtttagtttttatttttttgtgttggaatttaaaggatttttttctaagtatattttcttttattttaggtattattttgttggatttttaattttttctattgttttatttttaatgctctttcagaccatgtgaatatcattaaaagtataagttaaaaagtacagagttttagttttataaatattggtttaag

SEQ ID NO: 44514 - DNA, 1256 bp, Heterodera glycines
  unsure (1)..(1256): unsure at all n locations
cgattatggcaaaaatgaagccccnncagtgttcnttaatgaaaaaaatatggtaattagtttttgcaccagtaaattaaatgattttgtgttgtcattaaaaattattcaaaatttaattgcatctattccttttgacagcgatttaaataataaaattatttntaaaaaatcatttaaaattattttaatatttataaaatggatttaattttttacatttcacatttttgttccgtgagaattgctgctcctccgttttcagcttatcctttgctgtgtatgtttgtttgctgggacaacattgttgatcgcattgaaatcgacacattattaattgattatgtattatttctataattttaataggcaattataaattatatgaatttaattaattaagaatgggaaaataaaaaataattattatataaattgattttattaattgcaggctttatgtttaatttatttccattaaaaccatgagttttcccattcaatttacatatgttaaaaaataatatttattaatttatttgaattatgaaaataaactaaaaaattttcttcagttgcaatttttgttttgcacgcactgataatgaaacaaaaataattacttaacattaccggttaaaaacaataataatataataataatattttgtgtgatcttttaaaaacggtagaagtgattgattatgtacacattagaaaatgacgaaaaagaaacaaaatgtttcaaaatatatttattgtacatatattagtgaaaaaaaagtaatttgaaaaaacaaaacaaaaataggtattttggatgggtttcaaaatgttaatttgccagaaaaatatatttgtgaaattgaaaatgcctattaaaaaaaaaaaaattcttttcaaaaatattaaaatttaattgacggtaatttttcgcaactaaaatttgtattaaaatttaattaattaattaattaattaactcccaaaaatatcacacaatttaattggccatggctatgcccgcggtatatcaaaaagcctaacatcagcagaaggtgcccattaaaaagataaataaatatcactactttttcgtacacacacacacacacacaaacagcagcagcagatgagagttaagagatggagaaaatgagcggggaaaataatgaatgtttgctactcgtgatggttttagtgtggcggtggttgctgctgttggttggacaactgactgctgacaaaatgagaga

SEQ ID NO: 44515 - DNA, 1665 bp, Heterodera glycines
gcaaaatcagcgtgcttgtccttccccgaaaggggttcgtaaaccggtgataatttgccgtgattgggatcggacattgcaattattgtccgtgaacgaggaattccttgtaggggcgagtcatcaactcgctctgaatacgtccctgccctttgtacacaccgcccgtcgctgcccgggactgagccatttcgagaaattcggggacggttagtgttccggcttcggtcggtatgcagactggaaccgatttaatcgcagtggcttgaaccgggcaaaagtcgtaacaaggtagctgtaggtgaacctgctgctggatcattacccaagtgattcctattcaccacctacctgctgtcctgttgggctagcgttggcaccaccaaatgcccccgtccgctgatgggcacaggtcgttcgagatgacttgtggacgctgcccaacattacggggcagctgcctcacgagccatgcttttggggtgcttccatacgttggagctgtggtataccgctcagtgctgcacgtgtgaaagcctgtgtatggctgctgcgtggcaatgtgtcggtggcgggccgcctcgcttggctggttcgctgcgccaatgtgggatgcacgctcgtggggcgacctaacggctgtgctggcgtctgtgcgtcgttgagcggttgttgtggcaggcacataacacactgactggggatggtggtttcgttcccggtcttacgtgccgtaactagcggtgtgtttgtgcttgctgctacgtccgtggccgtgatgagacgacgcggtagtgcccgtgcttggcctagcacgtggcttaagactcaatgagtgtcagctcgggcaccgccagctttttctttttttttcattatttttttttacacttctgttgaagaatgaattctagtcttatcggtggatcactcggctcgtggatcgatgaagaacgcagccaactgcgataattagtgcgaactgcagaaaccttgaacacaaaacattcgaatgcacattgcgccattggagttacatccattggcacgcctggttcagggtcgttaccataaaatgcactgcttgtgcgttgcttcgtgggatcatgtacttgtacgtgttcttacgttacttgctcagctcggctgtggggttttggtgtgctggcgcgaacttgtggttctaattcgcgttttacggaccgtaactcaagcgcaccaatgctttgcatgctgtggcggagtgcctggattactggcattcctgctttgatttttcgacctgaactcagacgtgaacacccgctgaacttaagcatatcagtaagcggaggaaaagaaactaacgaggattcccgtagtaacggcgagtgaactgggaagagtccagcgctgaatcgcagctcctctggggttgcgaggtgtagcgtatagaccgtgagcttgggttggcccgcttgttcaagtttcccttgaccggggctccagagaaggtgcaagacctgtccaactggcggtgcctacccatctttacgtgtcttggagtcgggttgtttgggatcgcagcccaaatcaggtggtaaacttcatctaagactaaatacggccacgagtccgatagcgaacaagtaccgtgagggaaagttgcaaagcacttgaagagag

SEQ ID NO: 44516 - DNA, 601 bp, Heterodera glycines
  unsure (1)..(601): unsure at all n locations
tttgttggcatttagtaaaatgcgaaattttgccggccaacgaaagcaattggaattatgatggcctgaaattgtcgggcaaaagatcggattgccgcatttgcatttttatttggccgagaaaatgagcgctgagaggggacacgggacaccgaattgagtctccttttccccgggggggggatttaaatttggagacaataaatttaaaaagattacccaaaaaggaatgaaaaaaatggacgggttactgtataattatggtacaaaacacaatttaattacgttatttaaagtagtcaaagtgtggaatacaaatgaaatcaccctcttttgccggtttgaataattaattaataattttaattacccttccgctgattaattgcctaattttgtaattattggccaaggattggcttggctttgccccctccccctacttctcccaatttgctgtttcttcctctgtttgcccatcggatgagctttctccgccgtgctccgctgtccgggcacaaactgtgcgatttgggttgtcattgtcgcatttttgggccctctcaaaatattatcccctaatgggggaggggggnggggg

SEQ ID NO: 44517 - DNA, 1243 bp, Heterodera glycines
tttggttttttattaaaaaaaaaccccccccccccccccccccccccccccccttggcgtccctaggccattttttacgctgggattgttgctattattcgcggcttcgcccgattcttatgttggtctttaaaaatggcacaactcactttgtaggggaacatgtcctcacattcgacgagcactccgttgatgcccaactgacgaacaaaacggagcagttcaatgaagtaagggacctcaaaagatggaaatactactcaaaacagtgttaaatggatggaggcgtactttgaaaggtgctcccttcaggtcgaaatgcacccaaagtttggggggcacaaaattcccttcggacgttagcatcggatagccgtcgtaatcctttgccttaattgcatttaatgatgacccagttaagcggtcacatcttaaaattccaatgttcaaccaacccgaacattccctgggcttttcgctgtgtctttttgtttctgctggacaccgttttggacaaggaacatcgaatgaggaaatgacaaatccgctttggctgtaaaagaaatgaaatatttcatgaaattccatccccaattttatggtacaaccgccaagtttccgttgctgcaaattggcgagttgcgattggcacacggattcactgttccgcaatgtttccaatttgatgctcacatctaattgtgaggcaattattggcagaaatatgtaaattattttgggtccgataaaaccccttaaaaattcaataatgaaattttaagggaattagcaaaagggtcaatttattttgaacattttcgaccaaataccctccgtttccatggatagtctctccccgataatcccaccgatgagttccgtttgcattcggcccatttgaacattttgtgagcgcaatttttggcgtaatgcctccgaatcggtgatgggaccaatggaaatgttcaggtagaaaatgatgaggaagaacagcaacaacaaacagagggcgacgcagaaaaaacgaagtctttgcaatgggaaagaatgggcgacgaccctttgggggaggagggtaattagtccattgaactaattagggataggggaggaattggacaaaatttaaaaattaattatgcaaggaattaaaaagggtgggtgcaaacactttgctaatttctcatgctcacctaattgtcctgcggcagagagacccggaagcaattgccatttcgcttac

SEQ ID NO: 44518 - DNA, 1264 bp, Heterodera glycines
  unsure (1)..(1264): unsure at all n locations
aatttaatttcgggaacattaattaatatacacgttcaaatgatatcaatcagaattcaactgcgcggtctactgccttgaaagaattacgtattcattgctttttaaaaataaagtgaaaatagagcgaaaatattgctttaagtaagaagaaattattctactcatatttcataataattattaatagatttacttcttgattatttattatctcattttctcgaactaataaaatttataaaatttctttttatttttataaaaaaatataataattagatattttagtaaattatcattttaatataaagaaatattaatttttttttaattatcaatttaaaaattgtcattgtgattttctacagactttttcttaaataatcttcgtcaaatgttttaacattttttgaattgcggcacttaaaatttcgcatcgaatattgtgaaagattaaatcttattcttaaataaatatctcttctataaattgtttctctagtgatcctcaggaccttagtattttctcctttttttggcttcgtaagtacattttattttacaaaacgttgtaataaataaataaatttgcagtcttcttattttaaaaattttttgtattaattaaaagattttgaattactttcattatttaaaaatttccttagcctatcagtattttaccgaataaaacaagaaaataacttttagatttatttatgttttatattgaatatttgcgccnntggccnnnggnttnnccgnnngtntnntgncnngnntnttggnggngngttgnnccgtgnttgtttcgtttgnnncttttttggttcgcnttttntnnntttgnnnttngcccnnncgttggtttttnnttggtccctttcngggntgggcccnnttggncncttgnttgcgtcgtgcgtttngcgttntttgcgctcctgccnnttgcgtccttccnnnnttgcgnngtgcgcnnngctttcntttgcgnctntgcgntgggcgntntgcgnnngcggcgttttttctccctncttgntttgtttngttcttcccgcgcgngtcctttttttnnntttttttcctngttttggggtcgttnnnncgcttttttgnggngcgctttttccgggnnnnctttttgggnnttgggggctggcgccgccgggaaaatttttgtctgtttggttnttntttgttgnctgcttatcttaaaagaatgatcaaattttgtgatttttatcatttttctaat

SEQ ID NO: 44519 - DNA, 745 bp, Heterodera glycines
  unsure (1)..(745): unsure at all n locations
gcgggagtgtaacagtgccatatgggcccatgtatttgccataggcaattcaaatccaccatttcatcgcttttcacaccaatgcaacggctatttattggacaacatttgtgccaaaatcattcataaccaaagcattttcccattgattttgccgttttagctccttcaatgcctttgcctattcataactcccattagaactctttcgcgcattaatatatgtacctttattgttcgcgtgatggctcagccggaatgccattaattgccggttggtgccatcctttgcgtcggcatcccttcggaagcgttgtcagcgtcggttgctgcctgtggcagcagcgacaacggcggttacccctcgggcgactgcgctatctgacaaaaaatgggccatttacaataaattccaaattggtcaatgttcaaaatattacatttaagcaatcgcataaaataatatttaattgcttaaaaatgtgaccgcaaatttcttcttcggatgccagtcctgagaatgttattgccttgccaatttgcacctcatttttcgtaggtcgcttttattatattaaaatcttgttgaaatattttgttttaatttaaaaaaaaatttaaaaaaaactttattagactttcacctgaatattaaattttcattgaaaatcccattaaaattagaaatgtgctgtgttctacagtatagcctatttcaataaatcgnngnattttgtaaagaaga

SEQ ID NO: 44520 - DNA, 1280 bp, Heterodera glycines
ctcaattagcaaaaatatgagtgatcgaattttcactaaaaaagttaagcctacattttttggcatatttaaaaagcaattaaaaaattaaccgttttgagtagattagactagaaaaaattgaaaatttagaaatcatgtttcccactcccttctcccaggggtgttattttgtaaagtctttttttcaaaataaacttttcaaaccccatttttcgcaccgtgaatgttatttttattgaattctgaaccggtttgagtagattagactagaaaaaattgaaaattttgaaatcatgtttcccactcccttctcccaggggtattattttgtaaagtctttttttccccaataaacttgtcaaaccccatttttcgcaccgtgaatgttatttttattgaattctgaaccgttttgagtagattagactaaaaaatatgagtgatcaaactttcactaaaaagttaagcctaaactttttcccaaagttaaaaagcaattaaaattttattcacctccattattgatagaaaaagcatcagagtgcctaaactaacatgtaaataaaatttggtgcgtttcagaaccctttctgaaaaaatatttatgaattaattttgcaaataaataaaaacgaaagactcagattttcgaaaaatttttttgagccagctagctcggcgctcatttcagtgtaagttagtcctttaccggggagtatccctgcaaagtttggtacgcttctgctcaattagcaaaaaatatgagtgatcgaattttcactaaaaaagttaagcctacattttttggcatatttaaaaagcaattaaaaaattttaaaatttaataattttcctgcaccgaaggtactcactcggcctcttcgcggcctcgtggtgggccttcgccccccccccccctcccacgcccttcagagcacgacaaatatttcaacaaaaattttgaaaaattgactagagcaatcgaacgctaacggacgacctaatggaaaaaaatccccgaaggagagaatttaattaaatccattccttcgggggaccgtgccgggtgccgcggggtaagcagtgctggttcgtttcatcacggcaccgaaccttttggctagtcagcaatcgttgcttaacttgccagatcggacgggtgcgcatgactttctgaaaaaaatatttatgaaacaaaaaaatcgattttttcaagtgtccgtttggggtactcaaacatttatggggagcaaaatccaacgcagaataaagtacag

SEQ ID NO: 44521 - DNA, 1348 bp, Heterodera glycines
aaaaactggcggatcggatgaaagtgttgttggacacgtccaatggggcggacattcactttttggtgggggagaaaaaagaggcaagaaaaatttgaaaaagagaaaaagcatttttatttagctgtttcgagcccacaaatgcattttgatgttggcttcggatgtatttaaagcgatgttccgttttgatgagaaaaatgcgacggataaaggcaaaattgaaaatagaaagttataattttatcgaattttttgaatttagtcccttctggcgaactgccaaagcctgtggaagtacccgatgttgaagcagcggcgtcaaagtgatgctgagcttcatctacgcggacgatttgagcgaattggacggagacaatgcaatggcagtgatttacgcgggtcggaaatttttttattggaatttagggactttaataaataactgcaagcgtggaaatgcggtgcttatttattttaattatctcaaataaaataaactattgatcaaaataaagtatcgttgaataagtgaaaaatataaaaattggatgatcaaaattataaaaacaatattctgagtgaaacgaataaaattatgccaaagtcaaactggggttaacaggcagagttgttccgggacgagaaaaatggcgggtttcagaattcgggtgacccggaacaactccggtcgacaatatttgttttattcatgtttttccggtctgtcttattaccctaatttgtaagataagttttgttttaaattgatttaataaattgttttattacttctttaacgagttgattccacaaatttgctgctcttctaatgcttatattattgttgggaaaggtttgaattttttgagaagctcatttattggaggaaattgtgtggctcctttagttaaatttacatctttggaagggttcaaacaggcaaatggctgtaaaaatataatatttcaaaaacattaacagtgtaatggagtcgaacctatgacctctcacaaaccccaaattaaaccggcggaaacactgttcacaaattaagaaatttaattaaggaattttaatttttgtaattctttccttcttataattttgaaatgatattttaatattttagctaaaaagtacaacatttctggactgatcggccagtgtttgcataaaattcccatcccaaatttgccaaatgtttttctggctcattcccaggctcttctttttgacttggaggtggtaaaaacgcttttttaaagttttaattaaacgcgaaaattaattattatttttatggtgtgggattgcccgccaaaatgtttgctttacattgtcaaaa

SEQ ID NO: 44522 - DNA, 1306 bp, Heterodera glycines
tttaattgctttttaaatatgccaaaaaatgtaggcttaacttttttagtgaaaattcgatcactcatattttttgctaattgagcagaagcgtaccaaactttgcagggatactccccggtaaaggactaacttacactgaaatgagcgccgagctagctggctcaaaaaaatttttcgaaaatctgagtctttcgtttttatttatttgcaaaattaattcataaatattttttcagaaagggttctgaaacgcaccaaattttatttacatgttagtttaggcactctgatgctttttctatcaataatggaggtgaagttcagaattcaataaaaataacattcacggtgcgaaaaatggggtttgacaagtttattggggaaaaaaagactttacaaaataatacccctgggagaagggagtgggaaacatgatttcaaaattttcaattttttctagtctaatctactcaaaacggttcagaattcaataaaaataacattcacggtgcgaaaaatggggtttgaaaagtttattttgaaaaaaagactttacaaaataatacccctgggagaagggagtgggaaacatgatttcaaaattttcaattttttctagtctaatctactcaaaacggttcagaattcaataaaaataacattcacggtgcgaaaaatggggtttgaaaagtttattttgaaaaaaagactttacaaaataatacccctgggagaagggagtgggaaacatgatttcaaaattttcaattttttctagtctaatctactcaaaacgggtcagaattcaataaaaataacattcacggtgcgaaaaatggggtatggaaaggttattggggaaaaaaagacttttacaaataataccccttggaaaaaggagggggaaacatgatttcaaaattttcattttttctagtctaatctacatcaaaacgggtcaaaatttaataaaaaataacatttcccggggggaaaaaagggggttgaaaaagtttattgggaaaaaaaaaattttttaaaataattccccccgggaaaaggggagggggaaaaatgattttcaaaattttcaatttttttttaagtttaatttatttaaaaaggggttaaaaatttcaaaaaaaaaaaaaattttcccggggggaaaaaaatggggggtttggaaaaaatttttttttggggaaaaaaaaaaacttttttaaaaaaaaaaaaccccccccgggggaaaaagggagggggaggaaaaactggtttttttaaaaaattttttaatttttttttt

SEQ ID NO: 44523 - DNA, 1098 bp, Heterodera glycines
  unsure (1)..(1098): unsure at all n locations
ttattattttaatttaaatatttttcttgcagctttaattttgatgataaatgcataaaaaacaccgatttttagtcgaaaatatttcattttaacgtcactattcaaaaaaaataaaaggtttgggctttcataaataaaatatacgaaagtatatttaacttttcttttaatctatattttgataaatattttggaatttttggatttcttggtttttaaaagaaattccttaacaaaatgcagtgaaaacgaaaaatacactcttaagaattgggcttttcatgctgagtatagggttttatttctatggactaacaactatttaagaattctgaagataaattttttgattaaaatgcgttttttctccgtctctctcctcgtggtgattttcttctttttctttgctgctcccaatttgtcatttggctgtgttaattcggcggtatttaacacaaattcaaaaatacatttaatattttgaagttataaaacttcttgtttttaataccatcaacagttttatttattaaattgttttgctttaaggacaaaggcagcgatgtgacgaactgtcgtggcaaaagagaccttcccgtcgttgacagtaaattttcattcagaaattgggaatttgttgaaactttgagcaatttttaacagaaaatggcataccaaattgacaaaagaattgactgacgacgaagaagaagaactaaagctgtgatgggaacggaaaatgatcaaattgaaagtgaattataaaaattcatttatgcatatgttgaataaactgtcgaagaaaacattttaaattcaaactcttaatattaatttatttttcaagaaattagtctcaaaaatcaatttaaaactttcataataaaatttaaatataaaattagttttagcattccgaaaaataaagaaaaatatttttcggcttctttaattctcattcaaattattatctatttaaatccataattaatagagaccgcaaaaaaaaggcaccanaaatcgcgaaaaaggcactataatagggggtcatggcagttcgtacaatggacagttcgtacaatgggcagttcgtat

SEQ ID NO: 44524 - DNA, 886 bp, Heterodera glycines
  unsure (1)..(886): unsure at all n locations
tgcttcttcaccggtgactttccgcatttacttgaaatattcgtcaactttaatgggctctgttgtgccattttatctgtccaacgaagtgactggggagcaactgagcctggcaccagacggcataaactatgttttgctcacgcgttgtccaattgtatgggatgataggaactggcaaaatgtggtgcatgaattgcttactccgccgaatccaattcactttttgatcagagacggcggattcgacgaagggtgaacaacttgaaattttgattttgttttggttccaattagactttgagtctaaccaactttttgattagatttgacagaattaggtatggtacaaaaaatggttctatttgcagttcacactaccataaaaaaaagacacgaccataaaatttttttttgcaaatttagtgcgccataactttntncaaggaagcatccagattaaacattcttatgatcattcgatagatctatgaatgctctattagctgcacaattatcaccatcttcacgttataaacccaatttatatgcgagaaaacgatgatgatgtcctctgctttagatctttttgaatgccttggtcgacccgaaaaggtatcagaaccaattggccaattccatcggagtgatcagattgtgagtttttagcggtgtttgtccaaatgataaatggtttctcaacagaggtggcaaaaaggacagtgccggtagtttgggcactccaccttcccccctgccgtccttctgcggtggcacttctcccacaaaatcgtcccccgcaccccataagtaggcaagctccaaactgttcggattcggtgcgcacagttttcatcaataactttgccaacatttaaatcattta

SEQ ID NO: 44525 - DNA, 873 bp, Heterodera glycines
  unsure (1)..(873): unsure at all n locations
caacatttcaatcggactcaacccaacagcattctaatcactgggactcaacccaacaggatttcaatcactgggactcaacccaacagcattctaatcactgggactcaacccaccaacatttcaatcggactcaacccaccaacatttcaatcactgggactcaacccaacaggatttcaatcactgggactcaacccaccaacatttcaatcactgggactcaacccaacaggatttcaatcactgggactcaacccaccagaattccaatcactggcactcaacccaccagcatttcaatcactgggactcaacccaccaacatttcaatcactgggactcaacccaacaggatttcaatcactgggactcaacccaccaacatttcaatcactgggactcaattctcctgcatttcaatcactggcactcaacccaccaacatttcaatcactgggactcaacccaccagcattccaatcactggcactcaacccaccagcatttcaatcactgggactcaacccaccagcattccaatcactgggactcaacccaccaacatttcaatcggactcaacccaacagcatttcaatcactgggactcaacccaacaggatttcaatcactgggactcaacccaccagaattccaatcactggcactcaacccaccagcatttcaatcactgggactcaacccaccaacatttcaatcactgggactcaacccaacaggatttcaatcactgtgactcaacccaccaacatttcaatcactgtgactcaattctcctgcatntcaatcactggcactcaacccaccagcatntcaatcactgtgactcaacccaccagcattccaatcac

SEQ ID NO: 44526 - DNA, 1128 bp, Heterodera glycines
  unsure (1)..(1128): unsure at all n locations
ttcgtcactaccagtctcaccagaaaattntgtcatcttggagattntattatactaatattcactggaaccaaaatggccctttctctgtccaaaataatttgacaaattatgaaagtaattttcttggttttgttgaaggtttacgacttaatcaaatgattaaagaacccaccagggaatgcaattttttggatttaattttaacaaataataaatttctcagaaaagacatttcagttggtcccccattctcacttagtgatcacaacactgtaaaattcgacttaagactaaatgtttttccttgcagaaaatttaaacattttaactttaaaaaagctagttacttggaaataaatgccatactctcttctactaattgggttgcctttttttcagactgtatagaaattgaccaaatttataacaaattcgcagcatttttacattttttagtatcgaaatatgttccattaacagtatcaaattttaaacataatttcccagaccatattaaaaaattatgatttatcgtcggcaactttggaaagacattaaaaaagaaaaaactagagaaaaatttatagaaacctctaaaaaacttgaatatgaaataaagaaataccttacaaatcgtgaaaataaatttttaagtggtttagaccctaaacaacgatttcgatatattggctcttttttaaaaactaaaaacgcgaaaattccctctcttaaaaataacgaaaacaaaattgccttttccgaaaaagctaaatccaatttattagccgaacaattttattcagtcttcactgatcaaaaaattcctgtttcctgtgaagtcacccctaaaaaaatattgactttttcacaatgacacttaatgaaatttatttggctcttaataaacaagaaaacaataataatacttccattgacagcatcccgaatatttttctcaaaaattgtaaagaaaatttggtttatccgctatttcatattttttgtttttcaatgatgactggccaagtcccaaacatttggaaaaaatcaattatttgtccagtaccgaaaatacccaacccaataaatcctgttgattttcggcccaatttcacttttatgctc

SEQ ID NO: 44527 - DNA, 1001 bp, Heterodera glycines
tttgaatcttgttatttcgattccccacagtgccttcctacgttctgacaatggaagaagtgattgccgtcttccaattccattgccacccgaatctccgcggttggcacggacagtacccaatggaatttccgtgccatggacgcttttccgatcagaaagaaggcatagtttcgctgcaaattgagaaattttcggaatttgcacaagagaaagcatggagtagccgattaagcgaaggaatttacataaaaggattgccatggaaaatttgtgcagaaataaggacgaaaaacaacagcactgaaaagtggctgggctttcatcttttgtgcaccgctccaaaaggtgggaataaaagtccaatttaaatataaaataaataattattttcatttttacaattaaaagatgaaaattggagttgcaaatgttctgcgacctttcgaatagtttcacaaaaaagcggcgtgaaagatgtgacgaaaaaaattgaccactcttttaacaacaaatcttcaattagcggattcactaatttcactttttcggtgaattgcacaataattaaaatgttaaaaattcataattaagcatttaatggacacggacaagggattatatgacaaagacgaggacatagtgaatttggtcatcgatgttaatacggaagagcaaaaggggacgaagcgaaaagtttcgatcgaataaactaaacactcattaactaatttccttaattcaattatataatttgtttgatatatttaaaaaattttcttgttataaaatcgtttttttcgaaatttgtaggattaacctaacaaaacatgttcatttttgagtatgggggaggggtgagttagcggatcaaatgaaacgggacatttacgggtcaattttttccaaaaaaagagcttacaaaggaaggtccccaggtgtccgtgggatttccaaaatgaaattaggttatgttgaattttttaaaaaaattcctaaaa

SEQ ID NO: 44528 - DNA, 1054 bp, Heterodera glycines
  unsure (1)..(1054): unsure at all n locations
cttgttgacgccaaaaataattactagagaagnaacggggtagccgacgcggcattaatctgcaattattaaaaaattttgaaatagcccaaaaccactcgtcttaataacgaaaatatttatcaattgcttttgtttaaagttgacaataatatgaatgcaaataatgtagtcgtatatgcgaaaattctgtagaaagaaaaggtttaaaaataatttatagatgaactcaaatcctcatgtccaacatattaaaaatattcataaataatccttgttgaacgccaaaaataattactagagaagaaacagggtagccgacgcggcattaatctgcaattattaaaaaattttgaaatagcccaaaaccactcgtcttaataacgaaaatatttatcaattgcttttgtttaatattgacaataatatgaatgcaaataatgtaatcgtatatgtgaaaattctgtagaaagaaaaggtttaaaaataatttatagatgaactcaaatcctcatgtccaacatattaaaaatattcataaataatccttgttgaacgccaaaaataattactagagaagaaacagggtagccgacgcggcattaatctgcaattattaaaaattttgaaatagcccaaaaccactcgtcttaataacgaaaatatttatcaattgcttttgtttaatattgacaataatatgaatgcaaataatgtagtcgtatatgcgaaaattctgtagaaagaaaaggtttaaaaataatttatagatgaactcaaatcctcatgtccaacatattaaaaatattcataaataatgcttgttgaacgccaaaaataattactagagaagaaacgcggtagccgacgcggcattaatctgcaattattaaaaaattttgaaatagcccaaaaccactcgtcttaataacgaaaatatttatcaattgcttttgtttaatattgacaataatatgaaatgcaataatgtaatcgtatatgtgaaaatttctgtgaaaagaaaggggttaaaataatttatagatgaactcaa

SEQ ID NO: 44529 - DNA, 536 bp, Heterodera glycines
acttttaggggacccgacacttagggaacccgacatttaggggacccgacacttagggaacccgacttttggggacccgacacttagggaacccgacttttggggacccgacttttggggatcccgacatttggggacccgacttttggggatcccgaaatttggggacccgacttttggggacccgacacttagggaacccgacatttggggacccgacacttagggaacccgacatttggggacccgacttttggggacccgacacttagggaacccgacatttggggatcccgacatttggggacccgacttttggggacccgacacttagggaacccgacatttggggacccgacttttggggacccgacacttagggaacccgacatttggggatcccgacttttggggacccgacttttgagcaaaaggcacttagggaaaccaccgacatttggcgacccgacatttagggacccgacatttagggattttaataaaacaaaaaaaacattaaaaaattaaatttttaa

SEQ ID NO: 44530 - DNA, 1001 bp, Heterodera glycines
  unsure (1)..(1001): unsure at all n locations
cggtatgtaaataggtcgggtggaatntgagcctgatttccaaaaaattcaaatatttnttgcaaaaaaaacaacttctaatttgataatcgattgcttcgagaaatgtacaaatgaattttaattgtatttccgggaaatatacagtgcgatggtaatttattatgaatgaataaatcagtaattagtctactgtatttatgattacggtgtgtggaagaactcaaattctgaattaaatttttaccctaactttttctggacaacgatttttttttataatgcatttgcatcccacagatcgatgcttctttatcagatcaagctgttttttcgattattttatgattttttcaacattttttgtatttcgcatttttacaatttaaagcaaatccctgctaattactaactaattacttttggttgaattttattttattgcatgtttaatttatttctgattttattgggtttcccatgaccttaaataggcacggccggaatattcgggttgaaattgatttttaggctatgttttgaaattcagtttttgcaattattttatgctttttttacgttttttgtatttgactttcagaatttaaagcatatccctgctaattagtaactaattacttttggttgaattttaatttaattttttttgaaatttgccattacctcccttttcgccttcgatgggccaacgatcgcgtggcattggcatttgaccgagtaatggaaagaaaaggggacatgaaaaattgggcacgatttggaagcgacgcgcaaaaagatacgcggaagagatttgaaatgccacggatgcgacacgcgcaaaaaagagcggatgcgacgcgcggtaccattacatcactgttgggtgaactatgtatgtatgtttcccaaacgctaacaaaatgtttgagatattggtacttttccattatgctgccacaccccaaaattttaaaaaaagaaggggaaagcgccagttt

SEQ ID NO: 44531 - DNA, 918 bp, Heterodera glycines
  unsure (1)..(918): unsure at all n locations
ggcagacacctttgtcgggggcgaaattttcataaaaagtncggaaaaaataaaagaaaaagttccagaacaaaagtcttaaaaactcatttaaagacacttccatctcatttccagtgcaattgacgactttcgtaaaaccccgaaaatgtcggggcgcaaccctattatttttaattaccgcgggctgaactgtacatacattaattagtgcaaatatctcatagttgtatgtatgtttgtccttgcactgttttataaaagcagacattaccattcaccgacagtggcagtggtaggcacaccgaagcattgtcttttccctttatccctaccaaaagcatataagccaaagccagcaaccattttattctttttattgcatttaggtattaaattttttttatatgatttaaattttattatttttggggaacaagttcttttgccaaagaaacgagcacaagataagccacatgaccattcctcattcattgtcagtcattttctctttgtgggctttgggcctaattatttttaaaaagtacttatttgtggtattcagtttcattaaatcagacaattaaggttgttattcgtttgtaacgtggttgttgtacttataattaggaaagaagtctcacaataatgcttcaggttttaatcatttatttgtacgttttaaattctttttcggttttcagtatgttccgtggagacaaatcacattcacgggccggctgttcgacgttggtgaaggcagagcgaccacattgctattcttgctcaaatgcttaatttatatggctttggacattgtcatttgggttgcattgacatttctgagctacaaactgttggtttggactttcttcactccctttgaacgaggnntgtaattctaattaattctttttt

SEQ ID NO: 44532 - DNA, 1160 bp, Heterodera glycines
gagcaatttcaatcctttatgttgctgacagcattgcgatcatctgaggatgcatcgcttcggcaacgcattttgataaagctcgcagcggacaaaaacggcatcacctacgattcaatggtggaagatctgatcaattttcagacgacaattgccgaggccaaattgattgagcagccatccgcatttaaaaatgtgagcgcattgaaaagggggaaggagagggaacaacaacaaatgccatcaaattcgcgttttgccaacaattcacaaaacgcttcaacggcacaacggaaatgctggcgttgtgcaggcgatcaccgggccgacgattgtcgtcacaaattggaaaaatgccccaagtgcaaatttcccggccacatcgcttcacgatgcgaaagcgttcagcaatggcgacgcaaatttgccaaaaagccaattcaacgaaagcaaatcgggagtctcagcgtcggtatggcaaccaaacaaatcaatgccacttcactgctgaaagtcggagttttcgtcaacaaaaagaaaacaaaatttgttgccgacagcggcacggaagtgaacataatcgacgaagacgcctatgacaaaattggccgtccaaaaattcaggaatgcgaagaaaaaggcaaactcttcgacggaacaaaggtcgcattcataggcaaaggagttgccacattccaatttggcgacattgccatcgaccaggagttttacgtcgcaaaaagagggtctttaaatttgctgagcatttcaacgatggacgcatttggcctgctggacgatttaaaaaggaaaatcagcaattccgcgattaatttgtgtgtaaacatcaattcaagtgcaacatttaaatccaaaaccaccaataccatttattagggaattaaaggccactttctctattgcttttgaggaaggattaggactttgcaccatggaaaaggcacatcttcaactgaaggatggggccacaccaatttacaggaaggcacgaccaatgccacatcattcaaaggaaatcgttgaaaaggaattggacagattggagcagctggggatcatccgtaaagccgaacttttgacttgggctgccccgattttggtggtcaagaaaggagacggatcagcacgattgtgcatcg

SEQ ID NO: 44533 - DNA, 926 bp, Heterodera glycines
cagaattttgaaaattttttataaaaactgatgacaagctaatgtgataaaacaggttaattcttttcctttcagtatccctgcaaagtttggggcgcttctgataagtttctgaaaaaaaagttaagcctacattttttggcatatttaaaaagcaattaaaaaatttttaaaatttaataattttcctgcaccgaaggtactcactcggcctcttcgcggcctcgtggggggcctttttcccggccgtgacactaagttatgaaaattttaagggatcagtgagctacgaaaaattaaccatcttattataatgagaactttttgacatctgtatgcatgttcggatctcactttatccattttataaaccctcaactttttcgaaaaaatgaattttcgtttttcaggaaataaataaaaatgtacaaattttggcttacatatactttttttcagcaagtggtggaggacatgatacagtccattctgcagctgtgcgaggcgccaattgactacgaattcatggacaaactgccggcagtgcaatacggatttccatgtaaggcaaaaacattggcacaccctcaggggtttgtttaattggacccagaaaattatcctcgttttggaaatgctttttcctgacatttcaatttcaggcggttatcggcgcgatttccacgcggaacgtgccaaaattccggaggcgttgttcgacctcaaacacgccacggacatcagcgagacggagcgcgccacactgatgagcgtgtcgcaggtggcgctcacttcctgcaacacttgcgatatcgacatcagaccggtcagcacttaccgaatgcatatttagaatattgggttccagaattttccggtgacaatttgaatgccatgaattggacaaaatagaaaaatttaaaaat

SEQ ID NO: 44534 - DNA, 918 bp, Heterodera glycines
aaaaaagactttacaaaataatacccctgggagaagggagtgggaaacatgatttcaaaattttcaattttttatagtctaatctactcaaaacggttcagaattcaataaaaataacattcacggtgcgaaaaatggggtttgaaaagtttattttggaaaaaaagactttacaaaataatacccctgggagaagggagtgggaaacatgatttcaaaattttcaattttttctagtctaatctactcaaaacggttcagaattcaataaaaataacattcacggtgcgaaaaatggggtttgaaaagtttattggggaaaaaaagactttacaaaataatacccctgggagaagggagtgggaaacatgatttcaaaattttcaattttttctagtctaatctactcaaaacggttcagaattcaataaaaataacattcacggtgcgaaaaaaggggtttgaaaagtttattggggaaaaaaagactttacaaaataatacccctgggagaagggagtgggaaacatgatttcaaaattttcaattttttctagtctaatctactcaaaacggttcagaattcaataaaaataacattcacggtgcgaaaaatggggtttgaaaagtttattttgaaaaaaagactttacaaataatacccctgggagaagggagtgggaaacatgatttcaaaattttcaattttttatagtctaatctactcaaaacggttcagaattcaataaaaataacattcacggtgcgaaaaatggggtttgacaagtttattggggaaaaaaagactttacaaaataatacccctgggagaagggagtgggaaacatgatttcaaaattttcaattttttctagtctaatctactcaaaacggttcagaattcaataaaaataacat

SEQ ID NO: 44535 - DNA, 442 bp, Heterodera glycines
taaatgcggtagaaaaaggcgagaagaaagagcagattttccggatcttcgctagccaagaaaaatatttggtaatttaattaattaatattttaatcattttatttattttaattttttaaataatttcaaattccttcagaacccggaagggaagcaaaatgaaacttttatgtgcaggatttattcattggatgtttttcatatgtgaaccctcaaaaattggcattatgtttttttaatttaaaataattttgtttaagttttgctatttcgaggatcgaacataaatacttggaattggatgtatttattaataaacaaaaatcaaattaaaattaaaatttaagggcgacgggtgtttccaatcttacaaattctttgaaagtcgaaggatggaaatacgtcaaatatttcagattgagtatctactttgtttgaa

SEQ ID NO: 44536 - DNA, 1110 bp, Heterodera glycines
gccatgtttgttgtttgctagatctccatttggaccaattaacgctggaataaatttccaaagacaatcgactcaaattttatgaatggcttctcaccaaattgaatctttttgtagttttgaatacccagttttgtcgtgccagtttttgcatcaatgtggagaatcgccctgtcaactcaacagtcattccgttttttgtcgacgcgggcatttggtatttgtcgttattccacggctggtgtcaacgtggcagttcaaaccgaaccgctaatcagcaaagaggtgagtcgaccgtttgaaacaaatgaacatttttttattgttaggtcttgctaaaaatgcgtaaagagacgggatacagctatgtcaagtgtcgaaaggcattggtggcatgtgggggcgagcaaaattatgagcaggcgctgcgatggattaaagaggcggccgtcaaagagggatgggacaaagcggcaaagtgagcgtctaactaatttaaaaacgtcaatctttttcgctactttgtagtacaaatttaaaattatctattttttagattgagcggtcgcaaagcatcacaaggcctaattgggttcgcttcgctttctgacaatgtttctgttctcgttgagctgaactgtgagaccgattttgtggcaagaagtgcagaattcaagaatttggtatttatttaatcctgctattttcaaatggcaaataatcaggtcacagaattggtgaatgccttgcggaactgtgcttcggagttgctgcctttgcctgatgaagcacagaaactaacgctgaagaatattggtgggttgattctatggtttgatgcaaaaaccaacatttccaatttgtgttaagaacatgataaattccgcatgatggatggacgaaccgccgatgaggcgatcgttgccactgtgagtaaagttggcgagaatattcaactcgcccgagcatctgtcatttcttcttcaccagcgaacaaactttttggtcaaacccatccaaaaggtcgtcgtatggtttttatgagtgaaataatttttatttttagaggaatttaatggtgttctactgcgacaatttatttcgttggtg

SEQ ID NO: 44537 - DNA, 1140 bp, Heterodera glycines
gagtcccagtgattgatgctggagggtgagccccagtgatgaaatgcaggagaattggtgccagtgatgggatgctggtggttgagtcccagtgatggaatgctggtggttgagtcccagtgattgaatgctggagggttgagtcctgttgattggaatgttggtgggttgagtcccactgattgaaatgctggtgggttgagtccctttgattggaatgttggtgggttgagtcccagtgattgaatgctggagagttgagtcccagtgattgaatgctggagggttgagtccctttgattggaatgttggtgggttgagtcccagtgattgaatgctggagagttgagtcccagtgattggaatgctggtgggttgagtcccagtgattgaatgctggagggttgagccccagtgattgaaatgcaggagaattgagtgccagtgattggaatgctggtgggttgagtcccagtgattaaaatgctaaaggtgggttgagtcccagtgattggaatgctggagggttgagtcccagtgattgaatgctggtgggttgagtcccagtgattgaatgctggagggttgagccccagtgattgaaatgcaggagaattgagtgccagtgattggaatgctggtgggttgagtcccagtgattggaatgctggtgggttgagtcccagtgattgaatgctggagggttgagtcctgttgattggaatgttggtgggttgagtcccactgattgaaatgctggtgggttgagtccctttgattggaatgttggtgggttgagtcccagtgattgaatgctggagagttgagtcccagtgattgaatgctggagggttgagtccctttgattggaatgttggtgggttgagtcccagtgattgaatgctggagggttgagtccctttgattggaatgttggtgggttgagtcccagtgattgaatgctggagggttgagccccagtgattgaaatgcaggagaattgagtgccagtgattggaatgctggtgggttgagtcccagcgattggaatgctggtgggttgagtcccagtgattgaatgctggagagttgagtcccagtgattggaatgctggagtgttgagtcccagggattgaatg

SEQ ID NO: 44538 - DNA, 1100 bp, Heterodera glycines
  unsure (1)..(1100): unsure at all n locations
tttaatttctgcgttggatttttgctccccataattgtttgagtaccccaaacggacacttgaaaaaatcgatttttttgtttttgggcagtccccccaaaccgatgcgcccagatttatggggagaccgaatcctccgggaatagcttccctatagcctgtactttaattctgcgttggatttttgctccccataattgtttgagtaccccaaacggacacttgaaaaaatcgatttttttgttttcggggcagtccccccgaaccgatgcgcccagatttatggggagaccgaatccttcgggaatagcttccccatagcctgtactttaattctgcgttggatttttgctccccataattgtttgagtaccccaaacggaaaaaatcgattttttttgcttttcgggccgtcccccgaaccgatgcgcccagatttatggggagaccgaatccttcgggaatagcttccccatagcctgtactttaattctgcgttggatttttgctccccataattgtttgagtaccccaaacggaaaaaatcgattttttttgcttttcgggccgtccccctaccgatgcgctcagatttatggggagaacgaatccttcgggaatagcttccctatagcctgtactttaatttctgcgttggatttttgctccccataattgtttttccagaaaatctcgcatgaattctcatttttaaattttttatagatttttaaatgtttggatttttttttggcttaccaaaacttcatcgaacctggctctttctattctcattcaaatcgccccaaatttttttttacagcttaattaggccctattaagcttatttccagaaaatctcgcatgaattctcatttttaaattttttatagatttttaaatgtttggatatttttttggcttaccaaaattcatcgaacctggctctttctattctcattcaaatcgccccaaattttttttacagcttaactaggccctattaagcttatttccagaaaatctcgcatgaattctcatttttaaattttttatagagttttaaatgtttggatttttttttggcttaccanaaactt

SEQ ID NO: 44539 - DNA, 822 bp, Heterodera glycines
tttttataattttcataattcatctttttaaaatcttttaaattgtctcaccctgcgtaaaacaattccatacagcgaatgtacgcgtcctgaacattgcaaaaatggatttgcgacaatttaaaaaatgggccaagtttttgggatacaattttttaatttttaatatttaatgtctaatattggcaaataaaaaacccaatttaaatgtgaattgatcaacaacttgcctgaactgcttcctgctccaccagacttgagaagcagctcaatgcgctctgttttcgtcgtcctaccgccagctcaacactgtacatttatgatgaaaatgacaggggatttcaagggcgtagccagacccttggctttgggggggatgaagtcaaaaattcgatttttaggggtgtatttttggttttttaaaatccctaattatggggtgtattttacaaaatttttagccgtttttcgccaaaaaattattatttttgttattttgttctctaattcaaaatatggtaaaataggggtccggcggtgccgataggcgccgccgggaaaatttttgaaaatttgattaaaatttcttgacagattttcactaaaaaatgatcaaattttgtgatttttatcatttttctaatgagaaataagagttttggggcgccgctgagaacagtttttcatcaaattaccaaattttgagattttgggccattttctaaaaaaataggagttttgggggcgcggcggtgccgataggcgccgccggggaaaaaaattggaaattttgatcatttataaacaggttttcactgaaaa

SEQ ID NO: 44540 - DNA, 749 bp, Heterodera glycines
agccaaaatgcatttttatggcctaatttaaggtgctcatttcgaatatatactttatttttgttttcagactttttggaaggtggttacaaatttttgaaaaatcgtctaaatttgagccccggaaaatccagtcaaatttcgaaaattcataactatcttcgtttttggtcaaatttagtggaataaagtttgaaaaatagcaaaaaattaggagaattttatgagatttatttggaatttctatctgccaaaataaaaaagttattccagaatttctggaaaaattcgatttttctgaaaaaaattcctaactcccttctgaaaaagtattttataaaaataatatactcaaaaaatccgcaattttttgctctattttataaattttattttagctttttatcacttttttgaaaaaagttatagaaataaaagtgattttggaatttgggaccacaggggtgtgactatgatttttgagtggaaaatttttttaaccaaaaatcttccaaaaatatgattttaggggttatttgggccgctgatcacgaatagtaatcagattttactttagacatggttaagacctcagaatccccgtgttattggggattctgaggggtgggagcgcccgtcctgaggccgcgaagcggccaaatgttctcaacaaaattaaatgacgggcgcgaagcgcccttcctgaggccgcgaagtggccgaatgtcctcaacaaaattaaatgacgg

SEQ ID NO: 44541 - DNA, 891 bp, Heterodera glycines
aatggctatctatttttttgagaaattttctatgcaacaaacgctctcgaacatgaaacgaagtgcggtgcgccgtggccattttatttttcaaataatttttaaatttaatacatattccagaaaaatggctatctatttttttgagaaattttctatgcaacaaacgctctcgaacatgaaacgaagtgcggtgcgccgtggccattttatttttcaaataatttttaaatttaatacatattccagaaaaatggctatctatttttttgagaaattttctatgcaacaaacgctctcgaacatgaaacgaagtgcggtgcgccgtggccattttatttttcaaataatttttaaatttaatagatattccagaaaaatggctatctattttttttcgaaattttctatgcaacaaacgctgtggccattttatttttcaaataatttttaaatttaatacatattccagaaaaatggctctctttttttgagaaattttctatgcaacaaacgctctcgaacatgaaacgaagtgcggtgcgccgtggccattttatttttcaaataatttttaaatttaatacatattccagaaaaatggctatctatttttttgagaaattttctatgcaacaaacgctctcgaacatgaaacgaagtgcggtgcgccgtggccattttatttttcaaataatttttaaatttaatacatattccagaaaaatggcatctctttttttgagaaattttctatgcaacaaacgctctcgaacatgaaacgaagtgcggtgcgccgtggccattttatttttcaaataatttttaaatttaatagatattccagaaaaatggctatctatttttttgagaaattttctatgcaacaaa

SEQ ID NO: 44542 - DNA, 1199 bp, Heterodera glycines
cctggcaggtcctgggtttaatatcaacaatttgtattgcaaatcttttgttatattataataaatggataagaaatttcgtcgagaaaatttctcggcttgtagaaaagttttgaatttttttcttttaagactcgacaaaagtgtccaatttttaccgttttttattccgtctaatattaattttttccccaaatttttactttgagtaatttagttaattagtgtattcagattttaaattagccttttttcattctctaattaaattttcgaattcttttcgtctccccttatggtaggacaaattggcatttaaaaaatgccctcacttccctaatttttttttctgtcaattttcgcctattttaatttaaatcttgccaaaatcccgactctctgtgcctgaaaatcccggcccctgaggcaaaaataagttttttaaaacgtcgaaatttctataaaaaaattcttttcttgttaaaaaggtcaaggacaacaaacacacatcacatcctgctgtctgctgattgaactgatcagataacgcacgcactcaacacatataaataaataataggaagcaatttgcttttctatctatgtccggaaattttattaaaaattcaaaaaatgttttcccaaaatcattttcaaaaattctaaaaatgttttcccaaaatcattttcaaaaattctaaaaatgtttcccaaaattatttttaaaatctaaaaatgatcttttcaaaaattctaaaaatatattgtcagtggtgccgtgccaactgatcttggctaatttttgggggttccctctcttttcttgaccttaattcccgattgattagcaatgcattagcaatgccgtgccaactcattagggctaattaattggccaaatcgccgagactctcgacccaaatagcttttaataacggccaccggcagtaacaaaaggcagaaaattatttggccaaaaccacaccattttaaatagtttgttcttggtccccaccattttcttatcactcattcatttcattgaatttattattttatcagtcacacaatttgtccacacacttttcacttccttcctctcgtcaaaggcgctggaatgtgctcgatcatcgtctgatgatatgataaataatcacaattttctctgtttaaaagtgtacattttgccacaatttccg

SEQ ID NO: 44543 - DNA, 1051 bp, Heterodera glycines
tgtcaaaagtaaaatctgatcacgtattcgtgatcacctgcccaaataacccctaaagacatatttttggaagatttttgtgagaaaaatttttccactcaaaaaccatgtgcacccccctttggacccgaatcacaaaatcacttttatttttatatctttttttaaaaatgtgataaaaatgtgaaataaaatttatattatagagaaaaaaattgcggatttttgtagtattttacttttctcaaatagcttttcagaagcgagttctgaatttttttctgaaaaatctaaaatttccagaatttctggaataacttttttcatattgatgttagaaaacctaaataaatcccataaaattctcctgatttttctctatttttaaagctttatttgctcaaaattggtcaacccttaggctagatatgaattttccaatattagcccaaatttccaagggccaaaaaattgccaaaaaataaagaatttttaaaaaattccaaaaattttgaaacgaaaaataaacatcatattcgtgctcagcacctcaaaatagcccagaaaaatatttttcacaccctttttcgaccccaaaaaaatttttgaaaatttctagggggcctagctcgaaaatttttgaaaattttacatcatgtagtaaaccattcgatagcatttaaaatgctctacaaaaatgttctaagacaatttttcgctaaaatcaacccctgacgagttatgggcccgggactcaaatgtcccgctcaggccaaaatttttttctatttccgggaaaaaatcgaaatttttccgaaaaaaataccaatcgatagagctcgaaaaactatgttttggaagtggtcttcgtttctctgggaaaattcgttaaaaattcttaaaattcaaaaacccgaaaaccgttttttaggcctagctcgaaaaattttgaaaattttcgaaatttttaaatttcagaaaatcgagctttcaaagctctacaataatttcgctggccaccctgcgctcaggtcaaagcctaatgagttat

SEQ ID NO: 44544 - DNA, 952 bp, Heterodera glycines
ccgcacgaacctgtgccgcaggcatgcgttcgtgcggtaagcccgcgcgcggcggcacgcctcaaaggccagttgtcgctttaaaagcaatcaatcatgacgacgatatccccatcactctcgcaccccctcccccccccccaaaaaacccgtgccacaggcacgggttcgcgcggtaaacccgcgcgcggcggcacgcctcaaagggcagctgtcaccaaaaagcaattaatcatgacctcgatatccccctcactctcgcaccccctcccccccccccccaaaaaacccagtgccacaggtcgacgggttctgcgccctgaaaccgcgcgtcgcggttggcacgcactcaaagtagcagcatgtcaccaaaatagcaattaatacatgacgacagatagcgtgtaaactaacgtactcgtggggtactaagagtacgtacgaacatcgagcattgtttttttcggttgccacgcggggcagaggaggtggaggcgtggccatctacttgtcgttatgattgttctgacctccgtggcagaaaggtagctgataaggatagtttggttattcgcgataatttttgatcattaaatcgtattcgttcgacatatacttatgcgagtgtatatatgacatgacacagtgaccaatgccttttttgtattgttttgtccgattgacttcaatgtagaattgaccactgacggattgagcgggagccttttttaaatagcgaccttctagccaattccataccaaaataaattataatacctgctactgccaacacttgagaataggcgaaagctgtatgatctgttcatggtgcataaaattgcttatggacgaacagatctgaaactatgttctatttttcatccatcagcacgctttatcatcaccatttatagatttatcacaaaatacaaactgggcaaaaaaattcatt

SEQ ID NO: 44545 - DNA, 990 bp, Heterodera glycines
tggagttcggtgcaactgacgtggacttatacccctcacggcgactatttgcgcaatttggaccatttggtgagccaagcggaccgattgagagaatcaaattacaggaacaaactgacaatgagagtcatatgcggcgcagtttggtggttcattagtcttaattggctaatccattagccccaattgattcattcccgactttccgcagtatgtgaactctttggacttgttccactccattctgataaccgtaacaatccccgccttttacgcacttttcatcgtcgcttttctgtcgattcaaacggggtcatcagcatcatcaatggtgggagtcatacggcacaaggtaaagaatgggttgtgctaatccaatgactcattgtcagtaccgtaccatgccaataccatagtcatacatggaaagggacaaaaggcggtgccaacttaggatgaacgtaaaatcgaaaaaatctaaattgtaagcaaacatttgaaaaaattagtaaagaaaaccaagagaaaaaatcctataattttcaatgggatgaaattctgagtcataattagtgtctttttctttcctctgtcagatcattttgacaataaaatatacaactttatgcttggtaactttggccataaaaatgtctctgacttaggtggcttaatatttcgctttgtgcccatttcgccaagtgttggcctatcctccgttggtatcgccagggggggggaatcgcatcgcgcgagggttttcgcgaaaaaggaccaaactccgagcgctcataaccgacgtatgaccgtagtaacaacacccatcatcccttaccgtacaccatagacatgtgtccaagtgttggtcatcagttcgacaaatgccggtgtcagtttttgctacgctctgatgggttttatgtccgtcccgcccattttggtcgttattttgggcacttggctttggctgttcctcccatggtgatgtat

SEQ ID NO: 44546 - DNA, 1255 bp, Heterodera glycines
tctctgcccatagttctccggtctgtttgccaaatgcgggaagaatggcttgtcctgcacgtcaagcccataggaaggaatgagagcagccagtgaacagggcatcaaattgaaagagtcccggaagattacatttggattgcgctgcttttgtttgcgtattttcatttcatacattttgttcccctgaaactttaaatatatgttaaaattttaaaaatgtatacccgtcgcaacatctcgggattaaagccaatcctgaacagctcgcggaagacgagcaccatgtcgaagcgaccaccaaagtgtgaataggcataagtttcgtatttctttggcagtttgtagacgagccaatccacaaatgcctccagtgggttttcgcccactatttgtttgtcaacaatagtatccgcaaaacggcgctggcagaaagcgaccatgcgatgcggaccgcagatttgacagcctgctgtccctcttctccaattgccgttttcaatacagccggggcaagcaattcgagcagcgatgaagtttggctgatgttctcttttctccggctggagcgggtccaacgcatggtgttgcattgtctccaagtcgaagaccacaatacgataaggatcaatttccctgtgctcaattagttgaatataaaagatctgcattttttaaattcttcattttctccgagattttcatgtggttttaattcattatgcatttattaatttaaattttaatcggagaataaaaaaataaaacttgagaagctatttaaattatctcaaagaaaaagataatatatattcttgtaataactctaatttattgactttcttaaattttattttaaatgtttaaataatcaagttatatttgaatttttcacaatttattactgtgcgcatttaaacggtatatttttattttaaagataaataaatacctttggaactttacattttaatattaaaatataactacaatcaatttcataaaaaaacgttttattttttaatacctttggaactaaattttattaaattcttctcgcaattttccaaaaagaaaaatcgccgaattgcagcaaaaaagattttaaagaaaagaaactaataaatatcataaaaaaatattttatagtataaaattggacttaaaatattttgtaaaaattataattatttaaaaaatataattataagtatcatgattttaataatagaaaatttaaagaattttgactatt

SEQ ID NO: 44547 - DNA, 1028 bp, Heterodera glycines
ttttaaaaattttttaattcctttttaaaacagcccaaaaagtttaggcttatattttaaaaaagtttcatcgaacctagcgcactaaaatcgatataatctctccaaattttgcaggctttctccattgtaaaggactaacttaacctgaaaaaatgccaacgcttgttgtttttaaaatttttcgaaattctgactttttcattacttatttattttttgcaaaattaattcataagtattttttcagaaagtgctctgaaacgcaccaaatgttaattaaaagttaaataaggctctctgatgctttttctatcaaaagggagatgaataaatattttaaaaatttttaattcctttttaaacaggccaaaaagtttaggcttatattttaaaaagtttcatcgaacctagcgcactaaaatcgatataatctctccaaattttgcaggccttctccattgtaaaggactaacttaacctgaaaaaatgccaacgcttgttgtttttaaaatttttcgaaattctgactttttcattaattatttattattttgcaaaattaattcataaatattttttagaacgtgctctgaaacgcaccaaatgttaattaaaagttaaataaggctctctgatgctttttctatcaaaaagggagatgaataaatattttaaaaatttttaattcctttttaaacaggccaaaaagtttaggcttatattttaaaaagtttcatcgaacctagcgcactaaaatcgatataatctctccaaattttgcaggccttctccattgtaaaggactaacttaacctgaaaaaatgccaacgcttgttgtttttaaaatttttcgaaattctgactttttcattaattatttattattttgcaaaattaattcataaatattttttagaacgtgctctgaaacgcaccaaatgttaattaaaagttaaataaggctctctgatgctttcactatcaaaaagggagatgaataaaaaatctaaaaatttttaattgct

SEQ ID NO: 44548 - DNA, 274 bp, Heterodera glycines
gaagaggtgagaaaaataaagaaggaaatagtgcactgtctgactgtctggttacgcttttgaaaaaatttgacccaaaagggggacccaaactccattagtaccacttatattttgtttttcaacttcttgttcatattcgggcccggggttcggaattgggcaaatccgagcagattcataatcagcaccctcgagaaaccccggaaactgaattttagtccaaaataaaaaagttaaaatagggaccacaattctttaccattgcccaaat

SEQ ID NO: 44549 - DNA, 877 bp, Heterodera glycines
attcctatcactactcttttttgttatgtatatcaatgatttataaaatattttagtctaaatcaattaatattcttaaaattaaaaatgaacaatcgtctatctttaaaccccaatgattttccgaacacgatggagtttgtcttgttcaatgccgttcagcagggcaatgtcgacaaccctgatattgaacgactcctggagcgccttagaaatcgccaaccgcctccgtctccattcaagaacgaccgactcctgtgggatgtattcgatgacccggaaatagccaacgcaccacaaatgacaattaaagtaatatcggcgttttaaattataatttaattgtgaaatcagtaaaaatttcattttaaagggaaagttttcaaaatatttaacttttcacctatttttaaaatagtcctttcattttgttgttttaattaggcagagcggtatcagcatgggtactgtttccgtctgattattttaaaagttaaaaagtagtgttaataaaaattatcaattttggtcattgttttggatgatttaagacatttttacaaattctccaaaaatttagaccccagagaattaccgcctttacttggtaccgtactggttgaaaatattggtactgatatcaataccgatttttgcgatacctgtcaataccgttaccggttaaaatgaaaattatagctatcgttccatatttttttaccggactgttggaggcctgaaacgcatgaacaacatgtttttagcttggtttgaagcttctaggatgggtttctatatccatattttccatatttcgcgatttatgtccatatttccatattttggcatttttatccatattttatgcccatatttt

SEQ ID NO: 44550 - DNA, 903 bp, Heterodera glycines
  unsure (1)..(903): unsure at all n locations
tgctccccataattgtttgagtaccccaaatggacacttgaaaaaatcgatttttttgttttcggggcagtccccccgaaccgatgcgcccagatttatggggagaccgaatccttcgggaatagcttccctatagcccgtactttaattctgcgttggattttcggctccccataattgtttgagtaccccaaacggacacttgaaaaaatcgatttttttgttttcggggcagtccccccgaaccgatgcgcccagatttatggggagaccgaatccttcgggaatagcttccctatagcctgtactttaattctgcgttggatttttgctccccataattgtttgagtaccccaaacggacacttgaaaaaatcgatttttttgttttcggggcagtccccccgaaccgatgcgcccagatttatggggagaccgaatccttcgggagtagcttccctatagcctgtactttaattctgcgttggatttttgctccccataattgtttgagtaccccaaacggacacttgaaaaaatcgatttttttgttttcggggcagtccccccgaaccgatgcgcccagatttaattcgatcactcatattttttgctaattgagcagaagcgtaccaaactttgcagggatactccccggtaaaggactaacttacactgaaatgagcgccgagctagctggctcaaaaaaattttcgaaaatctgagtctttcgtttttatttattttttgcaaaattaattcttaaatattttttcagaaagggttctgaaacgcaccaaattttatttacatgttagtttaggcactctgatgctttttctatcaaaaagggagatgaataanattttntaaaatttttaattcattttanacaggccaaaa

SEQ ID NO: 44551 - DNA, 1802 bp, Heterodera glycines
gaggtttccgtcctctctgagctcgccttaggacaccttcgttacgctttgacagatgtaccgccccagtcaaactccccgcctgacactgtcatcggcgcgggtcgccgggccaccgggtggcccgacttaacaccaaaatggacaccctttcgggcgcactcccgttttaccgattaagtaaggaatcgatgaaagtagtggtatttcactggcgccttgcggctcccacttatgctacacctctcatgattcttcacaaagtcagactagagtcaagctcaacagggtcttctttccccgctaaatttgccaagcccgttcccttggctgtggtttcgctagatagtagatagggacagtgggaatctcgttgatccattcgtgcgcgtcggtagttagccgacgaggcatttggctaccttaagagagtcatagttactcccgccgtttacccgcgcttaatcaagtttccttggcttaacattcagagcactgggcagaaatcagacacggtcaacgtccacaaggaccatccgtctcctctgttttaattagacagtcggattccccgagttcgtgccagttctaaactggtcgttcagcgccaaccgaagtgcataccctgacgagcatacacgcagctgaagcgctccacaagcagctctcaccactagtccacgcaccatccccgaaagaacagcacgcagccacgggcaaaagccgcctgtttcacgcaacagcccggctgacccgacctttagagccaattcttttcccgaagttacgaatctaatttgccgacttcccttacctacattattctatcgactagaggctgttcaccttggagacctgctgcggatatcggtacgatcaggcaggagattcaaatagcttccctcgcattttcaaagggcgtgtggagcgcacgagacacccacaggaaccgcggtgctttaacggcgcaacatccctatctccagctgagccacttccaggcacgcacaccctaaaccagaaaagagaactctggctcggactccacacgacgtctgcgagttcatttgcgttaccgcgcaaaacagctcttgcgaaccgtcatttccctagcctggcgtgggaatgttaacccacttccctttcggcaaccggatggaccaactgcgcaagcacagaaaagtcgtcatccgtagtgtgttacggcgttagccggtgccttaggatcggctgacccacattcaactgctgttcacgtggaacccttctccacttcagtcttcaaggatctcacttgaatatttgctactaccaccaagatctgcactggtggaagctccggccgggcccacgcccaaagccttcaacgcaaccaccacgaccctcctacacgtcatggccagactacgcgacaagcacgtgtacaagccaatgacggtggagtataggtggcccgctccagcgccatccattttcagggctagttgattcggcaggtgagttgttacacactccttagcggattccgacttccatggccaccgtcctgctgtctatatcaaccaacaccttttatgaggtctaatgagcgggcactttggcaccttaactccacgtttggttcatcccacatcgccgagttctgcttaccaaaaatggcccacttggagctcaaacattcaacgcctgggttcagagtcaagcaaccctggcttcatacccatttagagtttgagaataggttaaggacatttcgtccccaagtcctctaatcattcgctttaccgagtataactgcttaa

SEQ ID NO: 44552 - DNA, 1089 bp, Heterodera glycines
  unsure (1)..(1089): unsure at all n locations
taattcataaatatttttagaacgtgctctgaancgcaccaattttatttgcaagttattttaggcactcagatgctttcactatcaaaaagggagatgaataaaaaatctaaaaatttttaattgctttttaaacaggccaaaaagtttaggcttatattttaaaaagtttcatcgaacctagcgcactaaaatcgatataatctctccaaattttgcaggccttctccattgtaaaggactaacttaacctgaaaaaatgccaacgcttgttgtttttaaaatttttcgaaattctgactttttcattacttatttattattttgcaaaattaattcataagtattttttagaaagtgctctgaaacgcaccaaatgttaattaaaagttaaataaggctctctgatgctttttctatcaaaagggagatgaataaaaattttaaaaatttttaattcctttttaaacaggccaaaaagtttaggcttatattttaaaaagtttcatcgaacctagcgcactaaaatcgatataatctctccaaatcttgcaggccttctccattgtaaaggactaacttaacctgaaaaaatgccaacgcttgttgtttttaaaatatttcgaaattctgactttttcattaattatttattattttgcaaaattaattcataaatattttttagaacgtgctctgaaacgcaccaaatgttaattaaaagttaaataaggctctctgatgctttcactatcaaaaagggagatgaataaaatttttaaaaattttaattgctttttaaataagccaaaaagtttaggcttatattttaaaaagtttcatcgaacctagcgcactaaaatcgatataatctctccaaattttgcaggccttctccattgtaaaggactaacttaacctgaaaaaatgccaacgcttgttgtttttaaatttttcgaaattctgactttttcattaattatttanttatttgcaaaaataattcataaatattttttagaacgtgctctgaaacgcaccaatgttaattaaaagtaaataaggctctctgatgccttcactatcaaa

SEQ ID NO: 44553 - DNA, 1026 bp, Heterodera glycines
atatattttcttgaatttcttcccattttgggttacatgtcatcgtaataaataaatcgggtttgccaaatcttcgaacaattgacattgcatcttgaaagtgtttttcaatataacgtggtgatccaacaacagtagctggtaaaataattttgcgtcaattggaagtcctgtttcttgggattttttaagtaaaaaactatcaacatttttataagaatctgctaaaatctttttttggttatttctaatccatcttattctatcaccttcgatcttaacatactcgtcaacacaccattgctgaaataattttgctccataaagaagaggattaaattcgtttctcacagcaatacaataacttgcatactgtaatctcgtcaaatttttaattccatttttctgtttcatttcgggatgccaccctgttgtccctctcggaaaaaacaaagggtagcacattggtgtaacatttttgtcaagactattcaaaactcttaattcttttcctttttctctgactacaattttcgattctggtacttctccgtcagctccaggcacaaaaacaacggctacttcatttgctctaggcaatttatatctatttttatccatatctggcgacaacccaaataataatttaagttccgctggttctcttccttcttctttagctttttctttttcatattcttcttcatctttcatcattataaatgcttgtgcaaaaggattttcagatttgatcaaactataaatagagttaagcaaatcgtcgtctatttttgggtttgattttctcaaaaaattcatagcttcaccagtgtcaatgataaacaattggccatttgatggtaactcatcagaatcagggttaagtgcgatttttattttatctaagatttgtccaaaaatacggaaacaatatggcccacggttatgcttaaattgatatcgcattggattcatagaagccattgaaacactgctatttaaatatcgaatattttcaaaagacat

SEQ ID NO: 44554 - DNA, 1861 bp, Heterodera glycines
  unsure (1)..(1861): unsure at all n locations
cagcacaccaaaaccccacagccgagctgagcaagtaacgtaagaacacgtacaagtacatgatcccacgaagcaacgcacaagcagtgcattttatggtaacgaccctgaaccaggcgtgccaatggatgtaactccaatggcgcaatgtgcattcgaatgttttgtgttcaaggtttctgcagttcgcactaattatcgcagttggctgcgttcttcatcgatccacgagccgagtgatccaccgataagactagaattcattcttcaacagaagtgtaaaaaaaaataatgaaaaaaaaagaaaaagctggcggtgcccgagctgacactcattgagtcttaagccacgtgctaggccaagcacgggcactaccgcgtcgtctcatcacggccacggacgtagcagcaagcacaaacacaccgctagttacggcacgtaagaccgggaacgaaaccaccatccccagtcagtgtgttatgtgcctgccacaacaaccgctcaacgacgcacagacgccagcacagccgttaggtcgccccacgagcgtgcatcccacattggcgcagcgaaccagccaagcgaggcggcccgccaccgacacattgccacgcagcagccatacacaggctttcacacgtgcagcactgagcggtataccacagctccaacgtatggaagcaccccaaaagcatggctcgtgaggcagctgccccgtaatgttgggcagcgtccacaagtcatctcgaacgacctgtgcccatcagcggacgggggcatttggtggtgccaacgctagcccaacaggacagcaggtaggtggtgaataggaatcacttgggtaatgatccagcagcaggttcacctacagctaccttgntacgacttttgcccggttcaagccactgcgattaaatcggttccagtctgcataccgaccgaagccgggaacactaaccgtcccccgaatttctcgaaatggctcagtcccgggcagcgacgggcggtgtgtacaaagggcagggacgtattcagagcgagttgatgactcgcccctacaaggaattcctcgttcacggacaataattgcaatgtccgatcccaatcacggcaaattttcaccggtttaccaacccctttcggggaaggacaagcacgctgattttgccagtgtagcgcgcgtgcagccccggacatctaagggcatcacagacctgttattgctcaatttcgtgcggctgaacaccgaaaatccctctaagaagttgtgcccacagaagcaatgagccaactatttagtaggctagagtctcgctcgttatcggaataaaccagacaaatcgctccacgaactaagaacggccatgcaccaccatccaccgaatcatgaaaaagctatcaatctgtcaatccttacggtgtccgggccgggtgagtttccccgtgttgagtcaaattaagccgcaggctccactcctggtggtgcccttccgtcaattcctttaagtttcagctttgcaaccatacttcccccggaaccggaagactttcgtttccgggaagctccccaccagggcgaataaatccgccggcggatcgctagttggcatcgtttacggtcagaactagggcggtatctgatcgccttcgaacctctgactttcgttcttgattaatgaagacattcttgccaaatgctttcgctgtagtccgtcttgctacggtccaagaatttcacctctcacgtagcaatacgaatggccccgtttgtctctgttaaccattatctcggtcagcaaaaccaataaaatcggaccgaaatcctcttctattattccatgcacgaacattcaagcgaaa

SEQ ID NO: 44555 - DNA, 168 bp, Heterodera glycines
ttaattattaataatttgtttacgaacaatccttaacagaattcgcaatttaatattaattaattttcgttcctttcattcctgaggaaatgcacttttccttttcaaacaattttccgttattcatttcaaaaggttttttcatttttatgtaattatattttcgat

SEQ ID NO: 44556 - DNA, 1106 bp, Heterodera glycines
ataattttcaagattaaaaaaatatatatattttgtggcgataaacattagtccgtattcaacgaccccaaaaaagtgtgtttcacgactgtaaataatgccgaaatgtccgtaaataaaaccaccaaatttagagttaaaccggctaatcagtgacagaatttccatttttctcccaaaatttcccatggcgattcacctgtcccgtgtgcgtcagctcgtcaaactccgccggccgctgggccatttctttggggctcggcactggcacatttttctgctcgtcaccgcccttccaccgccgtgccattgcgccggtggcgccgcgcattcgcaaaactgcggcacttttggatgatgaaaacatagtgattgctttttggcaaataaaaatgtaaattaggaacaaaaaaaaaaggaagaaaaatagcgtaattgagaaaaacggtaatattaaagtaattagcatgcctttttaaaacatttttaaatgactcaaaaataaatatgagcaaataaaaaataaattcagcggacgagagaagagagaatgcatattattgaggagaataaaggacatagccataggccaattttttacttccgataggagccccaaaaacccccgaggggatgccttttttatgttcaaattatttattttatgaaaatgaggaggggaggattttagccgaaatatgaaaatttctcgaaaatttttagttttcaaaaatttgttttctttcgagtatgcattttggattttttttaacattgctatgcccttgtacagagaggagagagagagagaggagcatcatattgtgagtgattgtttagtctaaataatcacacggggcgacaaaaacaaaacaaatatttttgggccattaaaaatgatggcgacaacaaaaaatgaatagagagagagaggagaatgggcagcttattcagtgctgcgtccatttgatggtcttcaggtcgacgccctcctgcaccatttcccacagcggcgacatttcgcgcagacggagcgcgtcccggacacacttttgcaccacgtagtcaacctcctaagggagtggggcatcataaaagtgtggaac

SEQ ID NO: 44557 - DNA, 1017 bp, Heterodera glycines
  unsure (1)..(1017): unsure at all n locations
ttagagcataacaactgatgacagccactgtcattgtttccaaagagatttctattaccagattgccaaaaaaagagatagccatttttttggaccgtccatacctcacatatactcaaacggcccgaaaatcatttttagagcataacaactgatgacagccactgtcattgtttccaaagagatttctattaccagattgccaaaaaaagagatagccatttttttggaccgtccatacctcacatatactcaaacggcccgaaaatcatttttagagcataacaactgatgacagccactgtcattgtttccaaagagatttctattaccagattgccaaaaaaagagatagccatttttttggaccgtccatacctcacatatactcaaacggcccgaaaatcatttttagagcataacaactgatgacagccactgtcattgtttccaaagagatttctattaccagattgccaaaaaaagagatagccatttttttggaccgtccatacctcacatatactcaaacggcccgaaaatcatttttagagcataacaactgatgacagccactgtcattgtttccaaagagatttctattaccagattgccaaaaaaagagatagccatttttttggaccgtccatacctcacatatactcaaacggcccgaaaatcatttttagagcataacaactgatgacagccactgtcattgtttccaaagagatttctattaccagattgccaaaaaaagagatagccatttttttggaccgtccatacctcacatatactcaaacggccccgaaatcatttttagagcataacaactgatgacagccactgtcattgtttccaagagatttctattacagatttgccaaaaagagatagccatttttttggaccgtcatacgtcacatatactgcaacgncccgaaatcattttagagcataacactgatgacagcactgtcattgttcaaaagagatttctattaccagattgcc

SEQ ID NO: 44558 - DNA, 1557 bp, Heterodera glycines
  unsure (1)..(1557): unsure at all n locations
cctttaaataattattttttgttttttatataaaaaatagttaaaataaattaaaatcagttctttatacttattttntacggctcttattttttcaagcgcgttgtctaattattntcattaattattcgctcattttgcctgattgattttgtcggagattaaattagccagttatcttatccattttgttaaaatatcctcttggccttgctgattcatctaaccttttaattggccttccactgtttataattccttcatttaaatacgaaaatttaaaaagttttatttatttaattgcactcccatttttaacgaatggctgcgaatgaatttattatagcgttaaggtttttgacaaacaagaaatttgctgtcgattatttttttaaataaattaaattgttaacttaattttatatttttatttttgtaatataaatatgttttttttaaactcttggctctgttccgctccttttgttaagatctaatcgtatatgtttatcttaaatctgaattattttaaatataagaaggcactaattgaattattttaacaaattacatcatcaatcggatgtctatgcatttatttaagttaacatcagaaatttttatttcaattttaatttacatagatattttgacattgaatttgtattttttggtatcaatcatttttcttgcataattttattttattgctttttaattttttgttttcttattttaataattcaacaaagttataaatatctttgctcgttttggttgtaataacaagttgaaactgtcattttaaatctcggcgctctttaaaagacgattaataattaaaatttttgtaattttaaaatccagtttaatcattttataaaaataagttcatttgaactcttggttttattatataataggttttgtatttttttgcatgttttcgttttcgaatacttggataatcaatttcaattagattactttatttattttttgattttaaatttatatgatattaaatattcttcttcataaatattaaatatttctctatataaaagactccttgtatagtatttaatattatttattttcgattttttattaatttaatttttaaattttgttttgaaataatattttcctttcctaaacaattgttttttataaattctcatgtcaaaccaactccccttctgtttactgacgtttttccaagagaagtttttttttaaatttctatcataattcatatatttgtttttttaaataaatgttcgccttattgcgattgcaattataaatcaacatgcgtttcgcaatgattttatagattaaaaatttaaaatgattatctaaaattattataaagaaaagaaaattttgtggaaaagaactattttgtataaattattatttatctaatttttgttattgatacttatttanaaatggatttgccaatttaatttatattgngtaatttttttttaatgtgaattgcggncatttgtcatttttcatataaaacaattaattttttttttttgt

SEQ ID NO: 44559 - DNA, 1252 bp, Heterodera glycines
  unsure (1)..(1252): unsure at all n locations
caaaataggcttagatcacatttgatattntataattaattttgatatatcatttttgaaaaaaatcgattttttagggatacattttcaaaaaaaatttttaaattttttacaaaaaatttctataaattctcaaaaatcctcaaaatatgtaaaaaaatgaaaaatatttacgaaaaattgcgaaatatgtacgaaaaagtccaaaatatatacatatttaatatgtaagaaaatcccgaaatatgtaaaaatatgtaaataaaagtcccaacttttgttcgcaaacacaaaaaagaaagtgtttttcctactatttagagcatggagaaaccaagaaaaaaatatgtattacataaaattagcagccttttctttcatttattatttggctatagacactttttctattaataaaatatttgtccgaattcgtaccctttaattaatttctttaagcgactatcgatgagctccatcattcctttctgtcctaattgtccttcttaaatcatccaatttcatcccaatttagcatatccggcacctaattaacgcctttgactttttggcctcggttgggaaaacgcccattcttatgcgcatcgcctccccctcctccaccattcgggcaatttgttactttttgaagagagcagcaaatgcttgagtgccaatccctaggcgtccaaacatttctgggaattattaagtaaaaaaaagtgcctttcccacaatttgtctacttgtgccacagaggaatggataaataaatggatgtgtgtgtggcgtgccgttgtcgtgcaaaaatgaatgtgtgtccctgagtattttttgacaaattaatgtcaacatcataatgaatgaggaatgatggaggatgtctttgtacttttaatgacattggcgccgtaaggccataatcaattttttttaaataaagaattataaactcaattttaaaatataaatatttatttacttttatcagttcaacttcaaaattgaaattttttatcgtaattgaatatttattaaattgcttattttattttttaacggaaaattcggggtcaataatcctctccattctttaaaaataaaaacaatagcattaaataccgagaaataataataaaaaacttcctgaatggggcggccagcaacgcaaacgcgtaaaaattataattataaatgacaccgcgagaaaaatagccccaagcagattgcctgagggcatttgtaaaaataa

SEQ ID NO: 44560 - DNA, 866 bp, Heterodera glycines
  unsure (1)..(866): unsure at all n locations
tccccaaaagtagttattttttcttctaattttcaaaattatctccctctttcgcgtgggaattcaatcacaattttaacaattaaaatgagaaaatattgttatttttggactaaatttgttcacaaagtgcactaaaaatttcaaaaatttaccccggcggcgcctatcggcaccgccggcacccaaaaccttatttttataaaaagttggctcaaaaccacaaaaatttggacattttttggactaaatctgttaagaaattgcattaaaattataaaaattttccccggcgatacccatccgcaccggtgtagcccctcccctcgcacttcacactggtcatgaggagaaatgcgcccgaagaaggtggcaaagaacggtttgtttgtgtccccaatgggcaattccaccatggtatatcttgttgctcccagcaaatattcaagtgagatccgtgaaaactgaatagaataagggatccacgtgagcaccaatagaatgtgggacaacctatcctaaagcaccggttaacgacgtaccactctacgaatgacgactttatctgtgcttgcgcaatgggcccatccggatgccgaaaggaaacagaccaacattcacacgccaggctagggaaatgacggttcgcaagagctgttttgcgcggtaacgcaaatgaactcgcagacgtcgtgtggagtccgagccagagttctcttttctggtttagggtgtgcgtgcctggaagtggctcagcctgagatagggatgttgcgcccgtnaagcaccgcggttcctgtggtgtctcgtgcgctccacacggcccttgaaaatgcgagggaagctatttgaatctcctgcctgat

SEQ ID NO: 44561 - DNA, 1143 bp, Heterodera glycines
agcttgactgtgccaattaacaacaaatgcccggaatgcgatgtgaaccatgttgatctgaccattgatgctttcaactatttggagccacgcggtggcgaagttggcaaagcgaccggtcagaaaatttaatgctttgttgatcaatatttatccaaattaaaacaatttattcaaatgcgtaagaacctaattccctgggggataattaattaattacagcgctaattacttgcaattttttaattgtgtgctaattacttcgtttaggcgccacgctcacttacatgaaatgtccgtccaatattaaagcttgttgaataatgtgttggcattggctggcggatggaagcgagtaaaaaacaaatgcattaattattaactaatttgaatttttacatggaatattgacggtattaatttcacacccatatatgaatttatgtgatcggaaagtttttttttttttaaatcactcgaaaattttacaaatgattgataattggtcccggagagcttagagctgggctggaaaacattaaatagataaatgaaatgtaaaatttttaaatacataaataattggcggtgtcaatagctcattaaataaatgttagctgcgtatattttaatagatccaaaatttgtcaacgtataattataatttttatcccgaaaactctttttactcagttcattagtaatttgacaaattttaagcacaaattaatccaaatttttcacaaaatttcctagcggcgcctgcttatctgtgtaaaacggcaggagcctaattccctaaaaaaaaaattttccaacattgcattcaaaaatcccgtttaactgacaatattgtaaaaattaatttgattaaatatttctagcattaattgttaaaaataatagaaatcaacaaattcttctatgtgtataaaaaatctccgatcactaaaacagaaagggcgagtcgatcacaccgttgcccttcccggcacctccttcatcggaatcggacggttttgtgcgcatctaaaaatttaaaaatattatttttatttaaaatttaattaaaattattttaaaaaactcaccatatgcccatcgcccatattctgcagcactttcatttcattcacattgccc

SEQ ID NO: 44562 - DNA, 1029 bp, Heterodera glycines
  unsure (1)..(1029): unsure at all n locations
cgaggaggagcagaagcgttacgttttcgagcaccaggacaagccgcgtttcatctacatcagcgaagaaggagaccaaattgagttcaagggaattgtcaagcagtttggatacgtcctaagcgttgagactatctacttcgacaaagaaaagggaattgatgaattctataacttcctccgtaacaatgtcatgtgtttcttcagtgttgattcataaagtgctttgaaatgttcaattatttcgcgtactgtttactgtacaaatatttcatactttaattttcctcaatcttattttacgatttttattgaaaaaaatgaccgtcacatccaacaccgaattccgactcatcgaatgtgtgccaatcctcgaggaagttgctcgtgaatttggctgtattacgccactaccaaaccttgggtatgtttctttcgttttacaacactaactccagcatacagtagccatcgtgactatcgtgtaagcggatgtatgatgattcgcacgctgacatcgttgaatcgactctacattttcgatgctgaagactgtattgaggttaatggaaaacatgtttcatattttattgctattttaggtgaagggtttcttaaggcaagaggacggcacgagccaaaaagtggtcaacgaatattatgaaaaatatgatggactaaacggatttactgaatttcttcggaattgggcttttaactttttctgtttacatgcctttgatgatgatgacgacacatctgatgaacactaatttcgttaatatttattgtatgctcttggttacaaatcgataaacaaacgcatcagggttatttgaacgatttaaaatttgcataacattttcgaaacccaatccgacggacataaaataaacganagtaattacatagtgaccacaaacattggacaacaccgattngaaccgcgtcttattatagntaatgtttttaaaattatcgataaatatttttttgatcatctgataggcatctctccatatgagtcaa

SEQ ID NO: 44563 - DNA, 951 bp, Heterodera glycines
cccccccccccaaacgaaaatttaaaaattttatggcaattttcgtaacaaatagcactcaaatgttcaaaatttttcccggcggcgcctatcggcaccgccggacctccattttgcactatttttacatgttttttgccgtaaaacggccaaaattgggtcatttttagtgaaaaagtggagtttttacccagcagcgggacaaaaaagttttttattggttaaatagcaaaaaaaaacaaggtctcaggtcgggcccccccccatcgggaaatgtttttatgtttttctagataacgtgccggggccgaactgagcggttccgagatgattctatagcgccaaaaatgccattttttaaaaatgtctccattcctctcaatggctctgaaaagaattttcatttttttatcactttttgacgctgtgcacaaacaaaagattgcgggcactagcggagaatgtctgaaaatttattgcattttattaccagatgatactatagccaaaattggcatttttttttaatttccacgttcctctccacaatggcgtgccgtaaaattctcccattctcggcgccaatttgttgaagaaaaaaaaacattttttagcatccccaaagcattgtgttgagcggcaagaagatcagccaggacgtatccgccgcatcggatcagcagcagcaactgcaacagccaagcacttccggcgctggtggccatggccacccatcggaccaactccgttcggcactcaaatacccctcacgggcactgctacaacagcatcatcgacaacaaattgagccacaacaacagcagcagcggtcgtcgtccacgacggcatggcaaaaagtaaaggacgagggggtacagcggtgggcagtctaagtccgtcaattcgagtgcattttgagacagagatattgcccgagacgcacaagtctga

SEQ ID NO: 44564 - DNA, 1304 bp, Heterodera glycines
  unsure (1)..(1304): unsure at all n locations
cagcaaattttaataanaataaatacttttcaattcatgcaatgaatttcctgaatctataaattgatccactagaaaagtgttagtagaaaataaaaaataattggagcccatattttcgtcataaattaagtcccgaaagataaatagcatggcaaaacttgaaaatatttgtcgatttattgcctattttccatccatgtttgggataaggaaatatataaaaagataaactttgtataagtatttattatcatggaagtcgtcagaataatatcaaaagacttcgtagaaacaatattgcaataatttaagttcgttttatttttcagtcaacaacacggccgagagaaattttgatacatcaaagacaaacctaaaatacacagcggtgagagccctagcgaaggctggactataaaattgcacaacaaatatacctactgttcgagttatgttttatacgagtcagatataagtttttcctatggcaaggttgtgaaattcctcccaaaaactttcttacggaaaataagcagcaaattttaataaaaataaatacttttcaattcatgcaatgaatttcctgaatctataaattgatccactagaaaagtgttagtagaaaataaaaaataattggagcccatattttcgtcataaattgagtcccgaaagataaatagcatggcaaaacttgaaaatatttgtcgatttattgcctattttccatccatgtttgggatgaggaaatatacaaaacagataagactttgtataatatggcaaggttgtggaagtcctcccaaaaactttcttacggaaaataagcagcaaattttaataaaaataaatacttttcaattcatgcaagaaatttcttgaatctataaattgatataatagaaaagacttcgtataaacaatattgcaataatttaagttcgttttatttttcgtcaacaacagagtcccgagagaaattttgatacatcaaagacacacctaaaatacaccgcggtgagagccctagcgatggctggactataaaattgcacaacaaatatacctactgttcgagttatgttttatacgagtcagatatgagtttttcctatggcaaggttgtgaaattcctcccaaaaactttcttacggaaaataagcagcaaattttaataaaaataaatacttttcaattcatggcatgaattnccctgatctanntaatgatccactagaaaagtggtagtagaaataaaaaataattggagcccatattttcgtcataaatgaagtcccgaa

SEQ ID NO: 44565 - DNA, 838 bp, Heterodera glycines
ataagatacatttataaattgtgtgagaacataaacaaatattgtgccaaatccttcctgttcttggtcgtgctctttcgtggtgaacaaaatttagtatgttaccgtaaatgactgtttcgcttaacagctgatccattcaattgctttgacggcttacataaatttttaatcatgattgagtatgcccttacccaacggttaaagggtagagtcaattgtgcaatgtattatatataccatctttattcattgatagtgtacaatttaaattaacatgttttctgtgcctagtgagtacaattttttgttgtgccggtggacaacacaataaaatatttttattgaagaaaatggaaaaataaaatacaaatatttgatcggaggaatgtagcaaaaataggagggaaaacaatgcgaaggcaaattggaaagaatgaattggggaaatgagtggaaggaattaatggggaggggaacaaatcaatatttggtccgttcaaagaacgaacccaatgacaacaatatttgaattatgggtcgccccaacacctccccttttaagtctactgatcggccctgaaatcgatcacacacgggatgatttatttgggcccaatcgcagatgatcatccggccctcgatggcataagtgaattgcgccaatttgcgggagattactgccgggatgattttccttcaaattgtctggcttattggcacgaaattttccatgcgatttgtccttaaaatgagtgttggaattttgccgaatttggttgatttttccggggctccaggccgctgatttgtgtcgtcgactgaagatctctccaat

SEQ ID NO: 44566 - DNA, 989 bp, Heterodera glycines
aaattttcaattttttatagtctaatctactcaaaacggttcagaattcaataaaaataacattcacggtgcgaaaaatggggtttgacaagtttattggggaaaaaaagactttacaaaataatacccctgggagaagggagtgggaaacatgatttcaaaattttcaattttttctagtctaatctactcaaaacggttcagaattcgataaaaataacattcacggtgcgaaaaatggggtttgaaaagtttattggggaaaaaaagactacaaaataatacccctgggagaagggagtgggaaacatgatttcaaaattttcaattttttctagtctaatctactcaaaccggttcagaattcaataaaaataacattcacggtgcgaaaaatggggtatgaaacgtttattggggaaaaaaagactttacaaaataatacccctgggagaagggagtgggaaacatgatttcaaaattttcaattttttctagtctaatctactcaaaacggctcagaattcaataaaaataacattcacggtgcgaaaaatggggtttgacaagtttattggggaaaaaagactttacaaaataatacccctgggagaagggagtgggaaacatgatttcaaaattttcaattttttctagtctaatctactcaaaccggttcagaattcaataaaaataacattcacggtgcgaaaaatggggtttgacaagtttattggggaaaaaagactttacaaaataatacccctgggagaaagggagtgggaaacatgatttcaaaattttcaattttttatagtctaatctactcaaaacggttcagaattcaataaaaataacattcacggtgcgaaaaatggggtttgacaagtttattggggaaaaaaagactttacaaaataataccccctgggagaagggagtgggaaacatgatttcaaaatttttcattttttctagtctatctactc

SEQ ID NO: 44567 - DNA, 332 bp, Heterodera glycines
  unsure (1)..(332): unsure at all n locations
attactccgccgaggcaaaaaattttttaagaaaaattttnttcttcaaactctaatttttgaaaaagatttttgaaattttttcttggctgagttttgtcctgctgcggagttgtagcccatcccaaaaagatatcattgaccccgtcggatttgggtctccgttttcgcagagtttggccaagccaggagggacctgagttttttttttgtcgttggtttgtccacggggttggaattccggtccaccgagtcgtttttgcttggatttttttgttttaaacttttaagtggaattttcttagctaaaaatttatctatttgtgaagaaa

SEQ ID NO: 44568 - DNA, 928 bp, Heterodera glycines
atcactgttgtacctcttttaatcacttcttctcctcttttaatcaccgttatacttcttttaatcatttttgtaactcttctaatcacatttgacctcttctaataactgttggacctcttctgatcactgttgttcctcttctaatcacagttgtacctcttccaacacatcttccaacaatttttgtacctcttatgagctcaacaacatttaaatacgggcgcgaagcgcccgtccaagttcaacaaaatttagaaacgggcgcgaagcgcccgtccaaggccaacaaaatttgaaaaacgggcgcgaagcgcccgactgaggccgcgaagcggcctaataagctaaaaaacgggcgcgaagcgcccgtcttgagcctcgacgtggactaaaaacccataataatttttataaaaattcaaaaaatctccaaccaattcgatcaatttgaatcgcttcacagcctaggtagcgaagctcccaaagcgcgcaagcgctttttcccagcgaaatagccgacggttcacgcaccgctagttacattatgttaaattggtttgtggaataacagttgtcggaagtcgatgattcattgggaaaatgctagaattgtataataaattaaaaaaacaaattaaaaaattacgtttatcatgtttaataaataatattacattttttaaatttgtgaatttagattttaaataatcataatataatttaaaaaagattcaaaagatcatgtcaaaaattagagcttaacaaatatttaaaacatatatactaaattttttattaaaaatcttttattcgtaaaataaataagtgctgcaattcgtatatatttaaccctattttttaagagcgacactaaattctaagaacgataaaaattgtctaaaatttacattttcatcccaatttt

SEQ ID NO: 44569 - DNA, 769 bp, Heterodera glycines
atttctctattgattctaaatgtccaaagtgattttttatccttataaccaaaattgttagcatttacgaatttgatgttttttgtgtgttagagatgtgaaaatagtacgccaaaaagagagaaaaagtaatgcattttcatgttttatatatatcttttgaaaaatagtataaaacataaaatggctgtattacattatgcagaatttttttctcgatcagtatgcaaaatttggtatagatttaacatatagaaaaaaagttaaacgtagcgaagtaaatgttgttttttacataattaaaatgaagagatagtacgccaaagtgagagaaaatacaaagaaaaagagaaacgacgagatagtactaggcttttctctgcacagtggggcgtacccatagtgcatttggggacactgatcatactgatcacgaatcaggcatccatttcaaccaattccgcaccttgggccaagattcgaaccaaaagtcgagaattcaaatttctcgagtttcgcatttttgtctatgatgattcagtttgtttcagaaaatccaaaccgattttcaaccaaaaatgcgaaactcgaaaaattttaaatttcactttctgttcgaattccggcccggaagttcgaaatttgtcaaaatggacgccatttcacattactctcttttcttcatttgctgttgatgctgttccgttccacttccattctctttcagcgcctttttgctgaaactcacctctctgtgctgctgttctgt

SEQ ID NO: 44570 - DNA, 996 bp, Heterodera glycines
tttagtgcgctaggttcgatgaaactttttaaaatataagcctaaactttttcgcctgttaaaaaaggaattaaaaatttttaaaaattttattcatctcccttttgatagaaaaagcatcagagagccttatttaacttttaattaacatttggtgcgtttcagagcacgttctaaaaaatatttatgaattaattttgcaaaataataaataattaatgaaaaagtcagaatttcgaaaaattttaaaaacaacaagcgttggcattttttcaggttaagttagtcctttacaatggagaaggcctgcaaaattaggagagattatatcgattttagtgcgctaggttcgatgaaactttttaaaatataagcctaaatagggaagctattcccgaaggattcggtctccccataaatctgggcgcatcggttcggggggactgccccgaaaacaaaaaaatcgattttttcaagtgtccgtttggggtactcaaacaattatggggagcaaaaatccaacgcagaattaaagtattaaaaatttttagattttttattcatctccctttttgatattgaaagcatctgagtgcctaaaataacttgtaaataaaatttgatgcgtttcagagcagtttctgaaaaaatatttatgaattaattttgctaaaaaaataaaatagtgaagctttaaaaattaataaaaaattttaaattcagaattactggagttagcatcatagcagtgcttttccttgtctttttgatgctctcgcaaaatctggttcgcttctgataagtttataaaaaaaagttaagcctaaaatttttcgcatatttaaaaagcaattaaaaatttttagattttttattcatctccctttttgatattgaaagcatctgagtgcctaaaataacttgtaattaaaatttgatgcgtttcagagcagtttaggaaaaaatatttatgaattaattttgctaaaaaaataa

SEQ ID NO: 44571 - DNA, 1509 bp, Heterodera glycines
  unsure (1)..(1509): unsure at all n locations
caaaaaccccgaaaatgggcaaaacaggcattataaaagtcattgtagacgacaccgcaaccnaagcggaaaacgcgttttttgtgcttatcntgagcgtatcaagtgcgcaaacattttagacatttgcctaaaaaagaatccctagtcattatttaaatgaaaaacaaaatgacgaaaattaatgaacaaatgtgcaaaaaaaaggttccaaaaaaggacttccgcgagtcgaaaaaaaatattggattggaattcgggtcgagacgaccaaaaaacttggttgcgagaaaaatgtcgggtttcgagatttgagggtctaacctggcccagtcccaaaaaattaacttttgataattttcaaaacttataattaaatttgtttactcaaataatgaaaaaataatttttttttttggggtagtaaaaaaattttggtgggcactccctttagtttttattccaaaccctaaccaaaaaatgcgtaggaaaaccagtttattgattagaaaaaaaaattcaagaaattcctaaggcttaggcctctctcacccccgtccggcaagtcgtccccgtaaaagcggtagttgcgcggcgctccgccttcatttttgacgtcacaaaacactttgcatgccctctggggaaagcgggtcagctgactgccggtgccggtcagctcggggtcctggcgaacgcgttggtgctccgtgcattttgccgaaatgtactggacagttgttgtttgttatcattagtaattagccaatttgctaatgacccacacttttcataatgagccaactcgctaatgacccaaacatttataataagtcaattcgctaatggcccaaatatttattatgagccatttgttaataaataacccacacattccctaatgaatcaattggctaatgagccatttgctatgagccaggctaatgaccactaatgatcgaaccgttaatggaataaactcgctaattaaccaatttacaaaatgacccaatcgtgctaacgaatgaagagacttatcacgaataaattaatccgtgataaattttcttgctttcccaaaggactaaactcatttatgacctgtctcatcaatggcatttcaaatatccattattaaattcagtgatatagccgaaaaagtatttcggcaatttcacgagtggcgtcattgaccctaattggtccacctggttgaccgactggcgctcctgcgggcatttgcgcgaacagacggcggcacgatgcgcaggcccactgcactcggcacctccgttctgtggtgccggattggagcagttccgttcggaaagtgtctgtgccaaaggacaaaaaagttattttaaaaatccgcatgcatcccgaaataaaaggatttttattgtgataaatttgaaaatcctaagcaattaataatttttggcggggatcgtatcccaattattttgtttttaatcttcgaaatttttaaaaaaatcttaggaacttttc

SEQ ID NO: 44572 - DNA, 977 bp, Heterodera glycines
ccgaaaatattgctccaattgacatttctcgcccttttaagcgcaaatggggacttattttgtaattctcccgtaccgttttcaattctcacaaagatgccagttttcgagaattttgaaattccagcactacatgccgaaaatattgctccaattgacatttctcgcccttttaagcgcaaatggggacttattttgtaattctcccgtaccgttttcaattctcacaaagatgccagttttcgagaattttgaaattccagcactacatgccgaaaatattgctccaattgacatttctcgcccttttaagcgcaaatggggacttattttgtaattctcccgtaccgttttcacttctcactaagatgccagttttcgagaattctgaaattccagcactacatgccgaaaatattgctccaattgacatttctcgcccttttaagcgcaaatggggaattattttgtaattctcccgtaccgttttcagttctcactaagatgccagttttcgagaattctgaaattccagcactacatgccgaaaatattgctccaattgacatttctcgcccttttaagcgcaaatggggacttattttgtaattctcccgtaccgttttcaattctcacaaagatgccagttttcgagaattttgaaattccagcactacatgccgaaaatattgctccaattgacatttctcgcccttttaagcgcaaatggggacttattttgtaattctcccgtaccgttttcaattctcactaagatgccagttttcgagaattctgaaattccagcactacatgccgaaaatattgctccaattgacatttctcgcccttttaagcgcaaatggggacttattttgtaattctcccgtaccgctttcattctcacaaagatgccagttttcgagaattttgaaattccagcactacatggccgaaaatattgctccacttgacat

SEQ ID NO: 44573 - DNA, 1775 bp, Heterodera glycines
  unsure (1)..(1775): unsure at all n locations
tgggcgcatcggtcggggggactgcccgaaaacaaaaaatcgttttttcaagtgccgtttgggtactcaaacaatatgggagcaaaatccaacgcagaataaagtacaggctatagggaagctattcccgaaggattcggtctccccataaatctgggcgcatcggtcgggggggactgccccgaaaacaaaaaaatcgattttttcaagtgtccgtttggggtactcaaacatttatggggagcaaaaatccaacgcagaattaaagtacagactatagggaagctattcccgaaggattcggtctccccataaatctgggcgcatcggttcggggggactgccccgaaaacaaaaaaatcgattttttcaagtgtccgtttggggtactcaaacatttatggggagcaaaaatccaacgcagaattaaagtacagactatagggaagctattcccgaaggattcggtctccccataaatctgggcgcatcggttcagggggactgccccgaaaacccaaaaaaaaattttttggataaaaattatttaaatgaactgactagataatatttaaaataggttatttctcttcctttcagtatccctgcaaagtttggtgcgcttctgatcagtttctgaaaaaaaagttaagcctaaactttttggcctgtttaaaaaggaattaaaaatttttaaaaattttattcatctccctttttgatagaaaaagcatcagagtgcctaaactaacatgtaaataaaatttggtgcgtttcagaaccctttctgaaaaaatatttaagaattaattttgcaaaaaataaataaaaacgaaagactcagattttcgaaaaatttttttgagccagctagctcggcgctcatttcagtgtaagttagtcctttaccggggagtatccctgcaaagtttggtacgcttctgctcaattagcaaaaaatatgagtgatcgaattttcactaaaaaagttaagcctacattttttggcatatttaaaaagcaattaaaaaattttaaaatttaataattttcctgcaccgaaggtactcactcggcctcttcgcggcctcgtggtgggccttcgccccccccccctcccacgcccttcagagcacgacaaatatttcaacaaaaattttgaaaaattgactagagcaatcgaacgctaacggacgacctaatggaaaaaaatccccgaaggagagaatttaattaaatccattccttcgggggaccgtgccgggtgccgcggggtaagcagtgctggttcgtttcatcacggcaccgaaccttttggctagtcagcaatcgttgcttaacttgccagatcggacgggtgcgcatgactttctgaaaaaaatatttatgaaacaaaaaaatcgattttttcaagtgtccgtttggggtactcaaacatttatggggagcaaaaatccaacgcagaattaaagtacaggctatagggaagctattcccgaaggattcggtctccccataaatctgggcgcatcggttcggggggactgccccgaaaacaaaaaaatcgattttttcaagtgtccgtttggggtactcaaacaattatggggagcaaaatccaacgcagaattnagtacaggctatagggaagctattccggaaaggatcggtctccccataaatctgngcgcatcggntcggggggactgcccccgaaaacaaaaaaatcgattttttttcagtgtcccgtttggggtactcaaacaattatgggg

SEQ ID NO: 44574 - DNA, 1296 bp, Heterodera glycines
aaattgaacatcctcattggctagtctctctcttttttgtggtcctttctcagcttcagatacgtgtctatttccaatatctttacgtttaatatgctcacccaaagcctcattaagcctattcactattccgatataacccttttccgatttatcattatattcctcgagagttgttgaatatttgctttttgcctgtttggctattccctttgcgacgtcggctgatttctttgcttctttcaagtcattcttttccacatgctctaatgttgtgtttttggctttatctacttattcttgaaaagatttaagttcatttcggtatgtttgaatttcgggccccttctctaccattttgtcaaaccacacttttatatcaggctcttctaaaatttgaggatttacttctcttagtgtgcttagtttggtttggatggaactcgagacattgttgatatgattgagttgtctttctacatctctcccggcgcgttctgcggccctctttgcgacatcaatttttgagtctttggtttcttcagccttggcttctctcttcccacgttgttttttaattttgtaatgatgtgtgaatgcttcgttaattttatttcccaatcccccggcggttttaaaattcatgtcggtaaataaacttgaatggggacaccgctgtcattttcccatacttttataaactcttgaccatttatgccgagagcggtgaatgagtaggggtaaataattgatgagagagctactgaccaatttgtgcccaattccaaagtctcggggaggcgtactgtgaattttgacgtagtgttctcctgccccggtgtgttcgacggtagtacaatgtaaaaatcatccatctgttttcactaattcctggttataaaatatgccttttattaaatttccttccaaatcttcgatcctgtatgaatcgggtgtcgttgaattaacaataacgattttaaataattcttcggtaaagtttgggagatacccctttgcaaattttcctttttccttgataattcgaacgatatcgccaattttaaattttttctttttcgaaattttaaatttcttcgccttatataatttttcccagagcgcccgggcattttcaaaagttacggatactggcttggccccaatgtcctattcacactgttgttaatgtttattattattttgtctattacatcgacccatcgtagagtgtccatctttgtaaaatatctgtacaagcgctcctttattgtccgatttgccttttcacgactc

SEQ ID NO: 44575 - DNA, 611 bp, Heterodera glycines
actcataattatgctttgtaatatgaattccaaaattacggctgtgctgtccgaccaatcgaatacactgcgagtgtttgagtacaaagttccggctgagtcttgatttgttgaacaatcgagcagaaaattgttcaatttgttgaccattaatgccagcggagtttgagagggcagattcttggcctcatattcaattttgctaaattttttattttaattgattaacatcttcaaattatattaattgtaaatacatcgttgatcattttttacttgtattcgtcagcaatttgaacgccagccttttccaacacatttttaacactttcaaagtcaatttggctcggttcttctgtccgcgttgcaagtgccatcttctcggatagcaaattatgagcgacaatcacatggtttttgagagctcgaagatgttgcaaacctgggaaaaccaagaaaggatactataataacaaaaataaataaataaaaatttacatttttcaatagaattgcacaattggagcaaaggagtgtctgtcccgctttcaaccattatgactgacttaaagggtttaaagattaattatagcttaataagtaaggaacgg

SEQ ID NO: 44576 - DNA, 1244 bp, Heterodera glycines
  unsure (1)..(1244): unsure at all n locations
gagaaattttatacctcacaaaagcgcttgcgtagagacggagggctgtgccaatcgccatttatttcacagaggatttttatatttagaggttatcccagaaaaatggctatctctttttttgataaattttatacacatacaaatgctctcgagcatgatagggagggcggtgcgcaatagaccttttatttttgagggaatttttaaatttatactctatcccagaaaaatggctatctctttttttgataaattttatacacatacaaatgctctcgagcatgatagggagggcggtgcgcaatagaccttttatttttgagggaatttttaaatttatactctatcccagaaaaatggctatctctttttttgagaaattttatacctcacaaaagcgcttgcgtatgagacggagggctgtgcacaatcgccattttatttcacagaggatttttatatttagaggttatcccagaaaaatggctatctctttttttgataaattttatacacatacaaatgctctcgagcatgatagggagggcggtgcgcaatagaccttttatttttgagggaatttttaaatttatactcaatcccagaaaaatgtctatctctttttttgagaaattttatacctcacaaaagcgcttgcgtagagacggagggctgtgcacaatcgccattttatttcacagaggatttttatatttagaggttatcccagaaaaatggctatctctttttttgataaattttatacacatacaaatgctctcgagcatgatagggagggcggtgcgcaatagaccttttatttttgagggaatttttaaatttatactctatcccagaaaaatggctatctctttttttgataaattttatacacatacaaatgctctcgagcatgatagggagggcggtgcgcaatagaccttttatttttgagggaatttttaaatttatactcaatcccagaaaaatgtctatctctttttttgagaaattttatacctcacaaaagcgcttgcgtagagacggagggctgtgcacaatcgccattttatttcacagaggatttttatatttagaggttatcccagaaaaatggctatctctttttttgataaattttatacacatacaaatgctctcgagcatgatangggagggcggtgcgncatagaccttttatttttgagggaaattttaaaattatactctatcccagaaaa

SEQ ID NO: 44577 - DNA, 1209 bp, Heterodera glycines
  unsure (1)..(1209): unsure at all n locations
ataaaataatcaattttatgaaaaatantttgtttataaaaacgcatacaagtaaaataaacgacaattattgatttgatagaattaattaatgttttaaggtaattaataaaaagaagtaagttataaaaaacaaataaaattctttgtttttttcttgtttataatttactattttaaattaaaggtttgaagttagtgaaacataaaaaaaatacttacgcaatgtaataaaaatttaaatatatttttgcattttttaataaatatttgattgcatatatggaatgaattttttgttgtctaatttttctatagaataaattttgttaaatgaatgaattaaaaattttaatgatgcaacaaatgacaatttgtataatttgattcaaagaatatgctagcaaaattatctcttttttttgtaaatttcatccatcttctcttaattgtcctgctgatcttctggcatatttggtgggatgaaacagctcgaaaaaccgcacgatttgtcattgatgggcggttgtcggagcacacgcgggggccaatgtttgctctagaaaagacacggtatccgatgggtttttaagcggtccatagattttttttattttcggcatgatacttatgcggaccgcaaaattgcggaccgcttttcgcgggcttgtgactcatcggtacggttatgtcttggttcactaattgaatcaaaaattcaaatttgctgatccagcttcgggattggaactcttgcaggacgggatcccgcggggggttatttatgcaatcacacttttaaaattttcgggtcccgcgctagattgcgagatttttgaattttttcgaaaaaaacataaaatttaatcaaaaatttccaaaaatttttaggtagctgccaacttatatgaacgataggaattgagcataaactaaataatttaaataataattttttgcttattattttaattatttgtccacttttaattgtttgcccacttttaattgcttgtcgccctccaacaacgcttcaacaaattcctttgaaaaatcaatgcaattgttttttcgtaaatcgtattttctgctgctgaaagtgccctcctttaactgttcattttccatgtaaaagtcgttgaaatggtcaaaaatgttttgcacttcccattgacttttgtttgtatatccgatgcgatggaatttgct

SEQ ID NO: 44578 - DNA, 1476 bp, Heterodera glycines
  unsure (1)..(1476): unsure at all n locations
cggtgtagcgacggacggaggaacgcccaattcgatgtccggctctttcgcgtcgtcttccgcatcgtcggcatgtcgtgcagcgacttccagggccggccaccagcagcagcagccgcaatttgagcagaccaaaaggggcggcacggcacagccgggcgaagggaacgcactgatgccaaactcaccgtcctcctcttcggcatcgatgccgcaacatcagcagaacggaggtgagtgttaacgcgaagagagagtcggaaagccaatcatatgagttttaacattttcgagttttttttttgagtttccgccaatgtcggcacggaacttcgtttggatggtaccaacgccgtccaacagcagtcgtccgccggctcaaacagtgcccggttgagtccggacgggtcgttgcgaaacgctgcagccgccggatacgcagcagcagctgccacaatgaacggactcggcggcgcggtcccttccgcgtcgacgatgaacagcgcggcactgatgcactcactgggcgcggcacagcaaatgcattacggcatcgacccatagtgagtggggctgggactgttttggggtgtgcttcttcagcacttatatctctcctcgattcagctttggcatgtcccaagcggacttaagtgcgtacagtatgctaccgtcggctgcccaatacaatttcaatgtttgcctttttctgttgggaatgctaccgtaactttctgttaagcgttaccgttacccaccaaacattcaccaaacgacggcgactgcgtccgctttcccaactccgcccgtcagtggcgcagcaatgcctgtgccgggtgagaagggcaaagtgacaatgccaggaaatcggtgctttttcccaggctccggactgagtctacaggtgtccgtgctggccggacaacactcagccgcacatttgcacaatctgagcaccaacgaatggggcggcacttcgacggtggaccatccaagtcagtattggccccaatgaccgaacgaagggacaaatagcgaacggagaaagcgaaccgaccgatccatggacaaatcacaaatcaacagttgtttaccaaagattttcaaaaggtcatcgattcattcacaagcgtattgtgcttttcatatcaataaaatttgaaaatatattaatttaaatgtgttgcgctctttggacctcggcgggggaccggcagttcacgtccagtcagcagatttcgctcaaattaaaagatttgcatgtatggcaagtggttttgtaagaaagtaaaaggacaaagaacggaggttcgagtccgttggactacatgaatatttttatttatttttgtccaaaaagttctttttagctaacccttcttttttgcttttaaaaaccctttagattatttgntcgtaatttttgtctctatcgttatgcaaaatttgaagcggatttacaagtagaaaaaattt

SEQ ID NO: 44579 - DNA, 1554 bp, Heterodera glycines
  unsure (1)..(1554): unsure at all n locations
cgcgaaccaggtgtacggtattccgcaggccaacgatgccggcgtgtacacgataccgttgagaggaggaggtactgtatcttttttaaacataattgctactgtattaaataagatcagtttttttttgctaattagttctaatttttttcattttccgcattttaataaatttaaattttaaaccaagttcaccaccaacataactttacattaaaaaaagggtatatcatatcgattacatgttttcttgtcactgatcatgaatatctccagctggtgggtcccaccctataatccggcccgtggccagaaaaaaattcggagggggtggagagaatccaaagaccttttaaaatttttctccattgtttttttttaaatttttagcaccagggagaaaaacaggcatctgtagtcgtttttcgccaaaaattactaattttttaaagtgccaacaaaaaataaataaataaaaagagcaccggcggtgcgttctgttccgccgattaaagcaattaaaatattgcctgattgcttaactaattagccattttgctttaatttttcgaataaatcgtcaaaatttaattaattgattattttcttttattttagagcgatctgtacgaattgaagttggcaatgagctgaagcagcgttgtgagaaggaaatcaagacaatttggctggaaattgttgaccaacagcgcattgatgagctgtccatggagagtcaattgtaagaaaaaatcagttaataaaaattaaattaaaaaaaaattaatgtcatttagaaacccttcgaatatataattttaaattcggaattgagacaacaaatttaataaataacaaatatccctcaacttttttgaaaaaaaaacctgtaaaattaagaccctcgtatatcatgactaacttaattcaaaaaagagaaaaaaaatctaattatgtttaaaataatatctagtattttaaaaattaatttcaatatttcgtttattgaagaaaaaatgtctcaaaagcccaaaaatatattaaaaaaaaatgaaaaaatctgcacgaaaaaaaacatttgatttaaattaattaatttatttaatgaattcctaattaccatacccttaattaatttatttaatgaaaccctaattaccatatcccctccccccatacagtaactccgtgaaaagcctgttggccaagctgaatgtgcggcttgcggacatgcgcctgtttccgttcaactatttggacacgtatcgtaccgtgacggagattatgcacgaattggagcagttccagcaacacaaccaaccaccgacaaaaattcatggccaacaaattgtgtacacggtgaacatcagctgcggcgagctgaacgagcagtccagcgaagtgataagtgcggccatcgagaatgngctgagttttcaggtagacaaaaggatggaanatagtgtttcttanaaatgccatttactcgctgccgaaaattcaggaaaaattaaatattgaaaaaaattaagaaaattttanaatgaaaatttt

SEQ ID NO: 44580 - DNA, 1309 bp, Heterodera glycines
aacggacacttgaaaaaatcgatttttttgttttcggggcagtccccccgagccgatgcgcctagatttatggggagaccgaatccttccggaatagcttccctatagcctgtactttaattctgcgttggatttttgctccccataattgtttgagtaccccaaacggacacttgaaaaaatcgatttttttgttttcggggcagtccccccgaaccgatgcgcccagatttatggggagaccgaatccttccggaatagcttccctatagcctgtactttaattctgcgttggatttttgctccccataattgtttgagtaccccaaacggacacttgaaaaaatcgatttttttgttttcggggcagtccccccgaaccgatgcgcccagatttatggggagaccgaatccttcgggaatagcttccctatagcctgtactttaattctgcgttggatttttgctccccataaatgtttgagtaccccaaacggacacttgaaaaaatcgatttttttgtttcataaatatttttttcagaaagtcatgcgcacccgtccgatctggcaagttaagcaacgattgctgactagccaaaaggttcggtgccgtgatgaaacgaaccagcactgcttaccccgcggcacccgaaaaaatgtaggcttaacttttttagtgaaaattcgatcactcatattttttgctaattgagcagaagcgtaccaaactttgcagggatactccccggtaaaggactaacttacactgaaatgagcgccgagctagctggctcaaaaaaattttcgaaaatctgagtctttcgtttttatttattttttgcaaaattaattcttaaatattttttcagaaagggttctgaaacgcaccaaattttatttacatgttagtttaggcactctgatgctttttctatcaaaaagggagatgaataaaatttttaaaaatttttaattcctttttaaacaggccaaaaagtttaggcttaacttttttttcagaaactgatcagaagcgcaccaaactttgcagggatactgaaaggaagagaaataacctattttaaatattatctagtcagttcatttaaataatttttatccaaaaaattttttttgggttttcggggcagtccccctgaaccgatgcgcccagatttatggggagaccgaatccttccggaatagcttcactatagcctgtactttaattctgcgttggatttttgctccccataattgtttgagtaccccaaacggacacttgaaaaatcgatttatttttgttt

SEQ ID NO: 44581 - DNA, 1068 bp, Heterodera glycines
  unsure (1)..(1068): unsure at all n locations
ctgcaggaaatgacagctctttttattggtaccagaatatcttaatacattatatacgaccagcttgccaaggcatgaattgagattgaagaacgctgttattgttatgttagttagaaacttgaatattaaagaaggtctttgtaatggtactaggttcagaattttaaaaatgttagataaagttcttcactgcgagatcttaacagggaacaaagctggcactaaagtgcttttaccaaggattactttaactgatgatgaaacttttcctttttcaatatcacgccaccaatttccgttaaaattatcattttctttaactatgaacaaatcacaaggacaaacatttaataagattggcatagatttgcgaaataatgtatttcaacacggacagttatacgttggtttttcaagaacgagatcatgggatgggttaaaagttagattgcatccaaaaaacagagatcataaagtgaaaaatatttgttttaaagaaattttaaccgattaaattttttgaaatctaaacaaaaagaaaaatagatttatacgttaataatctatgaaatgtaaatatattaaagtcagtatctgaaatcttaacaaatacataaatcacaaaaaaacctatttagtggtttaagcttgaatttttttggtaagcattttttaatatttgatcaatgtgtttttgtaaaatattccaagaatcaactttatatatatatcaggtaagttaatcgctacattattgggggtggtgtagcgtgtggtggggcaggcaattgtgccttttaaccatcacgtaagccccctttgatacccaccgctttggtgcgttctcgacgcgggtatcgttagtaagcttaatgccgaagctaaaaacaaagcaatttaaaattgaaattactaacaaaaagaaaaagagagnaagaaagagagtgagcccgaaaaatanatttttgaggatttgatttnncaattattttantttaaaattttaaacatgactttaacaaaaatcaaaattaaaatttttttactttttttttgtatgtttta

SEQ ID NO: 44582 - DNA, 1504 bp, Heterodera glycines
  unsure (1)..(1504): unsure at all n locations
ctgtccccacttcggtgctgcgaaggaaaagcgtagaagggatcggtcggttgttaccgcgggggcgagtcgacttcgacagtcggaggcaattgattctggcacatctgacgaaaaaaatgcctttttattattattatttgattccaataccttggcataacacggcgatattttggggttgaggctaagcattttctctcccgtcatcacaaatgcctcacagcgtggagaacgaatctgtgggcaaaaattgaatttgaataatttgtacaaaggcaactcttacaacaaaaatttaaaaaaagtctccggttagacctagcctaagcctatgtgcgagttggctttatacgattcagtctttttggccatccctcccccttttgccaattcaccgtcttcgggctgtccttttccgcactttcgctgtccccactcgtccgtcggccttttccatttggcgtcccattccgttggcaattcgtcgaaatttcgctgcctccccccgaatggcttcttcggctacgacgtgcggcgtcccctccattttctaaaaacgagtgaatttgtgctccaattacaatttgcgggctttgtcatttgtattaggccctcggattttatgcaccgaaatgcgacaaaattatgaactctgatttgtatcatatggatttcaaaacatttctgaactgtgcccatccttaaaacttgccgaattgctccccgcccttcccgcgaatgagtgccatttggccattgctgctgctgctgggagtcggcgtgaacagaacttcggtggtcattcaatgggacacaattattaaaggggaggcccaagtccaatcctaaatttggtagaagaaaaaaccaatctaaattgaaatgattggaaaaggtaaaaaaatatttagcgttttataacagcaaaatggaaaagtgaaaatttgcataagccattgagcagtggtgaaaatgagcagcggtggcaaatttgcataagcacaataaaaaggcggcattgggcgacagataaaagacaaatgaccaccgattgcttttggcaatttataaaatccaaagggtcgtgggaatggacgcacaacaaaaaacaatgcaaagataaaaagtcaacaaaagtgatcaaagagccaatggtgcccttctgctgctgtccttctcaagcattcatccgaatcccaccatctaaacacatccaatcaattaaactttgcataaactttaatcaaagtcatccaataaacccacccaatcggatgatttcgccgtttaagtaatggttgtcgatgatatgctccaccaatgcggcaaattcttccggcttccccaatcggttcggaaacggaacagtgccagaaaggaactttttgacctgtgcaaaaacgatattgcgaaaaacccagaaaatattattgaagaaactnttggtggcaacgaggaaagcaatggcgtgtccattaagccgggagcaatgccatcacgc

SEQ ID NO: 44583 - DNA, 902 bp, Heterodera glycines
aagcacacatgcgagccctgatttagtttaataaccgattttgttgagatttctaagtcattttgaattggcaaaatgttttaataggttaaaataaaaatcctaaatttcgcgttagaaaagaaaagaggtcattgcctaaggcattaccaatgagaaaattgcctcgttcattatttatttgatggatgacaattgattggtgtcgtgctgtttaattttgggctccaagtacaaataagtttattatttatttagtaatcagaacgccaaaactttgcaaaacttaaaatttattggggattttcccttgtaaaaatggaagagccgatctcgagttagaaaatatactttcaaaaaacaaaatcgaattcgatagatggggtcaaaaaactagcctaggcaaaatttcaagaaaatctgacccgaggaaaatttttttgaccctagtgaaaatttcaataattttaattcttttttagccaagtccacaatttaaggccaaacttggaattcaaaattttttatgcaggattgcggactgggatcctgcaaaatcctgcgcaggatccggtcctgctccgggctctaggtaatactgtagatggtgggccccctttttggaagaaattttttttattctatttaacgacaatccagatttgtaacaaaatctgacgaaaatcctaaaaaagtcagattcgtgatcagtttagaacagggatgcgatcgaaaatttttcaaaatcaggacatcgggcccaaaaaatcagattttggggtcaaaaatcagaacattttgcaaaattgcttcaaatcttttatttttacaattagttcaggtcccggtccccgctcattctagtcgaaaactaacagcaccatcccggcagatccgcatac

SEQ ID NO: 44584 - DNA, 826 bp, Heterodera glycines
  unsure (1)..(826): unsure at all n locations
cgacgcatcaaacaggtggcgaaatgaaaactctctgatcagtcaatgctttaaatgttttgatcaatttcaggaactggcggagctgaagcaggaaccgatcacgggttgcaccgcggcaccgatggatgacggcaaagacatgttccactggaaggccgccatcaaaggaccgcccgagtcgccgtacgaaggaggcaccttccatttggacatcgttttccatcgcgactacccattcactccgccagttgtcaaattcgaaacgcccgtttaccatccgaacgtcaacaagcagggtggcatttgtctggacgtcctgaagacgacgcattgggcgccgtcgttgaccatttcgaaaggtgaaagcgacgcgacaaagagcagataaaacgccgacaaatatcgacaagacaaaatggcccaattcaaaacgaccgccaaaactgtattttttgtaaaaatgccgatattttgtcgtgtgaaaatgggatttttcaaattcggaaatgccgttttaattcattgtcccccctccatttcagtgctgctctccatctcttcgcttctctgcgacccgaatccgaacagtgcgctggagatggacatcgcgattatctaccgcaatgaccgcgagcagtacaaccgaaatgcccgtgaatggacgcagaagcacgcgatgaaatgagacgacaaacgaacgatggatgggagaggatgcagaagacaaccgccgaagaggaaggaggcggcggntnccttcncctgnccctcttcctcagaaaggccgaactgtatagattgtattattgtatctctactgtat

SEQ ID NO: 44585 - DNA, 1134 bp, Heterodera glycines
  unsure (1)..(1134): unsure at all n locations
tatttatcttttgcctccgacaaataaactatttttattcttcgttgtgttcaccattgaacataacaattaattatntaaaaatttttagtttttacaatttcaataaattcaaattataaaaatgtctttattatttgatcatttgtttttataatttttttttattatattcttaattttgatgttattattatattttatttaaaaaaattttaagatgtaaatatttggtaattaattatatctattgagtcttgtttctattgaatactttttgcgattattatctcttttaataaatttaatgcaattcattaaagtttaaaacctttagtatattatttcatatgagttcgcttattttttactaaaatttaaatgtttgttaaatgattagtaatttttttcattttcatatatgaattttactttataaattttgatattaatcaactccttttcctagtgatttttccaagaatagttttttttgtttaaatttttaatcataaattattatttcttataatttttcacaattaatcgattttaaaaataaattaatagttacgcaatgatattgatttatatattttaaataaaattactttggaattatttattaattgctttagtcaatgtaattattttgtgtaaaatatttatttaaaataaacacataggccatttaatagtttttttttaaaaagatctctttaatagctggacatactacccaaattttctcattttttatttgaatgagaataatattgaagaaatgcttatttttgacaaatccaattataaagttggtctactaaaaaattaattaaaaaatgctgattttgaaatttttctgttgtgagccatgatatatcaattggagatgcaaatattcgaatatttctaatttatgattttttttgtcatttcgaaattctaatacacatacactccgagaaattattaatttctgctgtattcattttttgacaacttatctctgtggcttacgtccacaaaaagaatatatatttttatttggtttaaatttaaatcagttttaaaaactatgatttttaaaatgtaatacctaatgaaattattatttattttcattttttacat

SEQ ID NO: 44586 - DNA, 1246 bp, Heterodera glycines
  unsure (1)..(1246): unsure at all n locations
tttgtagagcccatcaaacacattggtgcttataggaatcgctacttgaacaataggggcctttttattacgattacaacaaatcagcacggcgtctcgccgatacggtatgtttcagttaaggtttagccgatctacaaatttcggcactgtctattttgtaaaagcgaatcaaattcctttggattccaaagtggaattacagaattgcgacggcaaatcctaaatagacaacgacgctttcattataaagctttaagggaggaaaagtaatacgaatatttcaatttcttacttatccgaatagacaaagataggttacacacgaacatttttatagaaattccggctgaaactaaaatccctcttttggtcttaacctatgatttttggcccattatggatgaattaagtatagaaggcgtcgcagaaatacattcatattttctaaattcgggtttcagaaaattaagatttaaaagaggctgaattacagatgcttttcaaattttgggtgtatccgaatagaaagaagttggaaatcagtacttttcacgcctataaaattcggccgaaaaatattggtgtttgtgactagaaaaatagcagatgcatatcaaatgactacagaaaattacagcctccaagaaaataattgctttgcacaagcaatattttgtagagcccatcaaacacattgtgcttataggaaaggcagaattgaacaataggggcctttttattatgattacaacaaatcagcatggcgtctcgctgatatggtatgtttcagttaaggtttagccgatctacaaatttcggcactgtctattttgtaaaagcgaatcaaattcctttggattccaaagtggaattacagaattgcgacggcaaatcctaaatagacaacgacgctttcattataaagctttaagggaggaaaagtaatacgaatatttcaatttcttacttatccgaatagacaaagataggttacacacgaacatttttatagaaattccggctgaaactaaatccctcttttggtgtaacctatgatttttggcccattatggatgaattaggtatagaaggcgtcgcagaaatacattcatattttctaaattcgggtttcagaaaattaagatttaaaagaggctgaattacagatgctttttcaaattttgggtgtatccgaantagaaagaanngtggaaatcagtacttttcacgcctataaaattcg

SEQ ID NO: 44587 - DNA, 1082 bp, Heterodera glycines
tccccttcatgctcgagagcatttgtatgtgtataaaatttatcaaaaaaagagatagccattttctgggatagagtataaatataaaaattccctcaaaaataaaaggtctattgcgcaccgccctcccctatcatgctcgagagcatttgtatgtgtataaaatttatcaaaaaaagagatagccatttttctgggatagatataaatttaaaaattccctcaaaaataaaaggtctattgcgcaccgccctccctatcatgctcgagagcatttgtatgtgtataaaatttatcaaaaaaagagatagccatttttctgggatagactataaatataaaaatcccctcaaaaataaaaggtctattgcgcacagccctccctatcatacgcaagagcatttgtaagtgtataaaatttatcaaaaaaagagatagccatttttctgggataacctataaatataaaaatcctctgtgaaataaaatggcgattgtgcacagccctccgtctcatacgcaagcgcttttgtgaggtataaaatttctcaaaaaaagagatagccatttttctgggatagactataaatataaaaatcccctcaaaaataaaaggtctattgcgcaccgccctccctatcatgctcgagagcatttgtatgtgtataaaatttatcaaaaaaagagatagccatttttctgggatagagtataaatttaaaaattccctcaaaaataaaaggtctattgcgcaccgccctccctatcatgctcgagagcatttgtatgtgtataaaatttatcaaaaaaagagatagccatttttctgggatagagtataaatttaaaaattccctcaaaaataaaaggtaaattgcgcaccgccctccctatcatgctcgagagcatttgtatgtgtataaaatttatcaaaaaaagagatagccatttttctgggataacctctaaatataaaaatcctctgtgaaataaaatggcgattgtgcacagccctccgtctcatacgcaagcgcttttgtgaggtataaaatttctcaaaaaaagagatagccatttttctg

SEQ ID NO: 44588 - DNA, 1393 bp, Heterodera glycines
  unsure (1)..(1393): unsure at all n locations
gttttgtaatcattgtaactgtaaattgcaattaaagcgtaaatatatggttgtattttgtagcattttttacgaggcttcgaatggtatatatcaatactcaaatgaatattttacccaaacacntgtattttatcaaatgaattgcacaaattatttctggtaaaattatccagatcccaaaaactttgaaactcgggaaattgggttggaaaatttttctggacaaaatgattaagccattatgaaaattgatcatttttatggtcgtcaattttgactccacctctatctcagcgagtattagtcgtagaccaaaatcaaaaggcaattcgatagagaattttaaaaagcgacgatttaatattgttcattatctcttgcgaaatgtcaggtgtaaaatgaaatattgttcttgacgcccgactacaggtgcaaaattctctctaaaagttaatcttttaattaaattcttttacaatagttttggtgcttttcaatttcatttctatgcatttttgacacattagacccaaaagttgaaattccaaaattttcaacttttagatttttgttcaaattcgggtcaggaatcctgtattgatcgatatgcgccgacggcaaaatttgaaattatttccgaaatttatttgcaaacttatctgtagcacaatgaaaaacttaattatgcaattaattaattactgattggattaatcgtttaatttgctcataaattactctaattaaaaaccctgaacaattcccatgaagttcatacttaactttgataggaccaaatttcgtcaactccaacggcactttcctaaattttctcttaatgaatgataatattataataagtaattcgtttattttaattaatacattgtgccgtttgaaacagcgaaagtagtaagaaaaaacataaaaacaataaaaatatgaataaaaagcattgatacgttattgaaaaataataataataattaaatattacaattcaaaaaacgaaagattatccatttttctcattttagcaaatgaaaatcgctttttaaacaaaaaatgggtgtgaatcatcattgaataatgaatgaacaaaaaaaatattcatatgttataagtaaattacgaaaaaagaatgttattggaaaaaaaaataattctagcggaagtcaaatgcaaaaaggctttacacaaatcatttaaaaattgctttttaaaaacgctgttcagaaaagtaactaattaattattttagaaaaaatttaatattacataaaattttcttaagataattaattgattaaagttttaagcaaaatttgccagatcttatggaattgctatgtgaaaaaatttcgtgaccgtaattcgcgtaaaaaaacta

SEQ ID NO: 44589 - DNA, 2412 bp, Heterodera glycines
atttgctaaaatgttgggaagggacgaaacacaactaccaggccaactcttaactgctccgacttgtaaactgtttttcggccaaaaaacgtagtactttttcaaagccaacaaaataaaatacaatttgaaattcaatcgaatattttggttagatttttgtcagatgatttttgggttgaattttaaaacaacatttaaaggaattggttgtccaacagtatagacaagttcgtctgtagaaattgtgaaaattccgataattctagcaaattcggttttaattgtggaatttttttgttgtttttccactaaaaatagagttaagctctaatctaaccctaatggccaataaaactatctttttaatcccaccaaacgcgcaaaatttttttgttccaatttgcagttacgtcgaccaacacgtcgtccaatttctccaccgcattcgccgccttttcgactccgtcccgacaaacctttacattgcgaccgccgctttggccgaaactgtctaccgcctgaagcacttcgtccgcagttgcgaggcgattcgccaacacattttgccgctgctccgtgccaatgtccgcgccctgtttttgtcctctcccattttcgaccgtttgatcaaattctcgccctcctttctcgtcgattgcccctctctgggaaccatcgattcctaccaagtttttccctacttcaatgacattaatttggccatcgtttcgcgtggacgcgcggtgggccaatggttggccattccgcgcccggacgactgccaaaagtgtgaaattgtggctggtctcccagaaaaggatgggcactcaaagaggggggcaaaaaagtgcacatcactggcaccatttataaaggtccttgggtttacacaaccataaaaaatcttacatttacaatttttgtaaagtttttggaaaaattttagcatttttttgggaaatattttttggaaaaaacaattaattcctcataaaatggtggataaaaaaacgttaaaaatttatcaaaaaaaaaatttttttaagttcttgaaaattaatgaatttcaaaatttcaaatggtttttttttttttttggggggggggggggggggggggggggggggggggggcccccccccccccccccccaccacggaacccccttgaaaaaaatttttggggacaaaaaattggtgcgcccacaccccgccccccaatctaggtttttttaccacggtgggggggcaaatgagaaaataaggagggggggggggacaaattttggggaaaattaaaacaataaattttttaaaaaaccctaaaaaaaaggggtccggatttttggaaccttcaaaaacaaagtccttaaaatttgatttttttactttttctttttcccattttccaaagctttttggcttcctcctcttaaaacgcttattgatggccatcttcaattttttggccactgctctttttttaatgtttttttgcctaagttttggtatcaaaagaacgcttaaaatctcagaaatttttaaatattaggatagcaaataatggcattaagaaaactaactcaatgagaaaatatcaaaattcagctttttagaatatattcatgagattgaatttttgtctatttcatactttaagctgccgtttgatccaacttaatggggaaaggatgatcagaaattgtttttgaaaaatgtgaaattaaacagatattgccagccgtccaaaaacaatgtccaccaaactgtgcatcaacaacttttgcctttgcccccctccaccaactcttcctccaccgcttcgccgtcctcattctccgcgtcgtttcaaacgccaaaaaaacgcaaactcaaggtgattattggtagctatattggcaatactttcgttgtccgtcctttttttgtttaaaaaatattaaaaaattgttttctgcggttttcggaatggaatcgcttccctagcttcgggattcttgttagccgggaggaatgccatttatgatcagcgtctctgacccggaaacataatttgttagggttttgacaaaatgaaaattcaaatgctttgttaattatttctctccccccaattttcattactctctgaagaatggaattggcttcaatttcactgattagtttgacaaaagccaaatttttcgtttgtcgtccttttgtcgttcgtaaattatgattattggcccgggccatttttaccgtttcgactctcttcgtcttcatataataaatttatccgtaaaataacatttctttttcaaaaaatgacattcttttcgctatattttcactagtaggtaataactttaactttcttttacagtttgaaaaagatttcaggagaacgccgaagagaaagcagagggag

SEQ ID NO: 44590 - DNA, 963 bp, Heterodera glycines
aattaatttaatttttccaaaggatgtttttttctaattttggtggcgctcactttctgcattttctccatcttcattctgatcccaaatgtgtcaggtaacaaccattaaaaaagcctatctattttttaaaattattgtaacttttcacagctgctgcctgcgagtcgcccaaatactccgccaacggttactccacgcaagacggatttttccactacaaaacttcttacattgttgaatttgcgatccaatgctctaacaattacaaggtttgcccatctttcgtaaatcgagaatctctcatttttattgttttcattttgagcattatttttgcttttttcaggacgcgccattctacgcactggtcggtgaaaaaacgctccaattggctgtgtctgaggagaccaacaagtaccaggtgtcctggcaattggaacatgccgattctggtgcacaaacattcgatattcgcgtttatgacgaagacaaattcgcggagcacaaaaaggtttcacttactttcaaatttaaaaatttacattagtcctacgaaaattttaaaatcttgttttttttaatttgtgtcaatttaaaaaaaaattctgaaaactctaaaaccactggatttttttctttctaggccgatgagtccggctcaagttctgtccaaccattgttcactgtccagcattaccacggcggcacctctcacaaaacgtggatttcctcagagtccgtcttccttttgttgggcgtcgtggcgctgtactttacgatgaatttacgccaattgttggccaaaagagactgactgaccaattggttgttgtccattctcccgaatttcacccttttaatccttcaatctgtgaaatgaccattttaagttattcctgacactttgggcttactcaatttatttgtaaccttttttggtggggtattttcgttttaaca

SEQ ID NO: 44591 - DNA, 983 bp, Heterodera glycines
ttgaataaatttacatatacaaatttttaattatattattaatttatttaaatgtatgagagacatgaaggggatgggcgcccaaggttcagatatgaacccagggtgaacccgatttcaccctgaaactacaagtgtcatttcgttgtgacaacgaagcgaccccaggagtttcaggggcgagagtagacagaataaaagatatgttttattataaaattatttacattaaaacgtatataatttattttataattgattaattctcaaaatatatttttatttcataactatattaatcaaaaattcaatagataaaaaacatgccatgaaatgatagaaaatatgctcttctaccattttggtgtacataaacggcatgaactttgctgatcaaatagcgaccgtgctcatccggtgcaattctgctgtccggatttccttgatcaatttggactgccaacttaaaaggcggattgatcatttttattagagcccggtaaaaaattttccggaggcgggagcaggagttaaaacttttctgggacgggagtcccgatcggggatcccataaaaatcccactgccgttacaatcccgttcaccaaaaaaaacgggtgcgggaccggaaatctcgtaaaaatcccgcggggatcccaatccccaggctctgattcttatttattatacagaatttcacgattccgttttttatatttcgcttttctaccggtttcggcttggtgcgtttgtttgcgcgttttctttgtgttttgccgtgttttttgcccgcttggatgatgttgaagtggttgtgaaagtcgaacttctattatcgtcgttgatgttcgacccagcaccgtcaagttcgacagttgcgccaatgtcgagaaagccatattcgtgtcatgttccgagtcattttgttctttcgtctcatcgattcgtaatttgcagcaattgagtcccagtcattatcctgaa

SEQ ID NO: 44592 - DNA, 943 bp, Heterodera glycines
  unsure (1)..(943): unsure at all n locations
ttttcttggtggtgtaattttctgtagtcatttgatatgcatctgctatttttctagtcacaaacaccaatatttttcagcccgaattttataggcgtgaaaagtactgatttccaacttatttctattcggatacacccaaaattaaaagcatctgcaattcagcctcttttaaatcttaattttctgaagcccgaatttagaaaatatgaatgtatttctgcgacgccttctatacttaattcatccataatgggccaaaaatcataggttaagaccaaaagagggattttagtttcagccggaatttctataaaaatgttcgtgtgtaacctatctttgtctattcggataagtaagaaattgaaatattcgtattactttgtctcccttaaagctttataatgaaagcgtcgttgtctatttaggatttgccgtcgcaattctgtaattccactttggaatccaaaggaatttgattcgcttttacaaaatagacagtgccgaaatttgtagatcggctaaactttaactgaaacataccatatcagtgagacgccattctgatttgttgtaatcataataaaaaggcccctattgtataattctgcctttcctataagcacaatgtgtttgatgggctctacaaaatattgcttgtgcaaagcaattattttcttggaggctgtaattttctgtagtcatttgatatgcatctgctatttttctagtcacaaacaccaatatttttcggcccgaattttataggcgtgaaaagtactgatttccaacttctttctattcggatacacccaaaatttgaaaagcatctgtaattcagcctcttttanatcttaattntctgaaacccgaattagaanatatgaatgtatttctgcgacgccttctatacttaattcatccataatgggccaaaaatcat

SEQ ID NO: 44593 - DNA, 917 bp, Heterodera glycines
  unsure (1)..(917): unsure at all n locations
tgaatagcagcgcaaaaattgggaataaaaaatgattgccaaaaatgcgctaaattgggaagcccggttttccgtccaagcgaaagttggcacttttaaaagtgccgaaaacttacgcaattaaagtgaccaacgtccactcactcatttttaacaatttttttttgtatgtgtcgaaattcgagaaacgctaaaattgagaaaaataattattttacacaataattgtttaaatattttatggaaaattattttatcttataatataaataaattttttgatttttatttattgttcctgaatttcatattggtaaggaatttaaaaaaatgatgccaatttagaaaaaatttttcgatgggtttttatttgttttttctattttaaaacattaaaaatatatttatctttttcctaaaatttctaatcaaaaagcgaattgcacaaatcatttatgcattcatcagcagtagtagtggataaaatcagtggatgtacaaaactgatacagtcagtcatatttttagcaatgtaaaagctaaaattatgcagttttccgtgaacaaattttattgcataaattaatttagcattgaaaataaataaataaagccgacaatgatgggttaaacaaaaacaatttgttggttaatactaatttcgctattcaatcattttgccatcagctttttatgtatgtgtgtgctttttcatcatcccatttattattatttgggaattagtccattttaatgatgacaaatagttgaagccacaaattttttttgtacaaactaattatgcaagattttgtcataataacaactttttttagatgngaggnngggggggcattaaataaagaaaattcaattttanagtcgaatttcttttgaatttgtaaagaatgatgtat

SEQ ID NO: 44594 - DNA, 907 bp, Heterodera glycines
cgaatgagtgaagagtgcccatgtactctacttgttcctgacacacttaaaaattcatgggtttttccaaaaatggcatttggcgggcggcgaccgcgcgtctcgggactttcttttattatggtcttatgagagaaaactattggagtttgtgaacgcatcggactcaaaacttttttatagttctgttgttttgcttttatgatttgttaatgagtgtctaattgagactccttccccccccccgcccatcggaatttcgtaatgattcggacgcctaataatccgacggataatagcaggtggtgggtttttcgtcgtttagctcgaaaaagtagaaacacattaagaaacggatggagaagtttgggtgaaattagttggagaggaacggaaagttgaaaagtcccctccccaggccaacagctgctgaaaatgacaaatccttcgctattcgtcgtttaattaattgctttcatccaattcgtttaatttttaatttataaatcatttggtgataatctcgcgaagtcaaaaagtgcatatgtgttataattaaggttataagtttgtatgcactaaaaaaatgccaaatatgtgcataaaaatgcactaaaatctctcaaatatgcctcgaaaatccaaaaaatgcccaaatatgcatgcactaaaatatgccttaaaaactgctaaaaatggctttgatccctcaaaaaatgacaaaaaattgtgtaaaatatgctctaaaaatgcaaaaaattgcaaatatgcatttattcacgaaaatctctaaaatatgcttttatatgcactaaaaacgttcaccaaatcaaaaaaatttgtagaaatgctattttgaacccctttcttcatagaatatgcgcagaaaaatatgcaaaatcattca

SEQ ID NO: 44595 - DNA, 876 bp, Heterodera glycines
  unsure (1)..(876): unsure at all n locations
agttcaagcagtacagcaacaacaacaagttcaagcagtacagcaaccgagactccggacggtcagggacgaccgccgctacgaaatcgccgctatcgtttgttcgcgccgcgccgcagatggtcaaacgcgtgaattgaggatccattgccggtcattctcgtatcactatgatacatatgaagcagaagcgtcaatccaaagggtaaaatttttttttaatttgtgcataaaaataagcattaaaaaataataattcagcaagcgcctctaatccacgcggcgtggctccaggtccacgaccttgggaatacgccgccgcacaattttcaattttcgcgtcgtcgactttttgttaaataaattaattaaacattacttcgtaataattaattaattaatgaaagatgcgcaagcagcagcagaaggagaagaagcacaaaatttggcggaggcacgaggagaagaagcaatggaagaggacgaccaccaaaaaaatttgcaggggacaccagcagcagaagaagcagccctaatttttgatccgatgcagccgcaggctgcgtagcagcaatgatggaagtggaggaggacgacgacgacgaaattatctttatcactgaagtgcaaagagaagagccaccaccaccagcagcagcagcagacgaagtcattgtggacttacaactggaagcagcagcagaagcagttgaagcaccggtggccaatgaaactcaaggggaagagccaccagcagcagcaatcccagtgattgaggacgaaaactttatttgacttcattntgntaattnntttcattaattnngtagccattatatgtaaagtatttatttttttgtcacattaacatgatca

SEQ ID NO: 44596 - DNA, 1243 bp, Heterodera glycines
  unsure (1)..(1243): unsure at all n locations
caatgcttcatcacctgtcaatttcatcattgtctgtaggattaaaatgtttgctgttttgctcatgcccattgaattgaccaacggattcactggggagcgattgtcactgatgaaactgaatggcaaatatttggtgatccgttgtccgatttcacgcgatgagaccaaatggaagaaatgggaacaggaggccattgaatgtgatttagataatcagttgaacacaattcatattggaatatgtgatgacgacatcggcgacgggtgagtaataattaataatgctctaagaatctcgactcgataatctcgggtttttttttggctcgatcacgagtatcactaataattattactaatttgaatgataacattttaatgggtattttcattttcgcttttagtcttctcgatgatggaactcccggcccaagtgatcagcagaacagaattgtggagaatgaccgatcaacgtgatattggcacttgaaattatttagactatttgacataatttgttaattttatttttaaagattgctttcaaaataatattttactagaaattttaaaacttttaattgccataattacaaaaaaaaataaaatgacattttttatgtcaaaaaatgttcaaacaaattaacaccccccacatgacaatgcgcaattgttgagcaaatattgttgaaatatgaacagttcgcaaaggccgtttgccgcccatcgtcggcacattggcaactgatcatcacactgttgggctgatgacgatgatgcattgtcgttgatgccaccacattttcggcacgttcgcgcacaatggacaagcatgaaagaagtggagaacacggactcacaattgcctaaaatataattaacaattaattttaaaaatataataaatgaatgtattaccaatacttgccaaaaatggacaatcacttctctgatcaatgcaatttgcgttgttcacgtttcgatcactgattgctgctggtgcgccatttgctgctgtcaatgctgatgaatcaactgctggttgtactgaactgtcactgngaggcatttgagcttaattaaaaaaacaactttnaatgaggcatttaaagaattaaatttattttgaaaataaatatttttaaattgaaagttngngggcaatttcaaattttgtttgaattnttattctctatttcacaggagtgaattcctctgctattatgtgattgattttgag

SEQ ID NO: 44597 - DNA, 1194 bp, Heterodera glycines
tttgtagatcggctaacctttgactgaaacataccatatcagcgagacgccatgctgatttgtgtaatcatataaaaagcccctatgatcaattctgcctttcctataagcacaatgtgtttgatgggctctacaaaatattgcttgtgcacagcaattattttcttggaggctgtaattttctgtagtcatttgatatgcatctgctatttttctagtcacaaacaccaatatttttcggcccgaattttataggcgtgaaaagtactgatttccaacttctttctattcggatacacccaaaatttgaaaagcatctgtaatttagcctcttttaaatcttaattttctgaaacccgaatttagaaaatatgaatgtatttctgcgacgccttctatacttaattcatccataatgggccaaaaatcataggttaagaccaaaagagggattttagtttcagccggaatttctataaaaatgttcgtgtgtaacctatctttgtctattcggataagtaagaaattgaaatattcgtattacttttcctcccttaaagctttataatgaaagcgtcgttgtctatttaggatttgccgtcgcaattctgtaattccactttggaatccaaaggaatttgattcgcttttacaaaatagacagtgccgaaatttgtagatcggctaaaccttaactgaaacataccatatcagcgagacgccatgctgatttgttgtaatcataataaaaaggcccctattgttcaattctgcctttcctataagcacaatgtgtttgatgggctctacaaaatattgcttgtgcaaagcaattattttcttgtaggctgtaattttctgtagtcatttgatatgcatctgctatttttctagtcacaaacaccaatatttttcggcccgaattttataggcgtgaaaagtactgatttccaacttctttctattcggatacacccaaaatttgaaaagcatctgtaattcagcctcttttaaatcttaattttctgaaacccgaatttagaaaatatgaatgtatttatgcgacgccttctatacttaattcatccataatgggccaaaaatcataggttaagaccaaaagagggattttagtttcagccggaatttctggagggatgttcgtgtgtaacctatctttgtctattcggataa

SEQ ID NO: 44598 - DNA, 840 bp, Heterodera glycines
  unsure (1)..(840): unsure at all n locations
gaaaaagtggataaatttaactaattttaaaatattattagttaacgtgaaaaacgatacacgaatacccgaaaatggaaaaatgagtcaaaagaaatgttgtcataaattcttgtccactccttttcccctttgttgggaacaagaaaaatttaaaaaaaaaaacggctcacgaccgtgttttttctttaaaacatctatttttggcaaaaaaatgttgtgttgaacgtgaatggatataattaccctcataatatgcttataaatgtaccaagagaatgaatttttatttaagaaaataaaaacaatttttttncaccnttttttccnncccnccncanatntnnttcacttccancaccatncnntaattatttctaaatacaaaataanccactcactcattaaaattattttnaaaatttaattaaatttaaatttctnaaacaaaaaaaaaacaaacancnttttcatanccctcatccccntataatnccacctnaaaaaanaaataaaaaacaaaancaactacataacnaancaatttcactttcnanaacanctnntccattcattccctnaaatannnncacaatttaaataaaatttaaaanaataaattttttccntaaaataanaaatnaacaaaatttttcnncattatcncaannnaattaaanccaaaacaacacattcaattnanaaattcncttcattcannattcnnaatntaactnnatcttcaattacanaaatcaaagatccgtcctttctcttnnnancgaatgtttttcttatgttagtaaagatattttttaattactaatatatttttcaaaa

SEQ ID NO: 44599 - DNA, 1018 bp, Heterodera glycines
cgcgcccactacgaaacagggtactcagatggagagaatagatttgttcgctacatccaaatgcaacgtctggtgtaggaaggatgtagtataaaatgaatttttaacagccgcgcccactacgaatcagtttactcagatggagagaatagatttgttcgttacatccaaatgcaacgtctggtgtaggaaggatgtagtctaaaatgaatttttaacagacgcgcccactacgaaacagtttactcagatggagagaatagatttgttcgttacatccaaatgcaacgtctggtgtaggaaggatgtagtctaaaatgaatttttaacagacgcgcccactacgaaacagtttactcagatggagagaatagatttgttcgttacatccaaatgcaacgtctggtgtaggaaggatgtagtctaaaatgaatttttaacagacgcgcccactacgaaacagtttactcagatggagagagtagatttgttcgttacatccaaatgccacgttcaacgtctggtgtaggaaggatgtagtctaaaatgaatttttaacagacgctccactacgaaacagtttactcacgtggagagtagatttgttcgttacatccaaatgccacgttcaacgtctggtgtaggaatgatgtagtctaaaatgaatttttaacagacgcgcccactacgaaacagtttactcagatggagagagtagatttgttcgttacatccaaatgccacgttcaacgtctggtgtaggaaggatgtagtctaaaatgaatttttaacagacgcgcccactacgaaacagtttactcagatggagagagtagatttgttcgttacatccaaatgccacgttcaacgtctggtgtaggaaggatgtagtctaaaatgaatttttaacagacgcgcccactacgaaacagtttactcagatggagagagtagatttgttcgttacatccaaatgccacgttcaacgtctggtgtaggaaggatgtagtctaaaatg

SEQ ID NO: 44600 - DNA, 939 bp, Heterodera glycines
  unsure (1)..(939): unsure at all n locations
aaccaatcaatggcatcgtttgatactnttgtgaaaaatattgtttcaaacctgttggtgtgatccgaaatcgttcatagaatgcatgacattgttggtaactggcggtggtcttgggggtggctgatgccgagtagccaatgttggattttgtgcaaaaaacggtgtgttttgtgaaaagcctccaatattttcgtttgggtatttgctttcattcgccgaattcaccgcggttggcaccgttggaaactgctggggaggcgccggtggactttgctgatttatggaaaaattcaaatcggccatccacccaatcgtaaaatacttctttttgcagttgaatgaccgtcggtggagttggcggcggcttcccgcaactattcttgaatcgagattggtgcccaattgatggcttgaaaggcatagtcggatcgacggaagacgtctttgattcagtgctggtggaaggccatgaattgtccggcagagttggctttgattggaacagtggcggtgggggcggaggaggtggtggaggaggaggagacgccaccgaactcgccgctgttagcaccgactgtctttgctgcggagatgctaccgaactcgccgcggttggcaccggtggaaactgctggggaggcgccggtggactttgctgattatgggaaaattcaaatcggccatccacccaattgtaaaatacttctttttgctgttgaataaccgtcggtggagttggtggaggcggggtttcacgcgacttttcttgacttgggattggtgcccaattgatggactgtcctcccaaaaccaatccctgctgctcatcttaatgttgctaggggtaactttgtattaattaaacagatgctacttctgcgattgttgtgcatgtgcttgtctgattcgcgggttccaaatattgccttttttctc

SEQ ID NO: 44601 - DNA, 1030 bp, Heterodera glycines
  unsure (1)..(1030): unsure at all n locations
tcccattttggcgatgcattctgtgagcgcgttaccgcnnaagaatcgcagtgcaagcggaaagtaacgcgagaagggcaagaagactgatcagaatgccgtgaatgatcacaacggcatattgtggggggagaaatggtgtcaaaagtagtctctgtttaaaattttgaattacagccattttaattacaatttttaaaaaatctagtcaacagaatgtcaccggatgtgtgacggccattcggtattggttgatgtccattttgtaatatggaaacgtgttgttgtcgaccgatttgaatgaccaaactgcggcgacggtggacaaagcaatactcaccggaattatagtgattgaaaattcttgaactgctcgaaacggaaaagtccagcgattttctcactactcgacaccgataagcgcgagcagctcaactgctgccaattcgactggccattttgatcagcgctgtgcatgccaacagtttttgaagtttgacctcagttggtcctcccgttgagctgagtacaaggggtttctacaacagaaagactgtccaagagtgccaatgcgaacagtccgacgatgccgatgaacagcaaaagaccgatcatggcacttgaaagacctgaaataaaaggcaccaatctggacttccctaattacgtttcccgacgagcaaccgatgcagaaaaagccgattaaataataatgaaaatataaatatttttaattaatttgttgataacatattatgcaagttatatatttttgaagcatttatatgttttaatttgctaaactgaaaataattcgaagagtttatttggacggttaacatggaaaccatggggttgaagtgtgggttcggattgctgctgaatttatatagatagtctcagctattgtagtcagtttaaatttcaacatcatttgngcaaccatcacataattaattatttacccatttcctcgtccacccgttacggtgagtgtgcacagcagcgaggcggatagacgcaaatcttt

SEQ ID NO: 44602 - DNA, 930 bp, Heterodera glycines
attttgtcgtattcatttgacgccatttgaagcattagccccttcgaaatgcttaagcaaatgccttttttttcttttgccatccttcgaccgatccgtccaaagtttcaattcaaaggccaaaccaattaaccaccatccctttagtgaataaacatcaattaccgtactaattaatgactattcgtcttcccttcacatttctcccccagcgatgaattgctctggcgacgccccaattcctccgcaaatgatttttcgttggacacacaacggaagcgtggccatttgttattccattgtccgtttttaactatgcaattatttgtggaggggcggggaaaatgaaagtgccaaattaatcatctcttactcagagaatgacacagagaatcattttttatttttcaaaaaaggtttttgtgatcgctttgtttggcaatcttttggtgattgctgtgttaatcaggtaaattaatggcttttagagaagcatagagaacaactgaccagacgaactcatctgatcagactattctgctttttaccaaataaataatccatgttcagaaaccaatgcatcaaaaaacgacgagtgaataccattctcttccacatgacaattgctcagcttctcggttcgtcccaatttgttttggctaattgtcgtccatttccattttcatttccaatttttctgtcaattccctccgttcagtgactttggtatatatccccaaagaaattgtgcacaatttgaccatcgcgtggctctggggcgactttgtgagtgttggtgaggtgaatgcaatttctgatgtgctctccccgttttaacagttgtgccgattctgtaaattcttcgatgtcttcggcgtaacactttctgccggcattttgatttgtctgagcatggacaggtgccaatgc

SEQ ID NO: 44603 - DNA, 726 bp, Heterodera glycines
aaaagtaaataaggctctctgatgcttttctatcaaaagggagatgaataaaattttaaaaatttttaattcctttttaaacaggccaaaaagtttaggcttatattttaaaaagtttcatcgaacctagcgcactaaaatcgatataatctctccaaattttgcaggccttctccattgtaaaggactaacttaacctgaaaaaatgccaacgcttgttgtttttaaaatttttcgaaattctgactttttcattacttatttattttttgcaaaattaattcataagtattttttcagaaagtgctctgaaacgcaccaaatgttaattaaaagttaaataaggctctctgatgctttttctatcaaaagggagatgaataaatattttaaaaatttttaattcctttttaaacaggccaaaaagtttaggcttatattttaaaaagtttcatcgaacctagcgcactaaaatcgatataatctctccaaattttgcaggccttctccattgtaaaggactaacttaacctgaaaaaatgccaacgcttgttgtttttaaaatttttcgaaattctgactttttcattaattatttattattttgcaaaattaattcataaatattttttcagaacgtgctctgaaacacacaaaactttatttacaggttagtttaggcactctgatgctttttctatcaaaaagggagatgaataaaatttt

SEQ ID NO: 44604 - DNA, 1054 bp, Heterodera glycines
  unsure (1)..(1054): unsure at all n locations
gttaaatttaaatttattaaacaaccaatttaaaaaagccaaactcgtatccagagaaagagaaggccggaaaaatntttntaatggacaaatttttgaaatttctatgatatttaattaaaattttccgtcggcgcctataggtactgctgggccccattgtaccattattttttgaaaatttgaccccagaatggcaaaaatgggtcatttttggcaaaaaaaaaaccgcgacaaatgccagttttttgcccggctgttaaagtgcaaaatattttagaattttaaatttatttttggctttgaattctactcacttaatccgaagtttgtccccaattgaaagcttggaaagtgcgtccatcgcctttgtgttgctttccgggacggccaaccaactgagcacttcggtgaagccggcatcctccacctttcgagactggcacagaaattgctcaccgccaatgtcgaaactgtcaaaagtaggtggaacggtaacacttaattataaattttacagaaccatccgtaattttatttaagaaattaatgtttttgggtccggcggtgccgatgggtgccgccgcaagaaaaaccgagaattttggccatatttttaacaaattttcaccaaaaattgataattttttggattttcggaaaaaaaacttttgtttcggcgagatttcagcagcgagattttggggtttattcattatccacccattttttgttatttaaaattatgcaattaaatgatcttacatcacacttttgagcatgtatttgcacgggcgcataagcgtggcgagaaaatggtacgcaatttgttcgtaaagcgcatgcgcatcttcgtacaagcatttgtccacttctacgaagcattcatttattaacaataatatgcaaaaaacgcatgaaaaggaggggggggggggggtcagcggaagattttgcgaggtcaagaaaatgttggaatttttaaggaattttctaatttgtaagaaaatttgtacaatatacaaaatgttttacctctttcccctcttcgccg

SEQ ID NO: 44605 - DNA, 1002 bp, Heterodera glycines
  unsure (1)..(1002): unsure at all n locations
gtggncccgttgattgagtatgtgggcatcgatgatccgaccattgtattcaacgcgatcttcgtcaccatggtattgcttttcgttttttccaaatttgcagtattactccgctgctccgtaaagttattgcaaaaaataatgggtgcatctttgaaaattgctcccatagatacccttggcttttatgaattactggaccaaatacctcaaaatgggtcatagaatctgtgtaaaatgctctttcgcgcactaatacaccgtttttctgggggggggggggcggtaaggctttggctaaattcggaaaattgtttacaattagttcgtgtttttcaaaaatttggaaagggccagacatagcgtcattccggatgtattcattcctataaaaactcattttttcccgtctcgctgtttcagctcgtcttcggctccttcaccatgtccgcgttgtacgccgattcgaccaaataccttcacttgggaggtgtgagaaataaaatactaggaaattttgttgcggatgattcttttttgctcatgcatttttttcaaaaaacttggtgaaaatggtatccgtcagttttacaattcccaagaaatacgggcctgaatggggaaacagcaatttgaggttataaattcccctatttttacaggtatcctctcatctgcactgttttgcatgctgatcgtcctgtacgttttcttttccgtttcagaaaattacaaagaaaataaatgaaattttttggtacattcactaaaaggagatgtggaggggggaactcgacaagaaaatcaacgactttctttgggcggaatgaatcgtactttttccagaattgttccgcaaaattgagcaaaaaatgcttggagaaaccaaaaaatttggaattttgaattcggaaattataattctctattcttttttaggcttttcgccccgtacactccgttcgaacgctcgttcatgctctgggccgggttggcgatcaa

SEQ ID NO: 44606 - DNA, 1051 bp, Heterodera glycines
tttttattgaaattctgaacccgtttgaagtaggattagactagaaaaaaatgaaaaattttgaaatcatgttttccccctcccttttccccgggggtatttttttgtaaagtctttttttccccaataaacttttcaacccccatttttcgcaccgtgaatgttatttttattgaattctgaaccgttttgagtagattagactagaaaaaattgaaaattttgaaatcatgtttcccactcccttctcccaggggtattattttgtaaagtcttttttccccaataaacttgtcaaaccccatttttcgcaccgtgaatgttatttttattgaattctgagccgttttgagtagattagactagaaaaaattgaaaattttgaaatcatgtttcccactcccttctcccaggggtattattttgtaaagtctttttttccccaataaacttttcaaaccccatttttcgcaccgtgaatgttatttttattgaattctgaaccgttttgagtagattagactagaaaaaattgaaaattttgaaatcatgtttcccactcccttctcccaggggtattattttgtaaagtctttttttcaaaataaacttttcaaaccccatttttcgcaccgtgaatgttatttttattgaattctgaaccggtttgagtagattagactagaaaaaattgaaaattttgaaatcatgtttcccactcccttctcccaggggtattattttgtaaagtctttttttccccaataaacttgtcaaaccccatttttcgcaccgtgaatgttatttttattgaattctgaaccgttttgagtagattagactaaaaaaatatgagtgatcaaactttcactagaaagttaagcctaaactttttcccaaagttaaaaagcaattaaaattttattcacctccattattgatagaaaaagcatcagagtgcctaaactaacatgtaaataaaatttggtgcgtttcagaaccctttctgaaaaatatttatgaattaattttgcaaataaataaaaacgaa

SEQ ID NO: 44607 - DNA, 854 bp, Heterodera glycines
  unsure (1)..(854): unsure at all n locations
caaaccccagattttgaatnccggttttcagaaaaaatgccttgtggtgaaaacaatatttcacatttcactccataactttgtgagttcggcacggatcgagaccgggataagaccattggaaagagcagctcgagctctacaagaaggtatggaaagaaaaaatagttatttctgggactttttcagaaatcagaattaattctccaatgtggcccaaattttaggcccccagccacagccccttgcttctcccagttttaagtcttggatttgtcaaataaattcaagacttcaaaataataatcaaaaattctcttaaaatttttttgaacccaattcaaaaaaggaaaaaaatttgcagtcaaaaaattattcgaatttctccaattttgtttccataatttccgaaagttattcggtatcataatgccaaaacaaaacgaaatcgttttaaaatattcctttctggacttgacttggtttcttgatatcgaagctgttttctacgctatttctaaaacggttataccaaaccccagatttttgaatccggttttcagaaaaaatgccttgtggtgaaaacaatatttcacatttcactccataactttgtgagttcggcacggatcgagaccgggataagaccattgaaaagagcagctcgagctctacaagaaggtatggaaagaaaaaatagttatttctgggactttttcagaaatcagaattaattctccaatgtggcccaaattttaggcccccagccacagccccttgcttctcccagttttgagtcttggatttgtcaaaaaaaatcaagacttcaaattaataatcaaaaattctcttaa

SEQ ID NO: 44608 - DNA, 1566 bp, Heterodera glycines
taagaaaaatgagctttttatcaacaaaatcaaataatccaaaaagagataatattatatatattatttaatcgcaattcaaataatttaaaaattattcaaaaacagtaaagaacgtgaaaaaggaaaggaaaaatttacagccagagattttgttaacaatgatgatcaggcatgaattaaaaattcataaataattgtgataattgacgatgcctaggtttttccttaacaaaattaacggtaaaaaatttaacataaattattattgtcgcaatgtaaaaattaagttggctattattttttcaccaaaaaatttattattcggtaaatttttgtttttctttgatattttgtcaaaaatattttgaaatattttaaattttcatgatatttagtcatttaaaattgaattttaaattacaaccaaaggaaaattttttgaaaattttggtttactttgttaacaaattatgccaagaatggtcgatttttatgagtatttttgtttaaaaagctttatcacaaaagaattaccgtatttattgatagaacccccctctgaattataacccccccaggaaaattttttcccaaaaaatacaatttttttgtaccaggtattttatattagatatattccaccctatataaataaaggggtacaatttaactaaatcttaacctgaaattttggaattaaaaaaattaattttttttttgcccatggaaatataggcgtgtgtgtgaaaattcataactaactcaatgttgaccaatatagtgtaaaatatctataaaaatagagaaaaagctggaggattttatgctttttattagaatttcttctttcaataagaaaaaattgttacataaatttttgaatatttcaatttttcaaaaatgttaatttaactattctgaaaatgtttttggaaaagaaatataaaaaaccctcatttttttcctctataagtcaaaattgtttgaatttttatgcatttgggttatttttgcccatttttaactaaccgtgcaacttaatactgtttattggcctctgttaagcatgtacaatttttgagactattacaactccgaactgaataagaaaatcggcattttcattccttaatcggacaagaattttgaattaacctcattgaatattattgaattttaagaaatcgatttgagacaaagctgtgcttcaattgatttgagtatacagattccattcgttatttttgttatccattttacaaaatttcagaccgttgaaaatcattttattaaggtattgccgaaattgaaaaaaaaataattaaaatccctgaaaaatttcggtagttttgccaaaattttacaaaaaaacgtcattttttgttggatttttgaaaaaatgcaggttgaaaaatataacacccctctgaattagaatccccctctcgaggggttgaaaaataaaacccccgggggttatatttcaataatacggtaattaaattaattatctaatgtaaacattaaattaatgtatttttatagacgtttaaataaatcttt

SEQ ID NO: 44609 - DNA, 780 bp, Heterodera glycines
  unsure (1)..(780): unsure at all n locations
aattttttattccttttgcctgtatattaaatccttaaaatttagaaagacatttaaaaaaataactctaattactccacagtgtttaatcgtatgcaatgtggttaattatcattcataacattatcacgttgttgcttaaaccccctcaacatttcaatttttctcaattatgcccctgggctcatctttaattttttgactaaaattacaataaattttttatattccactgttttcaatactagcaaacttttccatatcacttaaaaggctgatattcctagtttttgttaacaaataatcttttttatatctagagcgttgaataaataggatgaaaatgttttaatcaaatattttacttttttctgcaccttgttttggagcagttacattaagtctatgttatagccagcatcctcaaacaaatttgatatcttcaaattttttattccttttgcctgtatattaaatagtcaaaatttagaaagacatttaaaaaaataactctaattactccacagtgtttaatcgtatgcaatgtggttaattatcattcataacattatcacgttgttgcttaaaccccctcaacatttcaatttttctcaattatgcccctgngctcatctttaattttttgactanatttacaataaattatttatattccactgttttcaatactatcaaacttttccatatcacttaaaaggctgatattcctagtttttgttaacaaataatcttttttatatctagagcgttgaataaata

SEQ ID NO: 44610 - DNA, 1004 bp, Heterodera glycines
gtcgtaatgccactgtccaattgtccacttctgtccaaatgaccttcactgtcctaatgtccactgtccaaatgtccgggagccaattggctaattttcagtgaaacctgtttataaatgatcaaaatttccaattttcccccggctgcgcctatcggcaccgctgtgcccccaaaactcccattgtttcttagaaaaatggcccaaaatcgcaaaatttggtaattttatgggaaaatctgtttccgcggcgccgcctgccccctcttcccaaagttttttggaaaaagcgcgcctcaaaaagttttttattcatttttaaaatttggaataaattttacaaaaaatgatttttgccttatgattttgactattaaaagttttagaaacaatttcgtcgcttttcacgtttcgcaatttcgcgttttttggaattttgcgtttcgcatttattttcatttcgcattttttactttcgcaaatttcgcatttctctcattttattttccgatttggcccatccctgttgcataatgaggtggagaattcgttcgaaagtgacaaattgggcatagactgatcggaaaaatgcaaaattcgacactccaacacctaaaataagttggttatttggacataaacttatcggaaaaatctgttaattagcaaactaaaataaatgattggacattcattaaccgaaaaatgaaatttcactccgatcagatcaccaaatgatcagaaaagattcaaacttagcacagagtgatcaaaaaatgtatagaacgatgaaaaatgaattgtcattactaaatgaattacaagtacatttaaatgttaaacctgatatcagatattcatattcgggcctagactgatcggaaaatttagaaaaaaaaattcctaaaattttttcaatgatcaattttgcagctttctaccgacggtgagaaaagcagcactagaaagtcaaacggaggcgaaaaaaaaagcgggggaatgaa

SEQ ID NO: 44611 - DNA, 1042 bp, Heterodera glycines
aaaaaatttaacgaatttcactatgaaaacttaaattctctatttatatatttgtatgtactttggcttaacaagaaaaaaggtgagtcaaaaaagaatattgttagtggacagaacaagactcaatttaaaaattttcaatataattgactcaatcttaagtttcaataagaagataaatatgaatctattttattcagaagaggagaaaattaataatacacaaaatagtataggtttgcacgtgctagaaaaagaatgaagttagtattataataatttagaaatcattttagaaaataagaaattatataagaggtaaaatttctcagaatcttattcgaatttttaaatcaaatataatgaataaaattaaaacagtatacatttgtaattttcaaaaattactaaaattacagaatttattttaacatcggcgattttggataatatttataatttcagaaattattcgagaaaataaaaggtgtaataattttgctaatgaaattataaaaaatgcatgcaatacaaaagtaaaattagtgaaaattttcactcataaaaccctaataataaatcgaattttaaacatatggaatcacaatctttaataagaaagcataatttaagattataatctcatgcagaaaaactacagagaaaagtcgcaccgaaaatttcgtttacccattttccgaagcatatacattttttaatcattcatttaatgaatcaagaataatattcacgatattaatttaataaagcaaatttaaggcgaaattataaaacatttaattttatggaaggattaagaaaaattaactaaaaaattcaacccaaaataaaaagaaaattaaaaaaaaatttcatttttccaaaaaaagagatgaactatacaaatgatgaaatatatgaaagcattgaatttatttaccttcgaagtaatttttaatattactttgacgtatttttttaagtttgtaaaagcccattaaaattatctaatttactgaaaattaattttgcattgggaaac

SEQ ID NO: 44612 - DNA, 735 bp, Heterodera glycines
atttcagcgtttttggaaaaatttttgaaactttctttttcactataaaatgactaaaaaatcgttgaaaatttttccataatttttttcttagattatcttataaaagaatttctaaaatttgtagaaaaattttgaaatttgaaaatcttggtaactccatagtttttgtaagacaatttttaaagttgggtgaaaaaaattcttcaaccctgaaacaaaaattttgagccaaaaatttggcatcattcaaatggtttttttatttttaggacaaaggacgtttttgtcaattcatttttaccccgattcgtttttgtctatatttaggtatgtacactggtggaaaaaatttttatgcaccacataattattttgatccactcattcattctgagcatgagtcgtttgatcactctttactcaaaaaagggaggaaaaaagtctttactcagaacatgaaaaaccaccttaaaattcatttaaaaacctgaaatatatttcatgctagcttatcttttgatactgatcaaaaaagtctcttacatcaacttgatcagatcactctttcatggtgaccaggaaagtcaaaaatggcttgaaattggggaaattttagaaaaaaattcctagggggttaggaaattttgaataggctcattggatagagcacaaaattcactacagaattgccttttggatggttaggctaacgatgtatactcgcttgagata

SEQ ID NO: 44613 - DNA, 488 bp, Heterodera glycines
ttccaactctaattaaggaacaaaattataattttacgttttggaacgagctgaaaattttcgccatttaatcacacaaaaaaacaaaaacatttaaaataaaataaattttaaaataacaaacagagacacatatccaaaattagaaattccttaaaaaatcatttttccaaattgaagcaaatttcttttttccatcttttcaaatttgcacttccaatttccaattttttggcaattattttatcactaatttttgggttcttttcaatcgtttcaaaatattgattcatttttcttaatttctcatcgttgaaatattttgcctaaatattaaaaaataataaaaaaaatttacttacttttataacaatttggcatcaattcttttttccattttataaatgttccttcaaaaatgcccaattccttcacaaattctttctgtttgcccttatataaacgtttaaattcatcaaatcgttcaa

SEQ ID NO: 44614 - DNA, 915 bp, Heterodera glycines
atgatttcgaaattttcaattctttttatgatattctactcaaaaacggctcgaaattcagtaacaataacattcacggagagaaaaatggggcttgacatgtttattgttgaaaaaaagactttacgaaatagtacccctggtagaagggagagaaaaacatgatttctgaattctcccctttttctagaactatatctactctgatatggatcataattccctagaaataacattcacttccgcataaaaatgatgatagacaatattattgaagaatcattgactttaccatgtaatacccctgctaaaatgtatcgagaaacatgatttcaagattttctgttttttttatttctaatctactcaaccctatatcgaaattccataaaaatttcattcacgatgcgaaaattggagttcgacaactttattggggaaaaaaagactttacaaaataatacccctgggagaagggagtgggaaacatgatttcaaaattttcaattttttctagtctaatctactcaaaacggttcagaattcaataaaaataacattcacggtgcgaaaaatggggtttgacaagtttattggggaaaaaaagactttacaaaataatacccctgggagaagggagtgggaaacatgatttcaaaattttcaattttttctagtctaatctactcaaaacggttcagaattcaataaaaataacattcacggtgcgaaaaatggggtttgacaagtttattggggaaaaaagactttacaaaataatacccctgggagaagggagtgggaaacatgatttcaaaattttcaattttttctagtctaatctactcaaaccggttcagaattcaataaaaataacattcacggtgcgaaaaatggggtttgacaagtttattg

SEQ ID NO: 44615 - DNA, 1162 bp, Heterodera glycines
tagtggtcaaaaagttcgtacatctactgctcgtcccccgaattggtcaacaacttacttggaatatcctctggcaattcagctgattgttgcgcatatcccaaatctgaaaaaacattgccgaatttaaattttgcggattttgtgtccaactttggccatgcaatcctcccctcccgtgtacatccacgcaccgtccacttggaagcccaccgaagtcacatttttctcatggacactgcagaaaaaattagaaaaatattgtacaatatttcttgggacgaaactaaactcggacttccaaattcgtattgataccccgaattgtgtaataaacagaaattgtattgcaaatcgcagtacgagttggattttatcattcttttgcttttaattagtgtacaattaaacggtaaaaaacaaatttgtgcacaaaattcaaaatttgtctgactttttgaccatttttaaaaggaatgtgataattttaaaacgaaaaacgattcaaaattatcataaattgacaatgcgttccctttttgcgtttcttacgaaaatgtgtgtagtccttgcgcggttggacattgcaaatcgtaaaaacgaatgttttgccatgcgccgacgagcagttgggcaccgtcgggcgtaatgcaaatgttgttcacctgggattcctgtcaaaaaaatggacatgaaatcggggaaaaaggaaacgccaaatttgggggtaaatttcatggatttcaaaaatagtagattttgttttcgaaattctcatccctaaatcctttaaaatcattgaattttcaccgtccacgcgcactttgtaggggagtgcctccaactgtttctgcgatgccacgtcccaaatctgaatatttttagcgatcatttaatgcgaatgactattaaaactcgcatttcaacaaaaatcctaaattcgaatgaggggaagaaatgaaaaagtttacccgaatggtggcatccattgcggcagaaaccaacattggccgtgtcattcccatggtaaaaatgtcaaaaaagcgaattaaaacagcaaaactttgtgtcaaagaaaatattcaacgaaaatattggacggttcggtaaacatataacaaaaaagaaaaacaattggcaaaaaatctttgtacaaaaaaaa

SEQ ID NO: 44616 - DNA, 957 bp, Heterodera glycines
  unsure (1)..(957): unsure at all n locations
tgctaattactcgtccaaaatgaatagatgagattactttgataataatctttaggggatattagcccatcaatttttaagctaattactggtccaaaatgattcgataagattaattggattaatatcaatcattaaagaattattagttaattaatttaattacccttatataagctgaagagtttccgtattagcatataaaatatatttatgggattttagcaaatttcctttcttgtagccgaaattttttttatgttaatgcattaaaacactgaaaaaatcgaaacaaataatttttcaaattcttatttactatatcagaaatataaaataattttgtgtgtaaataatttgacagaaatttgttatttttcacaaaaaaaatatcggaaatgtttttttttctttgaattattttatttaagtattttccggagaagaatgcacattttaacattttgccatttttttccaattttggcacatttttggcactattttgcgatgcttttttaatccatctaaatcccaattcattctgctggaaacgatttcaagaatgaccttgtacaaaaaccctcttattctaaggaatgtccttggaaataaggataataatttgccgcccccctaccattttagctgaaaagtactccgctggtgcttgagcagtccagcttatggtatctgaaatacggatcacacaaatccgcgcggcttcaaccaaacggcattccatttgcaatgaacgctgaaacgtcgtcattcaaacaggatgaagcctaaagaagacataaattgtgcctcataatctttgattagccaagatagaaattgatagattaatgggagatcagtagtacttttaattggatatatattaatttcctcacaatttaatggctttgtaaaatttgattggtccatttccatgcatnntggtaaaattta

SEQ ID NO: 44617 - DNA, 907 bp, Heterodera glycines
  unsure (1)..(907): unsure at all n locations
aattttgagaagtgagatagaaatgataactttcacgattcaaccaaattttcggtgctctaattanccgcgataaaaacattcgaatcaattaaatagcttctgagataataaggtttatcataaaatttcatttaaaaataaaccctcaattattggtatgaacgatactttccaaacatgcacacgttttgcgctcgagctattcatcatcgggcttgtcaatccaaagcgaaacaacaaagatgctgttttgaacgaataaagggcataggttattttgaagaagtgtcaaagaacatgcagcaataagcctgcaaaatctaataagtggaaaatacatgagtatagaatttattttcagaaagtgtcaacagacttttggaaaaatatatttgcaatttatcaaaaattttgagaagtgagatagaaatgataaacttcacgattcaaaccaattttcggtgctctaattaaccgcgataaaaacatccgaatcaattaaatagcttctgagataataaggtttatcataaaatttcatttaaaaataaaccctcaattattggtatgaacgatactttccaaacatgcacgcgttttgcgctcgagctattcatcatcgggcttgtcaatccaaagcgaaacaacaaagatggtgttttgatcgaataaagggcataggttattttgaagaagtgtcaaagaacatgcagcaataagcctgcaaaatctaataagtggaaaatacatgagtatagaatttattttcagaaagtgtcaacagacttttggaaaaatatatttgcaatttatcaacaattttgagaagtgagttagaaatgataaacttcactattcaaaccaattttcggtgctctaattaaccgcgataaaaacattcgaa

SEQ ID NO: 44618 - DNA, 610 bp, Heterodera glycines
agatatacttgtttaaatatctgatcaccataaaaatgatcaatttttgatcagcgccataactttttctaaaagcacccaataatggtatcatttgatagacctgagtgtcccctatttgcctttaaaatttcaaaaaatttggttgtgtttcaaaaaagttgcggcttgtaaatttcaaaaattgatttggtaaacctttttgaccacaacttctttgaaactcaactaaatttttttgtattttactggaaaatagaggacactcagggctatcaaaagatgccaagaatgtttaatttgggtgcttctataaaaagttatgttgcatgaaatttatcaaaatataacatggtcgtgtctttattcgtggtcgagtaaactgaaatagagcaaaatataatttaattatggtagcaagagctaattaatagattaaaaatttaaataattaattgatcattagaacaactcttccgtactgaaatgacccaccccctccgatcaccccacactcatacttttttcgcttcgcccacactcatactttttcgcttcgcccacactcatacttttttcgcttcgccacacgcatacttttttcgcttcg

SEQ ID NO: 44619 - DNA, 1230 bp, Heterodera glycines
aaaattagagtagagcgggcccgggaattttgggcaaaaccgggatcgggactagccgggacctgagaagccgggaccgggacctcgatttttcttcgggaccgggaccgggaccaaccgggaatttttaaaaattcaaaaaaattcaaaaaattaaaaaaaatcaaattttaatttatttcaagtgaaaatattaaataattaaatttttatttagttttttatttaataaaacccaaaagttaaagctaataaattaatgaaaattttcaaatcaaattttcttcatttctttcaaacaattaatcatttttggactaagtgatcgaatattattagaaattcagatttacgtttcacataaattttttcggcgcgctttttccaaaaaatttaggcgaagaaaggggtccggcggtgccgataggcgccgccgggggaaattttgaaaatttgagtgtaatttattaacagattttcaacaaaaaatgataaaaatgtgttaatttaaaaaaaaaactatgaggaatcatattttgtcgataggaaagccatgagtatacaaaaaaaaataaaatattttaattactgtagaggaattgaacaatgggaaagaagaagagaaagtcaaggagactagccagtaggccatttgcacaactggcagtgttacttttaaagaatattaattattattttttaatttttttccttttactccaattttcatcactaattttcactcagacccccattcttaccagtgattgtttttcccggttcccggttgccctaccgggaccgggacctgagcttttcaaaacccgggaccgggacctcggatgaccgggaatttccggcccggtcccggtcccgcttcactcttagtcattttcattaattagtttgttaatttattttacaaaacgaaaacaaaacggcggtgggaaaaaagaaaaattgaggagagcgaaaaaaagaaggggagagagagaaagaagggtgagaagagagaaggggtgagggaagagagaagagaaaagcacaaagaggagtagaggagggagaaataggcgggaaaaaaaggagaaagatggagaaacaattagagaaagagaggaaaggagaggagagaaaaaagaggattagaagtcgaaggagggagaagagagaagggaggggaggagagaaagaaaagagagaagacaaaacgaaagagaagaaaggagg

SEQ ID NO: 44620 - DNA, 1313 bp, Heterodera glycines
tcaagaattacacgaatcgcattaaaaagagcaaccccccccccatataaataaattcacatctgctggaagacgaaaacattatctgatcatataccagaattaaaattaaatactgatttttcttttaatacttttatattataaatataataattggaaaagtgtcaacaaaaaatattttgaaaaaataaagaaaattttatctaatcacgttaaggaataagcggtgagttattttttgatttaaaaaagaaataaaataatagattttgtatgtatattataaaaatttttatttaaaattaaaattcatttttaattaatgaataaatatggaactgtcgtataattatttaaatgccaatgtttaaattccaattcaattttttcacttacattgagaacaatgcttatggtaaaggttgaaaaaacactgaaatttaaaaatttacaattacaaatataattgattatatttaatagacttatttttgaaaaattctaaaatatttatgaatagtgaattagaaaaatcaaatgaattattttattatcaatctatactttctatttgggtaaaaatttatttaatattaaattatttaagcaatgaaagcgaatcaaagcaaaaacaattaaaatttaaaaatttatatcttcaacaataaagtctttagaaagtggtggcacacacagtagaagactatgacttttttatggagaacgaagcattttaaaaatttattaaataaaaggtactaaaattaaaatatgaatttactaataaagaaaatcaaaaataaattaagtacgatagaatttacactttaccatttgtttatgactaataattaattaccaactaatagaatttaaacgatcttataaaaatacccgcaagaaataattaaattaagtaatccctaaatatttggaataattaaaatctttcacaaaggaaataaaatggattaaataaaataaatcattttgaagattgtattaaaataacatttttgtgcgttaattttaaattttatttaatttcttattttgcaataaaagcattaattttttgaattatttatttattttataatttaaaaatctaaaaatattagtagtgataaataataaaaaattaaattaaattaaagtattaataaaaacacgaccaacgaaaacgtgcagagtctcatggacatgattaacaaaaactaaaataaaattattatcaataaagacacgaataaatatttatataatgaaccaaaaatgaaattaattattgaaaaaaatttaaaaaaaaa

SEQ ID NO: 44621 - DNA, 949 bp, Heterodera glycines
cagcataatgacgcagatactaattgttctggaattattttctcagcgcatttgatcgtgaaaattttggaaaaatggctatctcttattctggctacagtcaagggaattccaaccgcactctcagcataatgacgccgatactaattgttctggaattattttctcagcgcatttgatcgtgaaaattttggaaaaatggctatctctttttctggctacagtcaagagaattccaaccgcactctcagcataatgacgccgatactaattgttctggaattattttctcagcgcatttgatcgtgaaaattttggaaaaatggctatctctttttctggtctacagtcaagggaattccaaccgcactctcagcataatgacgccgatattaattgttctggaatttttttctcagcgcatttgatcgtgaaaattttggaaaaatggctatctctttttctggtctacagtcaagggaattccaaccgcactctcagcataatgacgccgatattaattgttctggaatttttttctcagcgcatttgatcgtgaaaattttggaaaactggctatctctttttctggtctacagtcaagggaattccaaccgcactctcagcataatgacgccgatactaattgttctggaattattttctcagcgcatttgatcgtgaaaattttggaaaaatggctatctctttttctggctacagtcaagggaattccaaccgcactctcagcataatgacgccgatactaattgttctggaattattttctcagcgcatttgatcgtgaaaattttggaaaaatggctatctctttttctggctacagacaagggaattccaaccgcactctcagcataatgacgccgaaactaattgttcctgaaattttttctcagcggatttgatcgtgaaaattttggaaaaatgg

SEQ ID NO: 44622 - DNA, 1001 bp, Heterodera glycines
  unsure (1)..(1001): unsure at all n locations
gtatttgctggtccgtaaggtccaaagcgacgcgttgttccgcgtaacagagcgaacgccacgacgcacgacgcgcagtaatcgcacctttgtaggcggtgccgagcaactcgcgctcctctctgttcaaattggcgtctgcttggatcatctgaaaataaaaaatgaaaacaaatcaaatgcaatgctttcaatcatcgaccacaccttcttcattgcctcggtcatgtcatcgtagcgtcgtgccttctcacaaactctggcaaagaacacaatgtcctctttggaatcggtgaccattgcgcaattcgaagaagccaaatattagcaacttaactattccgtcccgattaaagaacagatttcattaaatataaagaattgaaaaaatacaaatatttgctttccaaaaggaataagtcgtgaaattcgtttcccttttggggccatttttaaattcgaggagaatgaagacaatttagactaacagtatcaataagattttatcaataaatgctaattttggtacaaaaaagagtcgatggtagagtaatacataatggtgaattcagtttgtgttcgagttttagccggttttgaactaaaaatgcgaaattcaagaattttaagtttcatctgaagtttcaacttttgattcgaattgattggggttcagaattgccgaaaggttgtcaaattcgtgatcagaaataaaaaaaaagcattagaattttacgcaacgatttttcatgaataaatgtaaaaataaaaataaattgtgtagtacggtgtgaatgcaacgaaattagactgagggtgattgaagaaaactggcctcgttatatatacaattttgggctttagtccactcgacaacgacgcgcgattcaagcgtttttccatatttggcgcttcgaaccgcggcaatttgaatccgcgactgcgaaattttttgcgcgnacctatatgactggcgatccacggctttttcgggactaata

SEQ ID NO: 44623 - DNA, 457 bp, Heterodera glycines
  unsure (1)..(457): unsure at all n locations
atattacagatgattgaaaaagaatcattcatttctccacggattcattttttcagaattgtcttttaatttaaaaataattaatttatcactaaataaaggttgttttttaaggctctgtatttgtctcgccccactacagtttttacgccgtctttgcatactcttttttgcgtagttcaaaatctgaaagtgattttatgtttttttttctggctcacctaataattattcgtttgagccattctaatattgtgatttttttttttgcttttctaaattatatattaagtggggctatgtttagacttttgcactgactgtatacatatagataaattgttttttaaatattatgcaatgagaaaaagtgaagagcaaaggtcaaatcacacaataaaaaacngaataattgtcgggttaattcgggaaaagaaagtgtacctgggcataaact

SEQ ID NO: 44624 - DNA, 1085 bp, Heterodera glycines
  unsure (1)..(1085): unsure at all n locations
acattatgtgtcgttaattttatgctaattctggctcttttctaagaacccgtgcggaaatataaaagcaaggaagtcttctgctcgcctttgcagcctctgtacggcactggggccaacactttatgtgtcgttaattttatgctaattctggctcttttctaagaacccgtgcggaaatataaaagcaaggaagtcttctgcacgcctttgcagcctctgtacggcactggggccaacactttatgtgtcgttaattttatgctaattctggctcttttctaagaacacgtgtggaaatataaaagcaaggaagtcttctgcacgcctttgcagcctctgtacggcactggggccaaccctttatgtgtcgttaattttatgctaattctggctcttttctaagaacccgtgcggaaatataaaagcaaggaagtcttctgctcgcctttgcagcctctgtacggcactggggccaacacattatgtgtcgttaattttatgctaattctggctcttttctaagaacccgtgcggaaatataaaagcaaggaagtcttctgcacgcctttgcagcctctgtacggcactggggccaacactttatgtgtcgttaattttatgctaattctggctcttttctaagaacccgtgcggaaatataaaagcaaggaagtcttctgctcgcctttgcagcctctgtacggcactggggccaacactttatgtgtcgttcattttatgctaattctggctcttttctaagaacccgtgcggaaatataaaagcaaggaagtattatgctcgcctttgcagcctctgtacggcactggggccaacactttatgtgtcgttaattttatgctaattctggctcttttctaagaactcgtgcggaaatataaaagcaaggaagtactatgctcgcctttgcagcctctgtacggcactggggcccacactttatgtgtcgttattntatgctaattctggctcttttctaagaccccgtgcggaaatataaaagcaagaagtcttctgctcgcctttgcagcctctgtacggcactggggccaacactttat

SEQ ID NO: 44625 - DNA, 932 bp, Heterodera glycines
  unsure (1)..(932): unsure at all n locations
cccctcaccatttcatttttatcaattatgcccctgggctcatctttaattttttgcttaaaattacgatatttttnttatattccactgttttcaatactagcaaacttttccatatcacttataaggctgatattcctagtttttgttaacaaataatcttttttatatctagagcgttgaataaataggatgaaaatgttttaatcaaatattttacttttttctgcaccttgttttggagcagttacattaagtctatgttatagccagcatcctcaaacaaatttgatatcttcaaattttttattccttttgccgttatattaaatagtcaaaatttagaaagacatttaaaaaaataactctaattactccacagtgtttaatcatatgtaatgtgattaattatcattcataacattaacacgttgttgcttaaaccccctcaacatttcaattttcctcaattatgcccctgggctcatctttaattttttgcataaaattacaataaattttttatattccactgttttcaatactagcaaacttttccatatcacttataaggctgatattcctagtttttgttaacaaataatcttttttatatctagagcgttgaataaataggaggaaaatgttttaatcaaatattttacttttttctgcaccttgttttggagcagttacattaagtctatgttatagccagcatcctcaaacaaatttgatatcttcaaattttttattccttttgccggtatattaaatactcagaatttagaaagacatttaaaaaaataactctaattactccacagtgtttaatcgtatgcaatgtggttaattatcattaataacataatcatgttgttgcttaaaccccctcaacatttcaatttttctaaattatgcccctgagctca

SEQ ID NO: 44626 - DNA, 1600 bp, Heterodera glycines
  unsure (1)..(1600): unsure at all n locations
attcccctggggcaaataaattcatcctcatcaatgctccatccactttattttcattctccctcttaattatcccttgctgatccagtctttctttcagcaaaaatctcccgaaatcgcctccccaccagccacccatttctccacaataatctctccccccccgcccatcccatcactaagttgtccagcaattatgcaaatgtgtcccctctttctctccccatttttatctgttttttactctcctatgtgaacacaattcactcactcattcactttccaaccatttgtccttacgccgattaaagccaaaataacctttagaagccggatttggtgcaattgctggcagcagggcaacaaaaatgtcccgctgttgcctcttcctctgcctcctgctcttcccctgcttttccccgcttttcccttcccccgctcactcttcactaatgattgagggtctttttctaattgcttgtccctctggccaaatctttccttccaagtcgatttgtcttctccgcctcctcgcgatgtaaacaaatgttgtccttccattcggacatgtccgggatttccttctgcttctgatccggctactccccgcccatttatcattccccccccccccccctcttctcgctttttcctttcttttctcgccgcgtctctttttacctttggctttgctcttctttctgctgattggaaattcaatttttgaaaagatttttccttgataatttactcatttacctctttttttttttgtcctttttcggccttttccactcccatcgtcgttgatgcaaatttctctccccttctcccttttccttttcccctcaccctcccaccgttttccattctcttcctcttctttctttctctgtgtctctcttcatctcccatcatccttttccccttgatcctcttcttccgtccactccctcccatctcatcacttttgtttgcaagtcggcttttccctcctccgcttccatcagtggacaatggactntaacctgtcccctccctctccccccccccgccgctttggccccattggcaaacacaaaaacggtgaggctgagaatggccataagatcgaagaagacttctcggctaattatccgtggaaatcaccggccgaccaatcgaatgatttgtgagtgtgcggagtgaccacaccaccaccatcagcaacagaacaaaacatttttgttctttgtccgccctccgtccgttctttcgtccgtccgtcgctttgatgattttgtggccgctcttttctcataaattctttcatttttcaaaaaatctttgcggtgggaaagcatttgattttttgctgaaatccggaatttattttccattttttttattttcgattgttttgccatttctcttttggcactttcttttgaacttttcctttatttattcatttattattattattttctcttttaatccctctaaaaatacaaaacggaaattgcgcgattttgtgctattattcatcaccacacgacaaatttatttgcacttggccaatttatcctttcactgggctaattatcccttctgctgcgag

SEQ ID NO: 44627 - DNA, 1370 bp, Heterodera glycines
  unsure (1)..(1370): unsure at all n locations
tttgctctatttcttagcaaactttgcacaaaaatgacncaagtgctctatgaaaacaatatgcaattcgtaaactttcaattntatccagtgtaaatttttcacggaataaccgtgaattggccccgtgaatcgtgaccgtgactgtgagtgaaaaaggcatttatgtagagactacattttattaaaattaatatttttctatattaaatgaattatttttattaaatattttgtaaaaactatgaatggactaattaaaaataaaagaaaattcattaaataaataattaaggaccaaccgcaaatttanacaatgactgtgttattaacggagttccgttccaaaaggtagacttcatctcatcaccttaccaatttattcatctagcatgatagtgattattcaaatccggacaaatttggtcctgaaacgcattttcacctcttttttaaaaggtttatgtcagcgcaaaagacggcacttgacccattggcattttgacttttggcattggtccccgaaattgcattggaatgcgttttgccaaattaaaattgacatttaaaaataaccactttgctttttagcttaataaacccaaccttaaaatcaaggtgtgatccatttaccaataattagtgctatttatcgccattttaaattatttatgcttctttaattcattatttttttgttttttgaaatttcagaacaattctcattgagagttttaaggcttcatgcccctatttttggatttctaaaatgcaaatttcccaggctacatcgcgtcgcaatgcgaaagcgttcaacagtggcgacgcaaatttcaccgaaagccaataaaatttgacatttaaaatagccgattggctttttagcttaataaagggccgccgctctgttaaacattctttcaaaccatgtttttgttttgtttttttttgaaaaatgccatttattcattttttgtaaatgagctgctgattattacgaattctatcatcattatcgaccaccaaatgaccatttccggcatttctgtccctcgctttttgtactgcttcctctcggtgcccttctttttgcttatgctttctttgctgcaaccaccgcggctgccatcttcttcttgaccgccagcacggaggagcggggcgggcacggacagtagccgctgtccttgccgggttggccaggcgctccgggctgtccaggctgaccagagtttccaggcagaccgggctggccaggcgcaccctggggtccgggcggtccttggccgccgggctgtcctggttggccttggctgccggggttttccgggttgtccaggcgcgccggggcgatcccttcgggccaggaa

SEQ ID NO: 44628 - DNA, 557 bp, Heterodera glycines
  unsure (1)..(557): unsure at all n locations
cccaccagcaattncaatctctggggactcaattctccgcgtttccaatctctgggactcaacccaccaaccttcaatgacattccaatcactgaaactaaaccctccagcaattcaatctctgggactcaaatctccggcattctaaacattgggactcaacccaccaactttcaatgacattccaatcactgaaactaaacccaccagaatttcaatctatgggactcaaatctccggcattacaaacactgggactcaacccaccaactttcaatgacattccaatcactgaaactaaacccaccagcatttcaatctctgggactcaaatctccggcattacaaacactgggactcaacccaccaactttcaatgacattccaatcactgaaactaaacccaccagcatttcaatctctgtgactcaaatctccggcattacaaacactgggactcaacctcagcaaatttctttagcatttttaactttttgtgtgccttgggatgttgaacagttggggagggctcggccgcttcgcggcctcgtacgggg

SEQ ID NO: 44629 - DNA, 1088 bp, Heterodera glycines
aaaaaagagatagccatttttttgggcccgtccataccttcacatatactcaaacggcccgaaaatcatttttagagcataacaactgatgacagccactgtcattgtttccaaagagatttctattaccagattgccaaaaaaagagatagccatttttttggaccgtccatacctcacatatactcaaacggcccgaaaatcatttttagagcataacaactgatgacagccactgtcattgtttccaaagagatttctattaccagattgccaaaaaaagagatagccatttttttggaccgtccataccccacatatactcaaacggcccgaaaatcatttttagagcataacaactgatgacagccactgtcattgtttccaaagagatttctattaccagattgccaaaaaaagagatagccatttttttggaccgtccataccccacatatactcaaacggcccgaaaatcatttttagagcataacaactgatgacagccactgtcattgtttccaaagagatttctattaccagattgccaaaaaaagagatagccatttttttggaccgtccatacctcacatatactcaaacggcccgaaaatcatttttagagcataacaactgatgacagccactgtcattgtttccaaagagatttctattaccagattgccaaaaaaagagatagccatttttttggaccgtccatacctcacatatactcaaacggcccgaaaatcatttttagagcataacaactgatgacagccactgtcattgtttccaaagagatttctattaccagattgccaaaaaaagagatagccatttttttggaccgtccataccccacatatactcaaacggcccgaaaatcatttttagagcataacaactgatgacagccactgtcattgtttccaaagagatttctattaccagattgccaaaaaaagagatagccatttttttggaccgtccatacctcacatatactcaaacggcccgaaaatcatttttagagcataacaccatgggggggccactgtcattgtttccaaagagatttctattac

SEQ ID NO: 44630 - DNA, 937 bp, Heterodera glycines
  unsure (1)..(937): unsure at all n locations
ggaaaggtagaatttgaatggtcagactatatttacactgagcacccgtagaatcgggtgatgccaagccatatgacactgctattttgatgttctgcccgcaattctaccaaaaacgagtttagaccgcagtaacgcgctctcagagggaagattaagggacacgaaagagacgatttaaaagcgattcgaaaattctatcgactgatataataacgatgcagtcgcggcgttgacaactgagatggaaccaaaagttccataatatctttccataaggctggaaaggcagaatttgaatggccagtcgatatttacactgagcacccgttgaagcgggtgatgcgaagccatagcaaactgtatttttaaattctggccgcaattctaccaaaaacgtgtttagaccgcagtaactcggctcagagtgaagattaaggaacgcaaaagagatgatttaaaagcgattcgaaaattctatcgactgatataataacgatgcagtcgcggcgttgacaactgagatggaaccaaaagttccataatatctttccataaggctggaaaggcagaatttgaatggccagtcgatatttacaatgagcgcccgttgaagcgggtgatgcgaagccatagcaaactgtatttttaaattctggctgcaattctaccaaaaacgtgtttagaccgcagtaactcggctcagagtgaagattaagggacgcaaaagagatgatttaaaagcgattcgaaaattctatcgactgatataataacgatgcagtcgcggcgttgacaactgagatggaaccaaaagatccataatatctttccatagggctgganaggcagaatttgaatggccagtcgatatttacactgagcacccgttgaagcgggtgatgcgaagccatagcaaactgtatttttaaattct

SEQ ID NO: 44631 - DNA, 83 bp, Heterodera glycines
cggccaggaggtggtggtggagttcatcaacggcgacctctgccgccccatcgtgatgggtgcgctctacaacggccagggcg

SEQ ID NO: 44632 - DNA, 899 bp, Heterodera glycines
ttgcttaatgtgttgcctctctttttctcactccttcctttgcttccgttttctctcgcccttttcctattggccttttcagtcacttctctctctttcgcctcctctctctccccttatctctcgccctctcccattatctatctctgttctcgccctctctctcattatctctctctgttctctcgccctctctcccattatctctctctgttctcgccctctctctcattatctctctctgttctctctccctctctcattatctctctctctctctctctctcattatttttcctccggtcatccaattggcggttatcgtgaactgtgtcgatttgctcaatttgacaataatttgtgcgacgtgtcgtattatgttttttctgcttttcttgtgactttgtccaagtgcgtttttggcttcccccccccccttttggctctttttgtctttttccctccccaattcatttttcgtcattcctcgagcgcgcgtcacgatttccgcaattggattgacttttgcccgtcctttgttatttgtccgccattagtcaaaattgcgctgccctttagctgttctcctaataaggctacttccatcaagtgaatgaataaatactcattgtttcttctgtttcttctcgcccattccctcgggtccctccgttttccttcgcccaattttcttccccaaaatttttctttgacttggctttaatttgatcttctctcctttcgagttcattcctttcacaagcttataaaatgcacaaccatcactcatttggctttattctatcatagaatggtcgaccgattgatcagagagtgagtgatcgattgacaacatttgatcctccgatagtcttaatttcatcattgcctcatcccca

SEQ ID NO: 44633 - DNA, 1238 bp, Heterodera glycines
  unsure (1)..(1238): unsure at all n locations
atattaatcaactaatcaattaatttaaatttacattccttccaaatcgaacttaatttttgcttcaaagcatagtctactcaaattaataacttattggaattaatttaaaagcaaataaaatttttatatatgattttggcatattttatttcataaatgcccgaaataaaacgatcttttaattactgacgacaattttaagtgaatgaattttaaaatgggttcttgattttctttatgtaaaatggaccaaatggtttaacaaaaatttaagaaatgatatataaagaagtattagttaatacaaataattttttaatcccaaatacctacaatttgttgcttgataattaaacaaaatagtgcaaatggcacaatagtttaagcaaaaccatgaataataaaaatcatattattgtcaataaaaatttgttagttttaaagctcaaaaattaaaatatagctttaaaacataatttaacaaaaaaaatttaagcttaatataagaagaaaaaaataaaaaaggttttaaatcaaaaataataacatttatttatttattacacttgagaaaaaaacgtcgccgtttttacttgagattaaaagttactcaaaaaaaataatgaaagataataaaaaatatattactgttttaaaacctaaataaaatgaatggcaaaaggatgccgaacaaattgtaatgttcagaaaaacaggagaaaaaccaatcaatacggaaataagatattctatctgaccaaaaaggaaataaaaaataattaatgaaatcataataatattttgaaaatatacattaaaaaggaatattttgaaagataattgttccaaataaaattaatgtaagaaaaagtaaaaatatatgaaattaaaaaattattatggaatcgagattaatttaaatgagataatgtattgtaaaactaaaagatgtcaattaatttaattttattaaaaaataacatatttaattgatatttttaaatgggtttttgttaaatactaaaaaatcactaatatggggattgcgaataataaagttattacccgattaatattagatctgatttgaatttaattaagttgcaaaaataagattgaataaattctacaaatgattacctaaacagaatttaanctagaacanttccattgaaatnaaataaaaataaaaattatattaacaaattaatgaaaaaaagattacaattatttat

SEQ ID NO: 44634 - DNA, 1679 bp, Heterodera glycines
  unsure (1)..(1679): unsure at all n locations
tgattccataatttntgagtttctcaaattgcctaactctttatttcctaaaagcgctaatttgtttttcagtgctccggatcacgtaattatcttctcaacgccacaatgctcccattttacgatccggtcgtattaaaccgaggtcattaattcgtctaaagatttaagagttcaattcaactcttaaaaagtaaccaatttttagtcggtctaagcaatgattacactgactttttgtattcattcgcgccacggccgacttgcaaatcggccggagggtgcggatcaccgtaagcaaaaatcaaattattaatccaaaaaaatcatttcccattcagctatttgttctgcgacaccacgaccaatggcactgcgttttgctgtgccaaaattaaaaggggaggaaattgtgccaaatttcaaaagaacagtaaaagaaaagcgaatttttaattatttggaattataatgttaaggcgaagaaccgtgctacgattctttttgcattaatgggcaatgccatgaagccaattatggcaaaatggtgggaagaatttcaatataaatagcatattcaaatggaatatttagctaattgttaatttagcactttttaaatgttgtccattcttccgaccaatcgttgtccgatgagccaagcagttctttcattggcacctcaacattacctggatttgttgcggatggaaccgatgtaaaagataatttattgaatattaaaaaaaaaattaaaacataattaattattaaaaattactttttaaattgttattatatttctgtaattgcaatgcttgttcccgcttttaagcatcacataaacttcacaacatcaaaaccttcatcaccaacaccttttcttcgggcgatgaaactgatcaaacaacggcatcttttcaactttcttccaccacttcaggtcaacaaacattactgtatgacgaaacttcaactgtatcgaatacagtaggaaacaacactgtggagctgcttaccaacacttcgccaactgttatttttaaatttaaaaccaatgaattttgcgataaaattaaataagctttttcaaagaaggcataattcaatttaataaaaatagccatcgcttccgaatgagcgccaatgctttgacaaccacgaatgctgcgcccattgggcagccaatggttcgtgctgtgcggcaccgcgattcatgaacacgtggtgccccgcgtcgtgccgttacgacgggtgccggccccatgcgacagaaggcctaatttttgttgtttttgaatggtttattcctgttttttccttttttcaattgaacaggactgtgccgccaagaaaaaaaacccgttttaccgggcgactcggtcccggttcaaaattttttctgggcgccctccgagaccgggcttttttcaaaatggtcctaaaaaacttcatcaatccaaagttattttttgatgcgtttatgttatttcacgcttttttcagatgggtgggaggtccgtgcatgaatttttttatgaattagcgtgataaaaattaatgtctttttattttcaaatttaggacaaacaatgttaaaaagaggttagattttgatccaaaaatttatttcttaaccgggcgggagtgatgacatttaacgaaatcttattgaaatt

SEQ ID NO: 44635 - DNA, 1170 bp, Heterodera glycines
ggaaaaggcaccgtaacccatgtaaaagtcaaacgggagttcaatgaacagcagacggaagagttgagacagaatggcggagccgtggccaagaaaaggaggacactgtccaaagtgcaatgcgccgaatgtgacgagtttttgccggacacggaaatgtcgcgactgaaccacacaaatgtgaagtgagtgagcaattgcatttgtttggccttcctttagtgcggctttaggcatttgatgctttgcctgttcaaatgtccgatgtgtgccagggaattcacttcaactttcaacggcctcgcctattgcgtgagtcacatcaaatggcatcattctggccaaatgattccctacgacgaggaaatgacaatggacaatctcccgcaaaaaatggttaaaatccgagcgcgggcttccgaactttttccctaaataaccaataaaaaagcaacgactaactttttgcacattctctcaatcatttgccccgtcttttttcattatttttttccttgtcaaatctctgatcattaaataattccacctcaaattcgattttttaatattgcaaaataaacataattttttatttgatgaaatgtaaatcaataatccctgaggcactctcatagatacaaaatatgataatcaacatacatatgtagtaagcaaataaaagcagtttttccaaattgaaagtgtatcaaaatttcaagctctcttttttgcatttttcttcctgtttagtttgcttcacgcttttccaccgttttcttctgtcgatctctctccccctgtttccaacgcaaaagtgtgcgatggttttccatcaaaatgcgtttcctttccttatgcgcgtcgttgtagtccatctgcagtttttcgggccacggtgcaatgcagaacacccagtcacaataacagtgcaatttgccgcctttctttgcagcgtctttgatgttgctgcgccaccagtccccaccgtaatcgatggtcagctcatggccaggcaaaatgtcgcgacttaaaggccaattgaagaaaaatcacgaaaaaccttcgaaaacacctcgcgaaaaacccaatcgaaccacgagtcatgtcccgatgactgctgtagaaacgaaaaggctgcagattctcgaaacaggaatggtgaagaagcga

SEQ ID NO: 44636 - DNA, 698 bp, Heterodera glycines
tctcttccttaataattttcaagcgccgaaggcccaccacgaggccgcgaagcggcctgagtgaggtccttcggtgcaggaaaattattaaggaagagagttcattatttatttgttttttgcataattaattcataaatatttttttcagaaagggttctgaaacgcaccaaattttatttacatgttagtttaggcactcagatgctttcactatcaaaaaagggagatgaataaaaaatctaaaaattttaattgctttttaaacaggccaaaaagtttaggcttaacttttttttcagaaactgatcagaagcgaaccagattttgcgagagcatcaaaaagacaaggaaaagcactgctatgatgctaacaccagtaattctgaatttaaaattttttattaatttttaaagcttcactattttatttttttagcaaaattaattcataaatattttttcagaaactgctctgaaacgcatcaaattttaattacaagttattttaggcactcagatgctttcaatatcaaaaagggagatgaataaaaaatctaaaaatttttaattgctttttaaatatgcgaaaaattttaggcttaacttttttttataaacttatcagaagcgaaccagattttgcgagagcatcaaaaagacaaggaaaagcactgctatgatgctaactcccagta

SEQ ID NO: 44637 - DNA, 840 bp, Heterodera glycines
atgaacaaagaaatccaaaaattgaggttttgttaggatttaactggttaatgaaattgattgcgacgacattgttgtaccaccacagtcgttagcatgagcaaggaaaaacaaaaaataacaaagcaaaagccatagaaacggacggacgctccaatgggacaaattcaaaacaaacagcacacaacgccgaaacatttattctgttgaaaatggacattaactacaattttatttgtgtaaattatttcaataatacaaagccatggaattaaaattaaactcaaatttgtacgcacaccataagtagggaacggtttttaggtgcatataattgcaaaatgaatacgtcgtacacatatatacatataaatgctaaaagtgtaaaatacatacaagaaagtcccaaaaaaaccccaaaatgggtgctaaaagaggtgacagaaatggaaaaccgggtcaagaaacagcataagaaatttttccctggttttttttttggtcggagaaaatgtgcttttcattctgttatcttacataaaatgctatccccaaaaaaagattaaaaccttgaaaccgttcccatataaaaattgttaagcaaaaaaggcaatcatattcatataaaaatacaaattgcgttccaataatccatcaaatttttctttttgtttgggatgctaattttcttccaatctgagaacacgttgaattttcaccaaactggcatccaatgctttgacaaattcttttgcgcttcgcttgtccttaaaaaacaataatgttagtgaaaaaaaatattaaaataatgattgtcccaaaaaaaaacaaaaaaacaaa

SEQ ID NO: 44638 - DNA, 914 bp, Heterodera glycines
aaaaaagagatagcccattttctgggatagactataaatataaaatcctctctaaaataaaaggtctattgcgcacagccctccgtatcatgctcgagagcatttgtatgtataaaattttctcaaaaaaagagatagccatttttgtggaatgagttataaatataaaattcctcagagaaataaaggtgtgatggtccacagccttccgttccatctggagaccatttggagatgtataaaatttatcaaaaaaagagatagccatttttctgggatagagtataaatataaaaattccctcaaaaataaaaggtctattgcgcaccgccctccctatcatgctcgagagcatttgtatgtgtataaaatttatcaaaaaaagagatagccatttttctgggataacctctaaatataaaaatcctctgtgaaataaaatggcgattgcgcacagccctccgtctcatgcttaagagcatttgtgaggtataaaatttctcaaaaaaagagatagccatttttctgggatagagtataaatttaaaaattccctcaaaaataaaaggtctattgcgcaccgccctccctatcatactcgagagcatttgtatgtgtataaaatttatcaaaaaaagagatagccatttttctgggataacctctaaatataaaaatcctctgtgaaataaaatggcgattgtgcacagccctccgtctcatgcgcaagagcatttgtaagtgtataaaatttctcaaaaaaagagatagccatttttctgggatagagtataaatttaaaaattccctcaaaaataaaaggtctattgcgcaccgccctccctatcatgctcaagagcatttgtatgtgtataaaatttatcaaaaaaagagatagccatttttctgggata

SEQ ID NO: 44639 - DNA, 1233 bp, Heterodera glycines
  unsure (1)..(1233): unsure at all n locations
tagatattttctttggtcccatgtgagaacactttcaccgtcgagtccaccgaaccgctgcaaatacggctcggcactgtccaatcaacgcacagcacgcggtccgaatggcccatcaaatcatatagagccgccctggggctgctaaaattggacacaaaaaacattagagcaacagaaaaaaagaatttcttaaaattcaaatcctcgaaatacaacccccccccccccccccctccacagtcaaaaatttatgaagacaatatttagtactaataatggcattctaaatataaatttgttttaatcattcgctaaatacctactcgacgcttgtgccagaaactcaccggacgtcccacattttaactgtgttgtcaaagctggccgaaacaaacaaatgctggtcggttgagtgccaacagacatcggacacaacgccaacatgaccatggaacgatgccttgaccattgagccatctaatggcgaaattaattagaaaaaaggggaggggcatttagttgggtcaccaacccctggaacgaaaatcccaaagccgaaccaacgaatcgacagaggaggtcagcacaaggccattggccggacagacggaaagtgcggaaaaggctttattcgaagtcagcgtggagatggggcctaaaaaggcagaaaaagggacattttgaatgccgacccaattcgagatttatttgttgcgcgagggttagaccaaaaattccaaattaagtggacaaatttcattttgcgcatccattcccttcccaaaaatcacctgccaattggaggtcccacagcatcagctgatggtcccatgaagcagtgatcgcctggctcaagttggacggatgccacgcgcagccgaccacaggctcgcgatgcgattccaaagtgaccatcggagtctacaaaataaaaattaaaaaaatcattgtttatattggaacatttgattttttaaaatttattcgttaaatgtgcgacattttgaactacgaccattcactgnaacattggcggtgaggtcgccctgtgaaatgtcgagaagcaaacgcatcattttatattggcacaactgtattaacaacagcaaaagtcatggcacagaaaggaatgccatgaagcgcagaaatattcaaaaaagggaaatgtgccgaaaatagaaatcaaaaacattttacaaaatatacataaacccacaatctttggcacgt

SEQ ID NO: 44640 - DNA, 784 bp, Heterodera glycines
  unsure (1)..(784): unsure at all n locations
atttttatctcttgaaatactacttaagaataattccgattattttttgttgaatatatacttaatattgaggtccatcaattaatgattaatctacctaataattgtagcaaaagaaaaaataacttattttaagctagaaaacgcgaggtaatcaaaaaaaaatcaaattcataacaattcgtttttttattcctataaatctttcatttatttaggcttttaatttaatcttttgttgcttatttcaaagtcatttcgtatatcacttgacttctttctatacagatgagcacatatcatattgcgtcgactttttattaatttgtgtatatttattttaaagtgtgcacgacgggcgaagtccacgcatctttagctgatactgcctagccagcatggtacgggcggcgcacgcggcgagcggaggggggggncgtgaaaattcaaacagtgctaacatgcctttccaggaagtgtgcctgctgctccaccaacattcgacttgtcttggcaatgccctcgggcggcactgtccgttagcgcgttcgttgttcaccagtcggcacgccttgcgggacaattttctgtcctttgtgctgccctttggcaccgccgtggaacggaatgccaaaggagcggaagcaagcgcttacagtggtgccaccatcgaattggatcaattattctcggatgaagtgcttgacaccgtgccaacttttggactttaacagggggggccccaaaaaagaaggaacgagaagcgaaactaattaatggatga

SEQ ID NO: 44641 - DNA, 1194 bp, Heterodera glycines
  unsure (1)..(1194): unsure at all n locations
ttgacaacgaacaaagttantggtccaaaaaaacttctggtgatgtccgtaaaatttgatcaccttccatttaataaaaatatgaaagaaaaaccgctacgataaaaaaatgttgccgctaaaggtaaaatcaaactaataaaattgtgtatattttttagcgggttgtgatcttcccacttgtccaagctgtattgcattagcatcgtgccatcattacccaaaatgaattgttgacatttttgttttttcgaatttcccttttccatgttcaccttgtaaatgtcgtccactcgtgccaattcctccagcaacggtaaaagttcgagcagttccctgtcgttggggtcgtcgaaccaagtgcggaccgggatctgaaaggggaaatgttatataatgacaaagcaaagtgccaacagcaacaacaaaaacggcaccgaattgtcagggtggaaggcgtaactggcgggcgaattgtcgatgataatcacccgacgcaaatcgcggcccaaccgggaaaggtcctggaaatacgggggcacaatgacaagcagtttaacgacaattaaaagggggattccgacaatcccaaattcataattttactaattgaaaatattaaagtttaaaaaaaatacccaacctaatattaaaaaacagctttgttttttaaaaaattttagaggctttttctagtaaaaaacaattttgaaaaataagtaattaaaagctaattggctataattggtcacatcattgcccaccttgacgtagttgccctcgtagaagacgcacgactcgcggaacagtcgcgaacggaaaatgcgtcttttgtccaaaaggtcgacaaccgggtcggcatactgtaataatacaaaagtgaaaaactgtttaattttatttatttgtttttaattgccttggccaaactggcggtgaacagaacacactcgaacagtgcgccaattcgttccaaaaagtggtcggtgtggggccttttcagcacgtaaacctgcaaaaaaggaaatgcgaatttgaaaatgaatgttttttgtagagcccgatattttggaaaattcctgaacttttgacaataataatatttagagttcgacctggacatggtttcagccccagtttttccttggcctgggcttttgtctagaaaattccaagtccagaggtccaacatgg

SEQ ID NO: 44642 - DNA, 1220 bp, Heterodera glycines
  unsure (1)..(1220): unsure at all n locations
tgcgaataaaatcatttaacgtgcttcaacattaacattttgagctgggggctttttatgggtgaatgatcagaatctctttttccgatcattctttcccattttccccatttctcatccactttacagctctaaaaccctccatcagactatgttctgatcaaaggcatggatcagtttaagccttagaaaaaataactgaaccagacaagcctcaaaatgcactcactgtccggcttttttgacccaaaacaaccgacttcatatagaaggggaattgaaagtttataccaccgctaaaaatggtggataaatcataaattgaatttttcctaatttaattttttgttaaaaattgctgcgagtgccaataattttttccctaaaaataaataaataaaaatgtattcaattgtaaattacttagatgaagaatgtgaaaggactcgcaaggttaaattatcgcacagtgtcaatgctcaaatttaaatttgatgccattgacgtggacatttcttttgtttcgataccggacaagaaaaaattgccgaatattttaagcgaagaatttgtgcaaaaatatttggacaaatttaattcggaagaaaatggcaaatttgagaagcaaaatcggagtttatccagtaactttattacaaaatcaaaaggaaattaataattttattttaagattaccgaaaaattatatttgcaattttaatttgattttgaaccgaaaattttgggttttcatataaaattaagaaataaaagtgcattctttgggtcctgctgatgggtcatgtgatcataaagctgacatctattttttacaccaaataaattttgtacaattttatcaaaaacttactcaaattttcaaaatttggaattttcgtcgttcaaaacaattgcatgaaatttcattatccaaacgaaaagttgaaagacaaattagaactaaaattaaaaaagcaaaaaaatcgacaagtaatttaaattgaaatggtctggaaattcttggattaattgaataattttaatattttttaatattttaaattaattaaacaattcatttgttattgttaaggttatcactctaacttatacatgaagaacttgttaatggatggccaacttgataatggtgaaaaagttctcaaaatttttcggtaatgtggttattacattaaaatgctgggccanaaagtaaggag

SEQ ID NO: 44643 - DNA, 889 bp, Heterodera glycines
acctggcaatagtagcacttagagggagcacatcaaacccttcagtgatctcacgcatcagaatttgacgaaattgaacgacagcagcgagtagaatcgccgtatcgttacgacaatacgtctttagctcgtccggcagataaaagggtgtacatttgttctcgtcatacctaaaaaacaataacaataaaaataccaaatcgaactaacaccattttatgaatttttcgtatttgtcccgcttcattgacccagggcagtaatcctccttgtccggcaaattttgaagatgcacgttgtagttttctctgagaaatataatcatttaaattaccctcatttggacatacaaaccttcggttgaaagcgtaggggaagaatggtttatcggcacagctaagactgaaggttttcggcatttcttccagacgaattggcatcagtagacatgagtctcgccatgtaagttttgagtggcgtcgagaatgttgtagacgaaactcaaaaattttgagcccattcatgatgacttcaggtcgtcgtttggtctcgccgaggtattttaacacaaagtggccatcaaatctcgaagcgttgtgggcctagaaaatatttatatatatttttatgcaacaaatgatgttgaaacgatcgctaactcacccaaataaatgtttggtacttgttgtcccatgccttcaaaatccattcgacaaacgccgaaattggctcatgcccttccgctttgctccaatccttcattcgttccatcgcaccgtatgttgtcaaacagattttgcaattgagtcgcacgccattttcagaatcacagcactccgtgcaggtaatgcgtgctgacaggtagttgaccttgtgtcgctgttgtccc

SEQ ID NO: 44644 - DNA, 141 bp, Heterodera glycines
cgccctgctcgccgcgctgcgcgcgctgcacctcgtccaccgccgcttccacctgctgcacgatggcccgtgcccgttcctgcaacagctgcccggcgggcgtcagctgcacgcggcgatggctgcgcacgaacaggcgcg

SEQ ID NO: 44645 - DNA, 734 bp, Heterodera glycines
ttttgaagtatgggaatggtacgttccagggatgggcctaggtttcgcttttcgcatttcgcctttcgcattattcgcattttttggcgtttcgcatttcgcttttcacatttcgctttttggcgcgaaatgcgacttttacacccctaagaattggattaaattcccataaaatttttcaaaattttacctataaattggctaattttcagtgaaaaactgtttataaatgatcaaaatttccaatttttttccccggcggcgcctatcggcaccgtcgcgcccccaaaactcctattttttcttagaaaatggcccaaaatcgcaaaatttggtaatttgatgaaaaactgttctcagcggcgcgccaaaactcttatttctcattagaaaaatgatacaaaaatcacaaaatttgatcattttttggagaaaatctgtcaacaaattttaataaaattttcaaaaattttcccggcggcgcctgccggcggcgcctggcggtgccgcctggcccctccctcttcccaaaaagtttttttggaaaaagcatgcctcaaaaaagcgttttattgatttttaaagttggaataaaattttaaaaaatgatttttgctttatgattttatctattaaaaagatgtagaaaaaatttcgcttttcgcatttcgctttttgcattttcgcatattttggcttttcgcatttcgcttttttttttcatttcgcatttt

SEQ ID NO: 44646 - DNA, 1064 bp, Heterodera glycines
ataaaaacttagaaaatacactgtaatggaaggactacggtaggtttccatcctccaacaaattacgctgcaaattgcagagattgtcctcataccgtatccatttaaaaaacacacagtatcactgacttatactttctgctttcccaatttcgctttaaggaattcagtgtttagcagccattccctacatttttcttcccattcattagtggtgcggtgggaatgccattttttgcttttgcgtcgcctttgtcaccgccaacggcgccgcctctttttggcaatccgtcgctctttgctttcccaccatttttactcttctcaaccgctgtcaacagttctttttgtgcctgaattttcattaaattcaatgcataattattattttttattcatctaaaaaaatgaagtgatcggatgaaggaagtcccggaactgagagggaattttcctgggacatttttacaatagcccaagatagggactgtatcccaggggggagggggtaaaaatacacggaggacatacaccaaccccccccccctacccaaagggggggggcgggaatttttatttacgaaaaaaatcaaaaaagacgaccgaaagacagtatagaaaccaatgattgacacattcaaatatctaacgcacaatatgatagtatcgaacagaaatctacattgaagcatacgacactatatcactcattaatcacaaaatttctctaaaaaaaaattatcctgggtctaagcagaacaatcacgcaagtggacgaacttccaatcgccataagagacgcagatagtcactaatacacctgaaatgctacactctatcttgcaaacaactcggacgaaaggcgatgaaacaggggatgacggacaaaaagaagcatttccaatcggcaaaatgaatggcaatagaggtcaaaatctacgtacaatcagctgaacttattgactcacaagatggtgagctgatcgaattagaatgcgccgataataaatacggattatgtacacattgtctacggtacactgatcgaacctcactcaacaaaa

SEQ ID NO: 44647 - DNA, 869 bp, Heterodera glycines
cgatttagcaaatcgggcggattattttaatttctttgggtttattaattaaaatatattttatgaaatgtattttgttctttaaataaagttaaaaattaaataattacacaattattcatagaattcattattatattaatgctttcccaaaaataatcataatgttttgtataatacgtaatctgttgaatagcttaaaaaaccttttcccatttttaataattaatcctattaattcgttaattggttaattaattagttaattgattaacattttcctttacctctccctttcccttctccattttcttcctcttcctcttccacatcatcttccgcttgttcagtaccatggtgcttttttcctttgtccttcttcttcccattgacattaagacacatattttgcattaattttccaatcaaaatttcgatgccattatggcgttccttatttttgtgccgatcaccaccattgcctgacgtgctgagatggcactttgaacctaaagaaacatttagggcagaaatttataaactgattttggcagaaattaaaaataaaaactaattttttacaaagttccaaagtataaagaatgagaatatttaatatttagaggaaagatgaaaagttatagaaattagtccaaggcatttaaaatagggttgagcggtaccggtaccggtaccggtactgagcggtaatttttgctttctgtgccggcgctagcggtaccggtaccggttttttcaaaaatgaaattaccgttaccggtttgtctagtaccggtaccgccggtaaaaatttgcactggtaagaatgggggtctggtcgagaaaagagtaggaaattggtgaagaag

SEQ ID NO: 44648 - DNA, 995 bp, Heterodera glycines
ttttcaaaataaccttttcagaaccccttttttcgcaccgtgaatgttatttttattgaattctgaaccgttttgagtagattagactagaaaaaatgataattttgaaatcatgtttcacactcccttctcccaggggtattattttgtaaagtctttttttcaaaataaacttttcaaaccccttttttcgcaccgtgaatgttatttttattgaattctgaaccgttttgagtagattagactagaaaaaattgaaaattttgaaatcatgtttcccactcccttctcccaggggtattattttgtaaagtctttttatcaaaataaacttttcaaaccccttttttcgcaccgtgaatgttatttttattgaattctgaaccgttttgagtagattagactagaaaaaattgaaaattttgaaatcatgtttcccactcccttctcccaggggtattattttgtaaagtctttttttccccaataaacttgtcaaaccccatttttcgcaccgtgaatgttatttttattgaattctgaaccgttttgagtagattagactagaaaaaattgaaaattttgaaatcatgtttcccactcccttctcccaggggtattattttgtaaagtcttttttccccaataaacttgtcaaaccccatttttcgcaccgtgaatgttatttttattgaattctgaaccgttttgagtagattagactagaaaaaattgaaaattttgaaatcatgtttcccactcccttctcccaggggtattattttgtaaagtctttttttcaaaataaacttttcaaaccccttttttcgcaccgtgaatgttatttttattgaattctgaaccgttttgagtagattagactagaaaaaattgaaaattttgaaatcatgtttcccaccccttctcccaggggtattattttgtagtcttttttcccccaataaacttgtcaaaccccatttttcgcaccgtga

SEQ ID NO: 44649 - DNA, 670 bp, Heterodera glycines
  unsure (1)..(670): unsure at all n locations
ggaaatgtttttgccccccccccctcccgacattttcgctttgttnnttcgctcctttcgcatttttaattccgccncctcccttttttctgcttaaaaatgcgttgaatatttttgtgctactgctgcacaaacatttgccttttttcgatttgtttaactctttctattcatcgctttcctttcaatggctttttgtccgtggaaggtaccgtaatcacaccataggtgtacggtatcattacgacagcataccgtacactcaacaaaataattgatactgttccgttcattttttgggcaatgaaaaagcaaagcaaaagagatggaataaactgtttaacagcagcagaagaaaattaaaggatgaaagaagagaaatgagctgagcaaaaatgaatgtgtgaatgacagattttgattgactgttgtcccaataaatattttaaaaaaaacaattaattggcgggggaagggagggataaagccattccacggggagacaatgtacggacggaaaatggggagaatgaaatgatcccgggaaaggcggggatgaaaaaatggatctgaacagagagaaaaggccatcgtcacgccgtcccaattgttggctttttttttttgcaaattccgaatcgattcccccccccctaatttgtgcctttcc

SEQ ID NO: 44650 - DNA, 438 bp, Heterodera glycines
ccaaacaacatcacaaacagagtttgtcagctgatgatcatttcaggatgcattgtccgtcaaccgcggcggcgcagaaccttcagcgccgacttggttttccgggcgaaccaaacgaagccattgtggccgaggtgctttttactagtacaccattttgtgtgttgtttcagggcgctgttaataaatccaacccgaatcccccggtttctgaattgttcctaaaaccagctaacaataaacctgattccaattcatcttttataatctctttcataatacaaatttgtgtgtcccagggtgagtgaatgctcaaaaaactgaattttcgaccgatttaaatggctgcacttcatttccccccccccaaaaaatttttttttttaaaatttttcataaaaattcttaggaactttcttagtgcgaaaatatcaaaaa

SEQ ID NO: 44651 - DNA, 1425 bp, Heterodera glycines
tagaaatagtaatgggattaataatctaatctaattcagttccgaatacatggtttttttaatactctgtcatttgtctgcccaataaaatttattagagaaaattaattgcactatggatgctcgagaaatgtataccgagtcgagaaaaattcggttttttttttgacttatcgttgcgttatagattttgtcatagtgtccaatatccggcggcaatttacctcactttttggggtgaaagttttgcagttgaataaaaatcttatctttctggcgatttaacctttcacttttttcacctttttggccctttcaaaatggcccagtcatgcgctacagacaattaatggcactaccgtttcaggtactcgcgatgccaaagcagaaaggttgggccggaatgagcggatagcatcatccgggggttggagtgcagaaacgaaatccgatcgtactcataggaatcgcgcccgtgcttcagcttcagcagtgcattatgctaaacaaagaaattttagtgattttttaagaaaaaataattttaagttttattcaaaattaaattgaatttacaaattgaagcctttgttggtcactgagcatgcggtattccattcgcaatgctttgccaaaatatcgttgatttcttttccgtttttggcggttatttgagttcgtattctggctgatgagacactgatctggtgccgacgattcgccttaaatcaatgcattttaaccgacatacatgtttggtttcttgacagacaagtgattctcgagactcaaaattttagaaatacctaaacgggatcggtcccgggaggtctcagtctcgcgcttcctaatggcccaaatttgcacagtttaaatgaattttttgtctgtctgaccgtgcttttattgcccagcataccccccaaaataatgcaaaagacatgtcaaattcaggcatgcgtaaagttcggcgatcactcgtggtggcaattccgatttatcagcttctgttttttgggtcgtcttttgaacaaacggcataccttaaaatttattatatataattgtaaatttaattgaaaaaataaaataaaaaataaatttaaaagaaaatttttcaaacactgactcagtttaactgatggcggcggcagttcgtcctccgtaaattcgcctttctgctctgcctaaattattaaatatattgaaaaattctttgcctaagaaataattaacttatttattttcaagagttattttttgaaaaaaattacagcgaatcaatggtgtgttctcttttttaaataattttgaggattttgggcaaaaaaccttttttataattcttttaacagaaaatatttaacattttgtgactcgcgggggaggaagtttaaaattttgctaaacataactattgaccat

SEQ ID NO: 44652 - DNA, 1566 bp, Heterodera glycines
  unsure (1)..(1566): unsure at all n locations
aatttttggtaaaacattaaaanaagtcgaaaaaattggttgctcggcgcgntgaaaatttcgaaaaaatttgggtgtgacttttttattagactttcccaaataaaattacctgtattaaatagaatacgaatataaaaatgaatacaatacataaattgctgataaatttgggnaaatttgaaaaaaaaattacttatgacagaaatttttggcattttgtttcattttgccataattgaatttattggaatatgaataagcttacgttggcacccgtgtgccagctgtcgcctggggtgcaaatcggcttcattgtcggcacagtccgcgtatgaattgcaggcgagcggtgccgggatgcattcctccgtgttctccggctgcttctcataaggcgacgatgccgttggcgttttgtgcctacaaaaaaattcaaaacaattcaaagtcgagattttcgatattggtgtttaaaaaaatgcgaattaatttgtcgaaattacaatattttttttaattagtgatgctcaaaaaataaaataaatgaataataattttgaaaaataataaatcaattatttatttttaaaagaaagttttagaataattttattaagaaattgataacatttattcaaaaaataatattaaactaattaaatttaaaaaaaacccataaataattttatttaaattagatgaaaataaaaatattattatgttctcacctttttgtttcacatgtgaattcagcttgccattccgcaccatttgcatccgttgaattgtgccgacatttctgcgcgtgccgaaacgacgacctcaacaatttttttgaatttaattttaaaaattagaaactaaaattttcaccaaagcaagcgaaatccctcggccgcataaggacttgctgaaactgtggtgctgcttgcccgcaaattgtctttggattgatccttaaattggaagcatttttgaagtgctatttattaataaattaaattttagaaaatttaacaaattttcttgatttatgtatgtttgaaaaaataaaatttgaccaataaacgtgaatcagaaaaaaaaatgcactttattggtgacgaaaatttgaaatttccaattaaagaaattagtagtcgtcagtaaatttaccgattgcttcgcgtaaatttcttctatttaattattattttttagtttttatagcttaattgatcagatgacactccattatagtggattctaaaaaattaaaataaatttagagaaaatcgcccgagggcatgaactaaaatttccggcataaaattattagaactcaattttctcaccatctgccgatttgttggttccgtgtgccaccaaagtgtgagcgcattgaacgacgattcggccagcaaaaagaattttttattttctaaaaaacaaatcgattttttgggttttaaatttgtatttttttttttacttttttcattggaaggaatttggccacaaaattcgcccaaaattcggcccggaattgcgccggcgggcagcggctttccgacgctaattcca

SEQ ID NO: 44653 - DNA, 969 bp, Heterodera glycines
aactatttgttttgcttcttctgatctctcccacccttgaaaagccgcatcagaaaagagccttagtgacaattgcattgattggcgccttagcacaattgaaggcgtatttattagcgcacaccggagttatattaacagcatcaatgataacagcacttacaacattgtctctcgctgtatatgttaagctcaaacgtgagatattgtttttaaatatttagaacttatttattttctaaattatagattgccgatgtggcgatctgttaaaagatttctttcccataaccttcgtcctgaactcgtacgagttctctgtgtcagtggaggaatttacacccgacaacatttttgaaaaaatttcaaaagagctaggccggaatgttcagcaattttgctttggtttgttttaaattggtttaaattattatagaaagatataataaattcagcttctccttcggaaacgactcgaaagattaaaaaaagtgatgaagacatggggcttcttttactttatgcaacccgaagccaaggacggctggaaatcttcgactgcccctgattcaggaggctggaaatcttcgactgcctctgtttcattttttatgatatttcccgttggcccttgggaaaggcattttctttttttcaaataaagaatcaacgactttgttgccttgaaaagtccatattaaattaatttaattaaaaaataatttttttttgaattcaaaaatgatttttctaattattttaacacgattttattaaaaaggtgattcgcaagtgtcgagtccgcaattgtcgggtccgcaagtgtcgggtccgcaagtgtcgggtccgcaaatgtcggggttatccgcaattgtcgggtccgcaagtgtcgagtccgcaaatgtcgggttccgcaaatgtcgggtccgcaaatgtcgggtccgcaaatgttaaatccgcaaatgtcgg

SEQ ID NO: 44654 - DNA, 1343 bp, Heterodera glycines
  unsure (1)..(1343): unsure at all n locations
caatccaaattgtgtaattgttttatgtgatgaatttctgttgcattggnttaaaaatgaatgatttgaatgacttggcttgtcgtccgaccataatttctttgtcctcctcctcctttttctgttaattgacccattaattaatggtgttggatcattactcaaaaactctcaacttaaaaatttttggcgaaaaaattttcatatctttgctcaagagtagcccaaatttttaaacattgatatcattcgaaagtcctctgttaactttcaaaatttcaaaaatttggtggactttcaaaaatttttgttgcctataaggaaagttataggcatttttttattttgatggttctttgcgtaacgctctttttgaggctttttgtttaacgttataacaccctcattaattagatcgagtccattaaattaattgatctattaattcctcccttttccataataatttttctttttgttaaatttctgccattgcatctttaagccattcttcgttttgtgccctgttttttgaattttaagaatatcgttttaaaattaattccttttatcattaattaattaatccattattattgtgttaaaccgaattttgtgagattattaaaatttaaaaaatcatttcattttgcacgaatccatttataacaacagctgattgtgtcaggaagaaaggtttcaacattgaaaaatttataatgaaaattttttaaaattttttttagaaatcttctcaaattcgtttgtcgcccgttggagaattacaattttaaaggaaaaagaattacgcaatttgaaacttatggaacccacagtggaatcatcaagcgaaaatttcgatcagttgggacaaagttggaacggtaaaaaaagattaattaattttagctgtaaactgtagggaactgtatcaattcatcacataagctggcatactgtcattgtcagtctttgtctcccccaattttataataattttgacaccaatttagatcggttttctcaacaggtggttgcgaaatattgtcgctaaaaaatggacctaattacgcaaaattatgagctttcattttccgaaaaatcccattttttagcttttgcgtgaagatattcagaagacggaaatggaattgactaggcttaaacatttgttggacatcgccactcgagctgcaaagcgaaaacgtgggaaagggaagggattaattgatcaattaggatcggcgattaattaattatgctctaatcaccggtgcaattttaaaagacaattttgccacccggtcggagggcacttaaattgaaccaactcaaattggtgg

SEQ ID NO: 44655 - DNA, 964 bp, Heterodera glycines
gccccctccccgcccttcagagcacgacaaatatttcaacaaaaatttttaaaaattgactagagcaatcgaacgctagcggacgacctaatggaaaaaaatccccgaaggagagaatttaattaaatccattccttcgggggaccgtgccgggtgccgcggggtaagcagtgctggttcgtttcatcacggcaccgaaccttttggctagtcagcaatcgttgcttaacttgccagatcggacgggtgcgcatgattccactgttccaagcaccccaccaaaagcaaaacgatataaccaaaatataaggaaaaattttttaaaaaattttttctccatcttcctttttgatactaaagcatcagagtgctaaaattaagttgtaaataaaatttggtgcgctttagagcactttctgaaaaaaatatttatgaaacaaaaaaatctattttttcaagtgtcagtttggggtactcaaacatttatggggagcaaaaatccaacgcagaattaaagtacagactatagggaagctattcccgaaggattcgaggctccccataaatctggggggcatcggatcggggggactgcccctaaaacgaaaataaatcttattttttactgaggtcgtttgaggtgactcaaacaatgtatggggagctaaaatccgacgaatagtgagccgactgggtatcgtaaatactgctccgagaggatactaaatgcctgtacgtcttttgtgcttgaatgataaatgatgggctttttctgcgtgaaatgatttctctcctctttgatgtcctgcccgcataatttggacatgttacctacacaaacgttttcttcccggaaaattgttggccctgcttagtaacattagccatatttgggctttaaaagtcctgtgaatgtatgcataatgaacggtaatgggatgtggaagctggcgggggggggggg

SEQ ID NO: 44656 - DNA, 1527 bp, Heterodera glycines
cccctcccccctcacattcatcccattttctgcgtccgttcactcaaaattcaaacgaagaaacaattggaaggagggaaaacgactgataactcatcaaaagtgattgataagtgataagagaagggacggcgaatgcccaacactttcaatttgtacgtaaatattcaaatgtttaatggattggacagtaagtaatttatattatttttattatatgccaaaaaatgtttgaaatgtgaaaatgactgaaaactaaacgaactgagaaaaaaaaccggacgaagtgcagagacggaatttgctgaattgtattggacattggcgagatcaatggcgaatgattattaacatatagcaaagtttgtttatgaaaagcgaatgtcagtagaaaaggaagtgatcggtcgaactcgaaaaataaaaaataataaattcgttggcacttttccaaatataaaaagactgtccgatcgatcacttcccccacagttaaagaaaggttaatgattcggggaacagtgctttttgaaacacacaatcagacgaggagtagcggagtggttacggagaaattggcatccgccaaactgtcggcatttgggccgggcgaagcggaggaagacggacaccagaaagactgggcattgccaacacagcctttgctaaggggaaaaatcaaaagtgaaagaaaaaggcattgtgattttggacacggacttaaatgggtttttgagtccatccgaagagagttggaaatacgcgtaacggtgcgcatttagtcgttcattagtggtgacggcggcgagaatctgaagaaaaagggaattaattaaacggaaattgaaaattaagaggacgaccgatacttggtaaaattggatgcaaagcaaagcggtgacgaagaaaaagtaattgacggagaaaaagcccaaaacggtgacaaaaggcatgcagaaaagaacatttgtggcggagatttggccacagaaatcgcgccaatctttggggaaacattcgaaaaagaaaatgtgaaaaacatttacagaaaagacatccggagaacacgagaaggcaggagaagtcgagaacaatcagataaacgatgaaagcccctaaaatggagagaaattggcatttgtaagcgccaaataaaatctcatgaaaaaatggacaaaagccatcccaaaattcaattacattacagacaacaaacaattcattactgtggtttttttctccgatacaatttgccacccaaggacctaaaaagcactcaatcaattaattgtacacaattaattgttaattagtacagtggtgatcaaaacggaggatgcacttgtcgcacactctgaaattcaaaagcataattctagtgatttaaaaaatgcattttgtactcactggcaatgtttggagcgcaacggacgagtgatcagacaggtgggacagaaagtgcccttccacaacggttcctccgtcaacgaaatgagcatttggcaccgttcctgataaaacccaaat

SEQ ID NO: 44657 - DNA, 1117 bp, Heterodera glycines
  unsure (1)..(1117): unsure at all n locations
ctgccattaaaaattgtggtggagcgctatcagttattgcggacctggctgattatacaaatacgacttagatatcacaaataagctccagtgatgtaacgccttctgctgaaaagaattgaactactgtatttaatagctttaatgaataaactttggaattattcggaaattcaaggacgacttgatggagcatttaaatgctaaattcttcatggaaaaatttagggcaaataggcaataaatgtttgttttattacaaacgctgccattaaaaattgcggtggaacgctatcagttattgctgacctggctgattatacaaataggacttagatatcacaaataagctccagtgatgtaccgtcgtctgctgaaaagaagtgatgtaacgccttctgctgaaaagaattgaactactgtatttaatagctttaatgaataaaatttggaatttcggatattcaaggacgacttgatggagcatttaaatgctaaattcttcatggaaaaatttagggcaaataggcaataaatgtttatgttattacaaacgctgcaattaaaaattgcggcggagcgctatcagttattgcggacctggctgattatacaaatacgacttggatatcacaaataagctccagtgatgtaacgccttctgctgaaaagaattgaactactgtatttaatagctttaatgaataaaatttggaattattcggaaattcaaggacgacttgatggagcatttaaatgttaaattcttaatgggaaaaatttttggcaaataggcaataaatgtttatgttattacaaacgctgccattaaaaattgctgcggagcgctatcagttattgctgacctggctgattatacaaatacgacttggatatcacaaataagctccagtgatgtaccgtcgtctgctgaaaagaagtgatgtaacgccttctgctgaaaagaattgaactactttatttaatagctttaatgaataaaatttggaatttcggatattcaaggacgacttgatggagcatttanatgctaaattcttcatggaaaaatttagggcaaatagggcataaaatgtttatgttattacaaacgctg

SEQ ID NO: 44658 - DNA, 585 bp, Heterodera glycines
gaaataaagccccccgcccctctcgccatgaattagagctgccctgaataaagcctctgaaataaccccccccccttttttgagttgagttaaagataaaaccctcgggggctctatttcaagaaatacggtattataaattttttttattttactttaccttgtcattgttgtcaagctgcccaaagaatggaaaagttttgccaatttcgaatacaaataataaatccatgaccattggcgctggccttgtacagaagggtccaaagtgacgtactttttcaaggtatgttgctggatatgattggttcggtatagtcttaattccaatgattcttccattttttatgcattatcttaccgaaaatttgttagacaattcgatcaaattcttttttcgtgaaaaaattgactcaaatgtatcacattgtgtgtaaaataattctggaattggtgtctgtgagtagcgaattcggcgcactttctcctcaatttgcagcaaattttgcaacataataaaattcattaactccttttgctctggtgcctaaaatgcgcaatttgttgctgttttgtggtgacatt

SEQ ID NO: 44659 - DNA, 1501 bp, Heterodera glycines
  unsure (1)..(1501): unsure at all n locations
ctgaacattttgctaaaaatanttgggccattttggcactttatttctgcttctgcttgaccaaattctgtttggcacacataatttagggttccacccgtgccgcaattgtagcagccggtaaaattaattggttttatgtggcattttgtgccgtctgtgactgtaacaatttttataccattaactcttattgctaacttaactggagaatactcagtctcgcttaatatttttttaccttcttttcgaatatttaattttgcggttgtgaatggtaattttggtgtcattttttctattgttttttcactgcatgcgcattcaacttctcctttttctctattaatccaacactttctacacacttctttatttaatttgcatgaaaaattttttgcctcaattgggtcatcacatgtcaaatctgtcagaaattcttttccaccataaattatatcattttttgacattatgaaataatcattcaaaattggtgaaattggaggtgttaatccttccggtgtaaatgaaaatttactccatttaactgtaagaccaggaaacatggtcaaattttagattttgtatcgtttccgattgttaatgttaacctcatttttaattcataatcccatccggtacatctaattaattcccaaattgtgtttgatgttggttctgcgtaagttctataaaagaaacattccgatgatgggagtgcgcatttatgaccccaaattgcgtctccttttttacagaaattggttcctggaaaattttcataatcttccatttctggaattttttcatccattttaatgtttttacatttactttttgtacatgagcccattgttggacagcgtctttttgaaataacatttattttatatgatcgtaaccattttaaagtttgttggttacagtgtaatcgtaaaaattgtaaaattaattctaatgaacccattatttttcctttatcatcttttaatgctaatgaaactttttgtccagcgggtaatattgttaattcggttgttccactgactctacatacagaaccatttgattgtctttcacagtcttcggaagttgactgaattgatattacttcggcaccactgtgcactaaatcaggcattgtcaaacataaaaatagtaatattacaatgcttccaagtctatatagtcttctgttttttcttttttgaattttttttttctcttttttcaaattcatttaataaacttttctgtatctcatcgttaaattttttgtctaattttgggttcaagacccattttaacgccaaatatggcccataaaaacaaattttaataatgcgccatatttttatgataaactttatgataaaacttgctatgcaaataataaaagaaataatacaagtagttaggaggcctattagtatgagcgtttcggtcaacatccgggggggggggccaatttttctaggcaaaataaacatttaattaa

SEQ ID NO: 44660 - DNA, 936 bp, Heterodera glycines
ataaattttattttagcccattagaatggagatgcaacattttcttctcaatgcattggtctatgagcatgattcaacagtccggcagcaatcagctcaaatggcatttaagattgccacggattgcgttgattttaaatcaaagctgatcactttattcaacgaaatggcaccaaaagtgaaatatggaattgtgcatttgtaccgtttatttttatgtttaaaaattgatcagcgtgaattggatttacaatttattggaaatggtaatttttttttgaatatttaaatggcaattttttcgtttttgaatgtttctgtttgcaattctactaaataggtcattcttctataacattatttggggattgccgtttaatacttaattactgaagcaattatttttaataattattttagatgatggactgaaaattttgtttacccgcaccaaacttgaacaaggggaattgtcaatattatacaaaagtgaacttgttgattttctctcctactgtgttgaagttaatgagaaattgcttcaatttggtggcagtgattgcgaggcacaatgtgtgacagtttcgggtgcttgcttatattttaaaaatcaaattttcattattttttaaaataaaatttttgatttttgtaaacttttactacatatcaattataaattttactttttcagaattgcatttgctttttgagaacttttcttcttccactgaagatggtgaaaatgatgacgaatttctgttctggagcgacacacaaaagaagcaattgtccatttattcaaacggaattattgtaaacacttggcatttctaaaatttattagttgtataaacttgctcccggggtcattggtcacgaatctgaccccatttcgaccagtttcgaatcctaaatccgaaataaaacaaagtc

SEQ ID NO: 44661 - DNA, 857 bp, Heterodera glycines
  unsure (1)..(857): unsure at all n locations
cccataatctgggcgcatcggttcggagggactgcccgannaacaaaaaaatcgattttttcaagtgtccgtttggggtactcaaacatttatggggagcaaaaatccaacgcagaattaaagtacaggctatagggaagctattcccgaaggattcggtctccccataaatctgggcgcatcggttcggggggactgccccgaaaacaaaaaaatcgattttttcaagtgtccgtttggggtactcaaacaattatggggagcaaaaatccaacgcagaattaaagtacaggctatagggaagctattcccgaaggattcggtctccccataaatctgggcgcatcggttcggggggactgccccgaaaacaaaaataaatcgattttttcaagtgtccgtttggggtactcaaacaattatggggagcaaaaatccaacgcagaattaaagtacaggctatagtgaagctattccggaaggattcggtctccccataaatctgggcgcatcggttcagggggactgccccgaaaacccaaaaaaaaattttttggataaaaattatttaaatgaactgactagataatatttaaaataggttatttctcttcctttcagtatccctgcaaagtttggtgcgcttctgatcagtttctgaaaaaaaagttaagcctaaactttttggcctgtttaaaaaggaattaaaaatttttaaaaattttattcatctccctttttgatagaaaaagcatcagagtgcctaaactaacatgtaaataaaatttggtgcgtttcagaaccctttctgaaaaaatatttaagaattaatttgcaaaaaataaataaaaacgaaa

SEQ ID NO: 44662 - DNA, 1207 bp, Heterodera glycines
  unsure (1)..(1207): unsure at all n locations
tagaaaaactcatatctgactcgtataaaacatacntcgaacagtaggtatattgtgtgcaattttatagtccagccttcgctagggctctcaccgcggtgtattttaggttgtctttgatgtatcaaaatttctctcggccgtgttgtgactgaaaaataaaatgaacttaaattattgcaatattgtttatacgaagtcttttgatattattctgacgacttccatgataataaatacttatacaaagtttatctttttatatatttcctcatcccaaacatggatggaaaataggcaataaatcgacaaatatttaaaagttttgccatgctatttatctttcgggactcaatttatgacgaaaatatgggctccgattattttttattttctactaacacttttcaagtggatcaatttatagattcaggaaattcattgcatgaattgaaaagtatttatttttattaaaatttgctgcttattttccgtaagaaagtttttgggaggaatttcacaaccttgccataggaaaaactcatatctgactcgtataaaacataactcgaacagtatgtatatttgttgtgcaattttatagtccagccttcgctagggctctcaccgcggtgtattttaggttgtctttgatgtatcaaaatttctctcggccgtgttgttgactgaaaaataaaacgaacttaaattattgcaatattgtttagacgaagtcttttgctattattctgacgacttccatgataataaatacttatacaaagtttatctttttatatatttcctcatcccaaacatggatggaaaataggcaataaatcgacaaatatttacaagttttgccatgctatttatctttcgggactcaatttatgacgaaaatatgggctccaattattttttattttctactaacacttttctagtggatcaatttatagattcaggaaattcattgcatgaattgaaaagtatttatttttattaaaatttgctgcttattttccgtaagaaagtttttgggaggaatttcacaaccttgccataggaaaaactcatatctgactcgtataaaacataactcgaacagtaggtatatttgttgtgcaattttatagtccagccttcgctagggctctcaccgcggtgtattttaggtgtgtctttgatgtatcaaaatttctct

SEQ ID NO: 44663 - DNA, 1430 bp, Heterodera glycines
atatatttacatttaaaataaattattttagttaaaattattaattttttaaaatttgaaagttcctttgccaatttggccaatcgcgtggacgctctgaatttcattttgggccaattgcgcgaaagtgtccaattggtgggcggccgaggcgaagcgatggaggccaatctgagcacattcacagtgatcttcttcttttttgcttactctgatgaaaagcataaattaaatttgaaatataaaaaaattgagggaaaattgcataaatttttgggaatttctttcatttttattgaaattcctttaaatttttttagactgatttgcgcaccacattagatgcccaacacagtgatcaatggaaacgattggagacagatcgccaacagtctgagaaaaaatctaaaaatttaaattaaattaaatttaacgatgggaaaatgcggtgaaaggcatggaaatggagctggacaaaatgcgtgaacagcacacaaaggcaagcaaaagcacggattttaattacagtggttaaatgtaaccgtttctgttcgcctcctcttccaataattaattactaattaatccccctgatttctgattaattcctaattaatccctctgattttccttttcaacaaaatgtatttcttttaaacggtaacaatgaaatttgaatttatttcatttaaatgtcaaaatgctttattttctttctttctcctgtgttgggctaaaattgaaacagaaaagtgatcactgatcacagaattaatttaagagcacaaaaaatggttaattcatattatttttatgctcgcctttcttaattttaaaataaatgaaattatttaattatttataatataaattaattctttatttaaatttctgattatttctttcatttttttgcgctttgtttttttaggaaattgtcgagggccatcgttggcttgaagaacagcgggaaatgatcacagccgaacgcaaagcatttcaagtgaaaaaagaaaacaattagaaaattaaattttatttatttttaggaagaacaatcgctgattttggattggattgagcacaaaaagacggaaattgaggcgaacaaagtgaaaaataaataaacatttttattaaattttgaaaacaaaaaaatatttaataaatatttttaaaattattttatccctaattaatatatttttttttcaaaatgatttccttcgccgtgagcacgaccttttggtgcgtgtggtcaacgaacgcgcgctgttggagaatgaacggcgcgagttcacgcggcaacgcgacgcggacgtaatgcgactgaggtgacgcgggaataaaaatgaatttcaaaaataaaattgaaattaatttttaaaataattattgaaaatttcaagcttttaaatataaataaaaaa

SEQ ID NO: 44664 - DNA, 880 bp, Heterodera glycines
agaaattaaatggcgattgcgcaccgccctccctctccgctcgagcgcttttgtaacgtataaaatttctcaaaataagagatagtcatttttcttggatataagataaatttaaaaattctctgagaaattaaatggcgattgcgcaccgccctccctctcatgctcgagagcatttgtaacgtataaaatttctcaaaataagagatagtcatttttcttggatataagataaatttaaaaattctctgtgaaattaaattgcgattgcgcaccgcacttcctatcatgctcgagagcatttgtaacgtataaaatttctcaaaataagagatagtcatttttcttggatataagataaatttaaaaattctctgagaaattaaatggcgattgcgcaccgccctccctctcacgctcgagcgcttttgtaacgtataaaatttctcaaaagaagagatagtcatttttcttggatataagataaatttaaaaattctctgagaaattaaatggcgattgcgcaccgccctccctctcacgctcgagcgcttttgtaacgtataaaatttctcaaaataagagatagtcatttttcttggatataagataaatttaaaaattctctgagaaattaaatggcgattgcgcaccgccctccctctcacgctcgagcgcttttgtaacgtataaaatttctcaaaagaagagatagtcatttttcttggatataagataaatttaaaaattctctgagaaattaaatggcgattgcgcaccgccctccctctcacgctcgagagcatttgtaacgtataaaatttctcaaaataagagatagtcatttttcttgtatatatgatatatttaaaaaatctct

SEQ ID NO: 44665 - DNA, 948 bp, Heterodera glycines
ggattagcatcggggttacgagatagaaaattgtcctaaaaagagataaccatttttctgagaattaattcacaatttcgcagctcttagggtaatggaaaaaattttgaagaggctctccggaacagattagcatcggggttacgagatagaaaattgtcttaaaaagagataaccatttagcatcggggttacgagatagaaaattgtcctaaaaagagatagccatttttctgagaattaattcacaatttcagcagctcttagggtaatggaaaaaattttgaagaggctatccggaacggattagcatcggggttacgagatagaaaattgtcctaaaaagagataaccatttttctgagaattaattcacaatttcagcagctcttagggtaatggaaaaaattttgaagaggctatccggaacggattagcatcggggttacgagatagaaaattgtcctaaaaagagataaccatttttctgagaattaattcacaatttccgcagctcttagggtaatggaaaaaattttgaagaggctctccggaacggattagcatcggggttacgagatagaaaattgtcctaaaaagagataaccatttttctgagaattaattcacaatttccgcagctcttagggtaatggaaaaaattttgaagaggctctccggaacagattagcatcggggttacgagatagaaaattgtcttaaaaagagataaccatttagcatcggggttacgagatagaaaattgtcctaaaaagagatagccatttttctgagaattaattcacaatttcagcagctcttagggtaatggaaaaaattttgaagaggctatccggaacggattagcatcggggttacgagatagaaaattgtcctaaaaagagataaccatttttctgagaattaattcacaatttcagcagctc

SEQ ID NO: 44666 - DNA, 981 bp, Heterodera glycines
  unsure (1)..(981): unsure at all n locations
ggatagatcagatataataaaatgtctaatcgttacctttttcagctaatggatttatgaggacaatttaaaacaattgatttattaattntgatgatcacatgaaaacgctgcaaaaatacacttttaatgaaatatcgctaaattggcatgttgcatgttacaaaagagattttatgcaggttaaacctaacaagcgaaccatagcacatagtctcaagtccacctgttttgataaaaatcactagggatggatagaaatcgctatttctttgctacgaaacctgtaaagatccgtttccatttcaaataacagcctttctatgcaaattctaacggctttgagaatttcagttgctaaaagcctgaatccacggttgcccgactgggtcggaggaagccacgcgatattctgaaaatcggtattcccttcattttctatgatgtttgcgcaacacttcggaattagcttgcctaggagatgcattcctctgtaagttcctgcccatctatatggagagaaaatttgggttccttcctagaccttgtttttgttccggaaatattcaaattttgtgagcgatactgttgataaaacgaaaataaaagaaagcatttgaactcccctgctttatcacaaattcaccccgggatagatctgatataataaaaggtctaatcgttacattattcagctaatggatttatgaggacaatttaaaacatttgatttattaatttgataatcacatgaaaacgctgcaaaaatacacttttaatgaaatatccctaaattggcatgttgcatgttacaaaagagattttatgcaggttaaacctaacaagcgaaccatagcacatagtctcaagtccacctgttttgatancaagcactagggatggatagaaattgctatttcttngctacgnaacctgtaaagatcncgttccatttncaataacagcctttctatgcaaatt

SEQ ID NO: 44667 - DNA, 878 bp, Heterodera glycines
gtgggggggcgaaggcccaccacgaggccgcgaagagaccgagtgagtaccttcggtgcaggaaaattattaaattttttaattgctttataaatatgccaaaaaatgtaggcttaactttgttagtgaaaattcgatcactcatattttttgataattgagcagaagcgtaccaaactttgcagggatactccccggtaaaggactaacatacactgaaatgagcgccgagctagctggctcaaaaaaatttttcgaaaatatgagtctttcgtttttatttatttgcaaaattaattcataaatattttttcagaaagggttatgaaacgcaccaaattttatttacatgttagtttaggcactctgatgctttttctatcaataatggaggtgaatacaattttaattgctttttaactttgggaaaaagtttaggcttaactttttagtgaaagtttgatcactcatatttttttagtctaatctactcaaaacggttcagaattcaataaaaataacattcacggtgcgaaaaatggggtttgacaagtttattggggaaaaaaagactttacaaaataatacccctgggagaagggagtgggaaacatgatttcaaaattttcaattttttctagtctaatatactcaaaccggttcagaattcaataaaaataacattctcggtgcgaaaaatggggtttgaaaagtttattttgaaaaagaagactttacaaaataatacccctgggagaagggagtgggaaacatgatttcaaaattttcaattttttctagtctaatctactcaaaacggttcagaattcaataaaaataacattctcagagcgaaaaatggggtttgaaaagtttat

SEQ ID NO: 44668 - DNA, 986 bp, Heterodera glycines
aaaaatttttaaaaaatttttttcttttcctttttgatagaaaaagcatcagagagcttttatttatcttttaattaacatttggtggctttcagagcactttctgaaaaaatctttatgattaattttgcaaaataataaataattaatgaaaaagtcagaatttcgaaaaattttaaaaacaacaagcgttggcattttttcaggttaagttagtcctttacaatggagaaggcctgcaaaatttggagagattatatcgattttagtgcgctaggttcgatgaaactttttaaaatataagcctaaactttttggcaaatttaaaaaggaattaaaaatttttaaaatatttattcatctcccttttgatagaaaaagcatcagagagccttatttaacttttaattaacatttggtgcgtttcagagcactttctgaaaaaatacttatgaattaattttgcaaaaaataaataattaatgaaaaagtcagaatttcgaaaaattttaaaaacaacaagcgttggcattttttcaggttaagttagtcctttacaatggagaaggcctgcaaaatttggagagattatatcgattttagtgcgctaggttcgatgaaactttttaaaatataagcctaaactttttggcctgtttaaaaaggaattaaaaatttttaaaaattttattcatctcccttttgatagaaaaagcatcagatagccttatttaacttttaattaacatttggtgcgtttcagagcattttctgaaaaaatatttatgaattaattttgctaaaaaaataaaatagtgaagctttaaaaattaaaaaaattttaaattcagaattactggagttagcatcatagcagtgcttttccttgtctttttgatgctctcgcaaaatctggttcgcttctgatcagtttataaaaaaaaagttaagcctaaaatttttcgcatattaaaaagcaattaaaa

SEQ ID NO: 44669 - DNA, 578 bp, Heterodera glycines
  unsure (1)..(578): unsure at all n locations
tcttgagcctcgaggtggactaaaaacccctaataacttttttaattttaaaaacaggcgcgaagcacccgnctgagctctacaaaattacaaaaacgggcgcaaagcgcccgtttgaggccgcaaagcggcctaaaaaccgctataattttttaaaaattccaaaactcttcacaacccaatagtttatttttgtacctcgtatgagctcaacaacatttaaatacgggcgcgaagcgcccgtccaagttcaacaaaatttagaaatgggcgcgaagcgctcgtccaaggccaacaaaatttgaaaaacgggcgcgaagcgcccgactgaggccgcgaaacggcctaataagctaaaaaacgggcgcgaaacgcccgtcgtgagcatcgatgtggacttaaaacccctaataattttttaaaaattcaaaaaaatctctccaatcaaatcgatcaatttgaaccgcttcacaggctaggtagcgaagctccgaaagcgcgaagcgcttttcccagcgaaatagccgacggttcacgcacccgctagttaatatatacgttatattgacaaggagttt

SEQ ID NO: 44670 - DNA, 1013 bp, Heterodera glycines
  unsure (1)..(1013): unsure at all n locations
gcattttgggttgctttgtcgtgtgacagtttcggcacattgtccgcacgcgcactgatgcccacacggatccattgcgaaccgaggctaaattgcactcgcttttaacacattgagtataaatttgacaatggaaaaatagacttttagaaacatttttaagccaaaattaagaaatgattttttgccaattctgaatttaataaatttaaatacctcttccgacaaacaaatcgcacatttatttgtacttaattgttgatttgaatgtgccggcggtaattgtcgattttggtacagcaccatttctgcgctttgtttgttttttttgttttttggttgaagtaaatactgtgggtaaattgaagaaaataataaattaattttaagaattattgagaaaaaaaataactttttagtcaaaattttcctttaaaaataattattaaatgtataagaaagaacaaagtgattttctacccaaatcagcagaaaacccactcgaaattggccatttgggcaaaccgtcgttttccattggtccatcgcaatttgcaaagaattatgtgcacaacatgtcaatggcaaatgatttacattggcacaaatttcgtccaacaattgtctgactcctttgattttttctaatattttcaatttgagtacatatttttcattggcttcgacaaagagaatgcctaagtttttcgatttttgtaaaaactttcaaaaagtgccaaaatcaccgattcgccggaaaagattcttatcgatttcgggccatcggcacattcgtctgatgtcatttgttgccgttcttttgctgaacagttcaatccaaaaatgaacaatttcaatagccccatttaatggtggtcttccgctgtaaatccaatgcgaaaatgcgntcatcacaatggtcgtttgcatggcatttgctgctttagcacacgcaacaaagcaattttggcaaaatgccattgcattatccacattctatgagataagcaaaa

SEQ ID NO: 44671 - DNA, 1004 bp, Heterodera glycines
  unsure (1)..(1004): unsure at all n locations
aattataaaagtttaaatattttgaataattctaatttagatgaatcgaataaagtaaaaattaaaataaaatatgtacacatttttctggaaataatttgcgcgcatcatcgtgaatgatgatttatntaaagaacgaaatgatacattaatattgtaaaaaacncaataccgaacggataatcaggcttgtcgttattgaattaatgaattatctcttataaaaatgaactgatttaattaaaaaagagaataatgccttaaaactttttgaacaaaaattgtcacaacattcaaaccaaaatatttttaaatataatttttaaaaagaatgttttatttaaattttttaatataataataaattatatttgtataaggtatcaatacggtttaataaatgcattctccaattatgaaaataatcagaaaatattattttcaaaaagaaattatattttataaataaaaatatattttcaaagaaagaaattatattttaatcttttattgagaacaattaatattaattaaaatgtaatacatcaaatgacacatgcattactgcgcaatgattaaaattaaaagctagaaaaagaaatgaaattgaataaaacgatcaattaattggtatgaacttgaattatgcttggaataagagaacttcagaaaaccatacgaaatttccctgagatatgctttaataaatattatcttgctaggacgttttattaataatcataatttgattatatatgggcaaaattaaaaacaatatgtcagaaaaagtgaataataataaatataaattggactttattaataataataaaaattaaactaattttatttcatattanatgaaattatactaaaaatgatanaaaaagaggaaaagataaatgcaaaacactaagtaataatatattaaaaangaaaatactaatgntaacgatgatatggattctacaaaatcatagaacaaaaaatatcatgaaataaaa

SEQ ID NO: 44672 - DNA, 602 bp, Heterodera glycines
taggaagtgcccattgggttttgcttattaatcacccttattttgctcattgccattttcttcgcttccaatggccaattggcgccatcggccgaatcggcactcgctgcccttctccaccaaatgcttccatttgtgttgaactgcttggaacagctgttgttcatctccgagtccgtctccgcaaagtgtcgccaattcgtccaacggatggggaaaattacgcagaaaataattcattggcaacggcggcagaagcagtgaaagcgaagtcactttgcccactttttaatgggctcgtccgattttggcatttccatcgcacggaagcgaactttctgtgatggcaccggagaattttggcaattaatttaaaggagtaatgagtgggcaaagaaagagcaattgttttttaaactaattaattaagtgcccaccgattggcacttccgccgaaggcacccaaattttgatggcactgaacaaaatgaaaaaggcgaggagaaaaaggaggagaaacacaggccaaaagagggaaatatccagcggaagatttaaaatcaaaggaatttgaatggtcaaaggaaaagcggcgaattcat

SEQ ID NO: 44673 - DNA, 773 bp, Heterodera glycines
ccctttcatagagcaactttcattgaattgcatgtaagacttattaagacgatttgtaaatgatggaagtggaggtaaaagttttttatgaatttttttaaatatttttgctcccaagaagatccgcattcggcttcgtcatttttggttttatctttttctcaatgtgaattaaatttaaacacttatggcgcgcggtgctagaaaggccagttaaaagtcgcagaagttttttggctattttttaatattttgctttcacccaattaattacttcccaataaatcaatgtaatttcatcaaaaaatttttatcaaagataaaaaaggagagaaagaaacagaaaagacacacaagaaaaaagagaagagagaaaaagagacagaagagacacaaacatatactcccactgaaaaatttgatcagaaaattgattagaaaattaaatagtcgagcaatgatgactgacatataaaattatcaaaatatgtcatcatcatccagcaatccaaccttgggaaaacgttgccatggcttcgcttgaaataggagacaattcgcaataaaattatcacaaaaaaccaaaaaaattatgtgaaaaaataattgatcagttcgacgaaaatggatcaaatagaacatcaccatagtataagcgactaaattggatgcaagtagtggccaaatcaacgtcaagcctaagctgatcagctggagaagaatcgacggcacgttttgatcgttgtttattgtaaggtatgccatggtctgta

SEQ ID NO: 44674 - DNA, 1516 bp, Heterodera glycines
aaaaatggggtttgaaaagtttatgggaaaaaaaatcttaataaaataataccccggggagaagggagtgggaaacatgattcaaaaattttcaattttttctagtctaatttattcaaaacggcttcagaattcgataaaaataacattcacggtgggaaaaatgggggtttgaaaagttttatggggaaaaaaagactttacaaaataataccccgggaggaagggaggggaaacatgatttcaaaatttttgttgaaatatttgtcgttctctgaagggcgtgggaggggggggggcggaaggcgcccacacgaggccgcgaagaggccgagtgagtaccttcggtgcaggaaaattattaaattttaaaaattttttaattgctttttaaatatgccaaaaaatgtaggcttaacttttttagtgaaaattcgatcactcatattttttgctaattgagcagaagcgtaccaaactttgcagggatactccccggtaaaggactaacttacactgaaatgagcgccgagctagctggctcaaaaaaattttcgaaaatctgagtctttcgtttttatttattttttgcaaaattaattcttaaatattttttcagaaagggttctgaaacgcaccaaattttatttacatgttagtttaggcactctgatgctttttctatcaaaaagggagatgaataaaatttttaaaaatttttaattcctttttaaacaggccaaaaagtttaggcttaacttttttttcagaaactgatcagaagcgcaccaaactttgcagggatactgaaaggaagagaaataacctattttaaatattatctagtcagttcatttaaataatttttatccaaaaaatttttttttgggttgtcggggcagtccccctgaaccgatgcgcccagatttatggggaaccgaatccttccggaatagcttccctatagtctgtactttaattctgcgttggatttttgctccccataaatgtttgagtaccccaaacggacacttgaaaaaatcgatttttttgttttcggggcagtccccccgaaccgatgcgcccagatttatggggagaccgaatccttcgggaatagcttccctatagtctgtactttaattctgcgttggatttttgctccccataaatgtttgagtaccccaaacggacacttgaaaaaatcgatttttttgttttcggggcagtccccccgaaccgatgcgcccagatttatggggagaccgaatccttcgggaatagcttccctatagcctgtactttaattctgcgttggatttttgctccccataattgtttgagtaccccaaacggacacttgaaaaaatcgatttttttgttttcggggcagtccccccgaaccgatgcgcccagatttatggggagaccgaatccttccggaatagcttccctatagcctgtactttaattctgcgttggattgttgctccccataattgtttgagtaccccaa

SEQ ID NO: 44675 - DNA, 472 bp, Heterodera glycines
tcccttttgtgcactattttagtttttaaaattggttcttactttttggctttttgaaataaattgtgaaaaatatactaaaattattttagcttttaattattcagtacaatgcttttaagccccgccgtgaggcgggacagttccaaaattttgtaccacattttactgtggaaagtccaagtaccttattggacaactacgtgtcaatgagcacagtcgcctttggccagttgtgcactatttcgtttcaaaattgaatcattttttttgtcttttgaaataaattgtgaaaaatatacgaaaattattttcggttttaattatgctgtacaatgcttttaagccccgccgtgcggcggctccccttttgtgcactattttagtttttaaaattggttccggactttttggctttttgaaataaattgtgaaaaatatacgaaaattattttagcttttaattattcag

SEQ ID NO: 44676 - DNA, 802 bp, Heterodera glycines
ataaatttttcaaaaaaagagatagccatttttttgggataaactataaatttaaaaattccttcaaaaaaaaaaggtctattgggcaccacccttccctatcattctcgagagcatttgtaggtgtataaaatttatcaaaaaaagagatagccatttttctgggatagagtataaatataaaaatcctctcaaaaataaaaggtcgattgcgcaccgccctccctatcatgctcgagagcatttgtatgtgtataaaatttatcaaaaaaagagatagccatttttttgggatagcctctaaatataaaaattctctgaaaaataaaatggcgattgtgccccgccctccgtctcatacgcaagcgcttttgtgaggtataaaatttctcaaaaaaagagatagccatttttctgggatagagtataaatttaaaaattccctcaaaaataaaaggtctattgcgcaccgccctccctatcatgctcgagagcatttgtatgtgtataaaatttatcaaaaaaagagatagccatttttctgggataacctctaaatataaaaatcctctgtgaaataaaatggcgattgtgcacagccctccgtctcatacgcaagcgcttttgtgaggtataaaatttctcaaaaaaagagatagccatttttctgggatagagtataaatttaaaaattccctcaaaaataaaaggtctattgcgcaccgccctccctatcatgctcgagagcatttgtatgtgtataaaatttatcaaaaaaagagatagccatttttctgggata

SEQ ID NO: 44677 - DNA, 1088 bp, Heterodera glycines
tatttgggaaaaattcagggtgaaggggagggggggggaggggctcgggtgataaaacccggaagaaaaatttcaaaataaagcggatccctaatgggcttaaaaagtttatttttgaaatttcactcaatttatcccatataaattaaccccccccccccacaattaacgccctaatgacaaatttagggggacaattttgtattttacaaaattttcttcccctccccagtttttctgatgttcatcatgctttttgtgtccgttgtgatgttttacacaatttttttggtcctccaatccattcgattcataaaagcatccaaacggttgcaacgacggcgcagttcagtctatctgatcggccaaatcggtacaattttaattattatttttaacttttgtaaatttaattttattaattattttttagacccaagtttaatgagcattaaacgaccgtcgcaatgcagtcaaatgtgctgacaaaatggaaaaatcaagctcaaattttcatcaaattactatgaactttcaaatacaaatttcattaaatgtaaaaaataaaaattttccctacacatattatttttttgcatttgtcataaataaaaaaaaattctggaaaatatttataaatgtgggcctataattgaaaaccaaaaggaaaactctttttttaatataagggtaataatgtgaaaaaatccacctgaatgattggaatgaatgaaaagtaatttttatcggttaaaaaaagaaaataaaaataaatgaaaatgaaaaaacaaataatgggaaaaggtgcaaaaaacaaaaacaaaaaaatggcttaaccaaccattaaaattaaatcaaatttcccaattccatcatttctttccgcactttgtttttctgttaaaatgcccacgcaaatggcttatctgagcaaatccttggccacattcggtgcactaattgatgaaattaaattagggttggtcgggaccgggaccaaaacacggtactgaagttccggttttgaccgggaaattcccggttttcccagccaaaagtcccggtttttttacccgaaaagtcccggt

SEQ ID NO: 44678 - DNA, 875 bp, Heterodera glycines
gtttaattcgtaccaggtgttttcgacagtgatttggtttcgaaagtagttgatttagacagtactttataattaattttctacataatttattgtacacttaaattaatattattatataatttgcatatacaaattatttgaagtaattagacttgtataattaggtatgtttgtcaaaagatttaccgctttcctattttgtatacaagtatcttctgctcgactgtagtcgagaatacaaaaatttatttatatatgattctataatcgtgtgggaaaatctgctaactaatgccgtgtttgagtgccaagatgcaaatcaaatctgcaaagcagaattcgaaaatttcaaaccattcttaaatggataggagcatgtgtttatcattttaattttcaaaatttaacgagacttatgccatatagaacaagttttttaaaaagaacctttactgtcgaaatcaatcactgtcgagatcaccactgtcgaaaactaacagcaccgtttaactcgccttccttcgattcgtcaactcatccaaaatttacttaaaaaagcagtttccattgcttttcatgacgagtaaaatcatttaacacccattcaaagcgattcgaacccgaatcggcaaacggtctattatgttagggtcccgatttatgtgaaaaactttttgctcaatttttggctgaaaattatgtcatttttggactttttccgcatgcaatactttattttaattttagacatttaatgcttgaacaagcgactatgggcactagagaccggcgcaggacaggatcctgcgcaggattttgcaggatcccagtccgcaatcgtgcatatttggaaaatacaggatttgcaggat

SEQ ID NO: 44679 - DNA, 982 bp, Heterodera glycines
gagatagaaaaatttcctaaaaaagagatagccatttttctgagaaataattcacaattttccgcagctcttgcggtaatggaaaaaattttgaagaggctctgcggaacggattagcatcggggttacgagatagaaaattgtcctaaaaagagatagccatttttctgagaattaattcacaatttccgcagctcttgcggtaatggaaaaaattttgaagaggctctgcggaacggattagcatcggggttacgagatagaaaattgtcctaaaaagagatagccatttttctgagaattaattcacaatttccgcagctcttgcggtaatggaaaaaattttgaagaggctctgcggaacggattagcatcggggttacgagatagaaaattgtcctaaaaagagatagccatttttctgagaattaattcacaatttccgcagctcttgcggtaatggaaaaaattttgaagaggctctgcggaacggattagcatcggggttacgagatagaaaattgtcctaaaaagagatagccatttttctgagaattaaatcacaatttccgcagctcttgcggtaatggaaaaatttttggagagtctctgtggaacggataagcatcgggggttacgaagatagaaaattggtcctaaaaaagataggcatttttccgagaattaattcaccatttccgcagctcttaggcgaaagaaaaaattttgaaaggctccgcggaacggattacctccggggtaccaaaaagaaaaatgccctaaaaagagaagccttttttctgagattaattcccaatttcccgcactcttacgggaatgaaaaaaatttgaaaagggtctgccggaccggattaaactcgggggtacaaaaaaaaaaattggccttaaaaaagaatgccctttttctggagatttattcacaaattccccacctcttggggggaatggaaaaaattttgaa

SEQ ID NO: 44680 - DNA, 1241 bp, Heterodera glycines
  unsure (1)..(1241): unsure at all n locations
atacccatggcctgaaacggacgaaaaacatgttcctcccaggtgttgttaagctacttcgagttattatgcctattccttggcttctatttttagagcctaaaaagcctaaaagatccaatttttgcctattttggcgttttacctaaaatttactaacaaaaatgcaataaaaattaaaaatgcccccccccaagaatcgacctgaaaatttttataaatactccttgagtattgaaaagtcagtaattaattttttcatcttgttattcaacgtcacaaaaaaaaaagaaaattttttattattcttttcaatgaaaaagataagtattttttcgataatacatgttcaatggaatgcctttgtttcaaaaattatcacttaattaataataagatttatattaaatatataatttaaactgaattatataagtaaaatattattgtaataaataatacattgtttgtctgttaatgcattcatcagacattcatagttgagcagtgttctttttttaaatttatttttgtgtatttaaataaatatttaaatatttattctagtttttaacaccatataatttatgtcatttatgtaaaaataacatattcatattatgcgtttaggtttttttggtcattttgccttgtaagctgagcttagttcacggttaatgtcaaaagaattttgatgaaatctcaaatttgtttcactaatatttcgcacgaaataacaaaaatatatttccnngnatgtnnntnngtnngatgnntgctgcgnggtgtttgctgttggcgntttnntncggntnngntttntngttcnntgnttnttttctnntttttntngntnnttttcttnntttnngnnnttggtcgnnngnnnnntggttgtttngtttgcttgttgttngtccgcctttgcgcctccctttttgtgcctcctccgtttgcgccctcnncctttgtgtccgccngcgtttgnctttttcgcccgttttttgccnnnggtgtgtnnccggnnnntcgttnnnggcgttctcttcnnncgcttgntnggnntttcttcntcgcnctgcctccgtncnnntcgtntgttcntgttcgtcccttcccggtggtggttgnttccgtggggctgcgtttctaaagccgcggggtatgtgtgttgtcggtggatgttggatccacagtaattaacaaggtaaagacgtgagataaatccttaggactctaga

SEQ ID NO: 44681 - DNA, 1000 bp, Heterodera glycines
tactcccggatacagattaaaacaatttttttcacccccagttttttttgtcatcggttgggtttggggttggacaaattgggtagtttttccccgcccaaactgttaccataccgtcactggcgcatcaattcgctgcacattgccttcctggagaagaatttcacgcgctttggcacacaacactttcacttcctgctcggttaggcattcacagcgcattaaagtttcaatttgtctaaaaaaaatggcaaatttttttgaatcaaaatttgttaggtatctaaaatataaaaacaaaaccataaaaacgagccattgataatgaaaaaattcgtgggcaattcgaggggcctagaaatcctttatttgatgaaaccattggaaaatgtgggcgcttttgagaggcctgtgaattggaagttggcaaatcaaaaatttggactgatttaagggtgtctagggcctagaactcggttttaatgccatgttaaaccaattttgcaattgaaaaattggtcaaagcctccaaacccaaattaccctaaaaacagtaaaatcagaaaccggcggcaactgccgcaccgccaaactgttcacctgtccaagtcggtgatgcgggcgcctcggcccgctgccaaagtgaccgcttcgtccagctcgcgcgtcgcctgctggtgctgttgtgcgtcactgttgtccgcttcgccgccatcgcgcagcgcggtcgacgtggccacactggcggcggacaatggccgatttggcgatgccgtggcatcattttctgtttccattatttttagtgtgaattaaacaatttattaattggcaccttaattcatgctcaagtaatgcttttctgtccgcactcaattagcgggaaatttatttattttccttgtgagaatttcatttggttgcgaaaaatacagtcctgaaaaattagccaaaaacgaaaaagaaaaccatcttttaaaataatttagaaaatacacat

SEQ ID NO: 44682 - DNA, 1079 bp, Heterodera glycines
tccttggccttcgaccgagcagcagttcagcgggacccttcaaattgggaagtgtgtcgtttggggtcgtccgatagctgatcagaaaaatgtcgatgatctccttgtttggcttcccctccccttttaattttctgaatgctctcttaaatgtgtcgacaaatctctccacttgtccatttgacattggattatatggagccgaaaataaatgtgtgatgccgttggctgcaacaaatttggcgaattctgagcttgaaaattgcgtgccattgtcagaaacaattgtttctggaattccatggcgtgtgaataaatagcgcaatttttcgattgtggaagttgctgatgaatttgccatctcaaatacctcagggtatttggaaaatgaatcaacgacaattaaaaatgttttgccgaagaatggcccagcaaagtcgatgtgaattcgttgccacgggccagttggttttggccatgaatggagatcggttttgatcggtgcctttgcagccaattggcacggctcacagttttggacataatcctcaatttctttgtccaatttcggccagaatatgtattggcgggcgagctgcttcattctcttcattccggggtggcctttgtgaaataatcggagaattttggcctgaaaaatcctcggaatgaccactctttcgccatacatgaggcagcctttcaaaatggtcagatcacttttgcgccgatggaaaagtttaatgatttccgattccttctcaatttgcttttcggttggccagccttggcggatgaatttgatgacattttgaatatttgcgtcatttttgctggcgatgaccaaatcctcgaatttgatcggcaaatttttcgaagctgaatggagactttcttccaaaattggttcggcggtgaccaaagcaatgacgcgttcgttttcctcttctccgccttttgcaatgagtcgggagagtgcgtctgcctgtccaaaatccgtcgttttaacgtattcaattttgaagtcataggccaacaaaatgagtgaccagcgcaacaatcggttgacgctgcactgc

SEQ ID NO: 44683 - DNA, 1019 bp, Heterodera glycines
  unsure (1)..(1019): unsure at all n locations
tgaatantgtcgcctgggccagcaaaatcctaggcagcctctaacgctccacttccactcaacagcgaccaacaaacggtctttgatgctgttgttaaggcaattcagtcggacccaagggatgcgactgtacctcgccgtttctttatattcggcgacggagggaccgggaaaacatttctgtttggccaaattataaggcgattgcggaaggtcccatacacctacaaagtgcttgctacggcatccactgggtgtgcggctatcttgctgccatatgggaaaacagcccattccacgttccgtctaggcagagaagtctcgctagacaagcttccaagcattccgcttgaaagcttctttgcccgacggatacgtgaggcccaactcatcatcattgatgagatcaccatgctgcacaacacggtgatagaggtcatcgaccgagtgtgcaaagaaatggcaattccccagcacaaggacctcctcttcggaggaaaaacggtcatattcagcggtgactttaaacagtcactgccggtcgtgcctcacgaaggcctaactgcacaagttacggcctgctttcaaaccaatccactgtttggtcagtttaccacaatgaaattgaccatcaaccagaggttgggccaagggcagcaagcgtacttgcaaatgtgccgccaaatcggcctcggagagaccggagaacacttctggattcctccgcagttcctcgtaaagagcagggaagagttgatagactttgtctatccaaacttccaacaactccttggcaatgacaaagagctgctcaatcgtttgattctcgctccgcacattgacacgtgtgatgagatcaacgaaatcatgatggcgaatgtgcctggtcaagtgcgcgaatatttgtcctcggataagccgcttgacgagcgtccactggacatcgatngaacggagtccgaagtggcagcgttgaaccggcgcacagactctgggatgctcccccacgtctgcgactc

SEQ ID NO: 44684 - DNA, 1038 bp, Heterodera glycines
  unsure (1)..(1038): unsure at all n locations
agaatgtgaaattctctcatttgttactttatgatcatttttgtctaattcgcaaaattacagctcattcttcgcgaaatataaactgaatcagtgtttgcggaatgaccgagctgataatcgccaataatcttcgattacaattttcttggtcacctttttggaattccaccatttcaactccttatcctctaaatataaactgaatcagtgtttgcggaagaccgagctgataagtcccaataatctccaatttacaattttcatgatcacttttgtgatattctcaatatttcaatttcttatatccaaatgtaatctgtataagtttacagtaggaaattgtaatttgggggttattggcgatttcaaatcgatccttccggaacactgatgctgtttatatttagagcgtaatgagctgaaaatgtcagaattcaaaaagtggggtcgcgaaaatagtaaatctgaggttattggcgcttatcaacctgatccgtctgcaacacttaaacagtttatatttaaaacctaattagcagaatgtgaaattctctcatttgttactttatgatcatttttgtctaattcgcaaaattacagctcattcttcgcgaaatataaactgaatcagtgtttgcggaatgaccgagctgataatcgccaataatcttcgattacaattttcttggtcacctttttggaattccaccatttcaactccttatcctctaaatataaactgaatcagtgtttgcggaggaccgagctgataagtcccaataatctccaatttacaattttcatgatcacttttgtgatattctcaatatttcaatttcttatatccaaatgtaatctgtataagtttacagtaggaaattgtaatttgnngggttattggcgatttcaaatcgatccttccggaacactgatgctgtttatatttagagcgtaatgagctgaaaatgtcagaattcaaaaagtggggtcgcgaaattagaaatctgagggtattgccgcttatcaacctgatcc

SEQ ID NO: 44685 - DNA, 1001 bp, Heterodera glycines
tcataggcgggatgttgtatattcccagcagcggtgccgcaaaattatccgaaaccgacccttttccggtcggcattttttttcattcacctttatggcacatcatcaattcatttccaatttaaattcttcaatttttaatggggcaaagtgcacctctctttctctctctcactttctgaaaatgccattttaattatgcgcaaattccgctcgccccattctctgctcgtcggcatcgccgtcggcgtttttcttggactttgcatcagcttattagacaataaaagcaaaatttacatcgcttttactgaagaagacacacaaaaaggtaaaagcaatgaattatttattttaaagaaataaatgtatgtatttagtgacaatttattcgaatttgccctcccatttaatgcgaatgggcaataaaaatgcgcaaacattgcattcactgaacatttggctacgttgcattgttttgttggcatcagatgaacaaaattggccagaaaagaatttgatggccattagagacacgtgggcgaagaaatgcaacgaaagtgggcaaaaaatgaaaaaataaatcattaccccaatcatttacagtgaaaaggatgctgtccagacctaccaactactgcgcgacacgatagtttatattactctacagaaaaagggggtttcgacttcaaaaacaaaatctcccggacgaaggccgagagcgccctgaaagtagtggaagggtcttacaactttttgaggcgcatctgggaaaaatagcaggtttttctcctccggtggtcaactgagtcccgagcggataatttctcacttttgcttgcggttgattgcccgtaactttatttctacaactctaatctatatatgcccggttgcgagggtacccctgccatactgtcctcttcttgctgagaattctttatttttataacatagcccaccccttgacctgctacaaaatggcaactgaaccgtgctca

SEQ ID NO: 44686 - DNA, 1105 bp, Heterodera glycines
  unsure (1)..(1105): unsure at all n locations
tcatgctcgagagcatttgtatgtgtataaaattatcaaaaaaagagatagccatttttctgggataacctctanatataaanatcctctgtgaaataaaatggcggttgtgcacagccctccctatcatgctcgagagcatttgtgaggtataaaatttatcaaaaaaagagatagccatttttctgggatagagtataaatttaaaaattccctcaaaaataaaaggtctattgcgcaccgccctccctatcatgctcgagagcatttgtatgtgtataaaatttatcaaaaaaagagatagccatttttctgggataaagtataaatataaaaattccctcaaaaataaaagggcgattgcgcacagccctccctctcatacgcaagagcatttgtaagtgtataaaatttatcaaaaaaagagatagacatttttctgggatagagtataaatttaaaaattccctcaaaaataaaaggtctattgcgcaccgccctccctatcatgctcgagagcatttgtatgtgtataaaatttatcaaaaaaagagatagacatttttctgggatagagtataaatttaaaaattccctcaaaaataaaaggtctattgcgcaccgccctccctatcatgctcgagagcatttgtatgtgtataaaatttatcaaaaaaagagatatccatttttctgggataacctctaaatataaaaatcctctgtgaaataatatggcgattgtgcacagccctccgtctcatacgcaagcgcttttgtgaggtataaaatttctcaaaaaaagagatagccatttttctgggatagagtataaatttaaaaattccctcaaaaataaaaggtctattgcgcaccgccctccctatcatgctcgagagcatttgtatgtgtataaaatttatcaaaaaaagagatagccatttttctgggataacctctaaatataaaaatcctctgtgaaataaaatggcgattgtgcacagccctccgtctcatacgcaagcgcttttgtgaggtataaatttctcaaaaaaagaatagacatttttctggatagagtataaatttaaaaattccctcaaaa

SEQ ID NO: 44687 - DNA, 881 bp, Heterodera glycines
cggtctccccataaatctggggcgcatcggttcggggggactgcccccgaaaacaaaaaaatcgattttttcaagtgtccgtttggggtactcaaacaattatggggagcaaaaatccaacgcagaattaaagtacaggctatagggaagctattccggaaggattcggtctccccataaatctgggcgcatcggttcggggggactgccccgaaaacaaaaaaatcgattttttcaagtgtccgtttggggtactcaaacaattatggggagcaaaaatccaacgcagaattaaagtacaggctatagggaagctattccggaaggattcggtctccccataaatctgggcgcatcggttcggggggactgccccgaaaacaaaaaaatcgattttttcaagtgtccgtttggggtactcaaacaattatggggagcaaaaatccaacgcagaattaaagtacaggctatagggaagctattcccgaaggattcggtctccccataaatctgggcgcatcggttcggggggactgccccgaaaacaaaaaaatcgattttttcaagtgtccgtttggggtactcaaacaattatggggagcaaaaatccaacgcagaattaaagtacaggctatagggaagctattccggaaggattcggtctccccataaatctgggcgcatcggttcggggggactgccccgaaaacaaaaaaatcgattttttcaagtgtccgtttggggtactcaaacaattatggggagcaaaaatccaacgcagaattaaagtacaggctatagggaagctattcccgaaggattcggtctccccatatatctgggcgcatcgtgtcggggggggactgccccgcaaacaaaaa

SEQ ID NO: 44688 - DNA, 1034 bp, Heterodera glycines
  unsure (1)..(1034): unsure at all n locations
ttttgtgcgttttcaaacacactattagtgctttatcaccgctacaatagaagacaaaaagttggtgtccaattcccgggtagggatttatagtgactttcagagatagccattttttgtcaataactatttttcgtgagttttcaaacacactattagtgctttattcagcgctacaacaaaagacaaaagttgatgtccaattcacggtagggatttaatcgtgacttcagagatagccattttttgtcaagaactatttttcgtgcgttttcaaacacactattagtgctttattcaccgctacaatagaagacaaaagttggtgtccaattcccggtagggatttaatagtgactttcagagatagccattttttgtcaagaactatttttcgtgcgttttcaaacacactattagtgctttattcagcgctacaacagaagacaaaagttggtgtccaattcccggtagggatttaatagtgactttcagagatagccattttttgtctagaactatttttcgtgagttttcaaacacactattagtgctttattcagcgctacaatagaagacaaaagttggtgtccaattcccggtagggatttaatagtgactttcagagatagccattttttgtcaataactatttttcgtgcgttttcaaacacactattagtgctttattcagcgctacaacagaagacaaaagttggtgtccaattcccggtagggatttaatagtgactttcagagatagccattttttgtcaagaactatttttcgtgcgttttcaaacacactattagtgctttattcaccgctacaatagaagacaaaagttggtgtccaattcccggtagggatttaatagtgactttcagagatagccattttttgtcaagaactatttttcgtgcgttttcaaacacactattagtgctttattcagcgctacaacagaagacaaaagttggtgtccaattccagaaggtgatttaatagtgactttcangagatagccattttt

SEQ ID NO: 44689 - DNA, 1400 bp, Heterodera glycines
ttttgttggggcaaaggcccccaaccatttcgaataccaatggattggggtggctaaactccatatttccagaaatagcaatggcagtttttttttaaaggccctacgaagtatgtttcgacaaacatccctgtacaccataaatcgattgccaaatttagtcgaactatattaatttttcaaaaaatgatttcatctttttttatggttagcgcatatgtctctagccttatagaaacggttaccgaatctgcgaggaactacttttttgagaatttctatagattattatttttgcatgaatccttcgcttaaattcccatttatcttataaagtcagattaaattaattaccccgatttgttttagaattggtccaaacacgcttgctaatagattttcttttcgaaaagagaggcgaggaaaaataaaggttgcatccaaatgtaattttttttacactgaagcatttggatggcttgctgtgtacagttggctaagtcttatttgcaagaagcagcagaacttttgtttgggccaatgaccccaaaccattcgaatagcaatcgattgggctgactagactccatatttgcaggaatagcaatggcaggtctatcttaaaggcctgacgagttatgtttcgacaaacatcctgtacaccataaatcgattagcaaatttagtcgaactatataaatttttcaaaaaatgcttttccatcccctcctcttcctccttgtccccctgcctctccctccccctcctcctcatccccttttcgcttcatccgcccccccaaattacttcgttttgttcgttcacttccctccgatttcgctggtcattttgtttgcccctctccaatgcgtcttcacttgccgtgctaaacaaatgtcgcctttcggtcagcccggccgaaagtggcggtgttggccaattcaaatcgcttccgacgacgggaaattttgggggaggaaaacagcggacaaatgccgaattggacggagccaacggaagaacggacgaagcggaagaagaacaggggatggaccagcagctgggattggtcctagacagaagaaacaaccgttccatattgagagggaaatggcatttcgcattttatcgaattgacaaaattctgaaaatgccgtttttgacgaaaatggggaggaggtaataggatttcaaattcgaattcgttttgaattggtcggatgactaaaaaaaactcgcctcggtttggccttcgcctgcgatgtctgttgttctccctttgttccattgttttgttgtttgtcgttgtgtgatggaactgtggtgacactttgcggaccggcagacgaagaagacgaatgtccggacgaatagagcggacttcccatggcaatgccccg

SEQ ID NO: 44690 - DNA, 439 bp, Heterodera glycines
gcgattattggcgggatgtgtgcaaatataagttatctctgggaccaggaacgcataattgttgaaatagaaaaattggtggcgttacatggaacaaatcaccgggaaagtcgcgaagtggatttcgattgaaattgtaataattaataaaaatcacaaattaattttcgttttatttgttaaatttgaattgttcaggaaaatgtgtggccatttgaaatggagagacaggcaaaggctgcacttggaattgtggaaatcacggacccttacgcatacaacaaaacagcgaacacaatcaacagcgcagtttctgaacgcggacctgaaaagtatttataataaaaagtttaaaaaatttgaaacgagtgaattttcttattgtttattagagatcggatcgggcggatagaaaagctgacatttgccaaagaatttg

SEQ ID NO: 44691 - DNA, 832 bp, Heterodera glycines
ctccagcaaattcaataaaatatttctactacaaattcctttatttccccaaaaaaattttttactcaaattgttatacaaaccaattttccctttgctggaggtcgacttttccgcttctttaaataaatttcaactcatatcacaactgcccattgacctattttttcatcacaaaatatacagcgttagttcttcaaataattattaaatataataaaaaagtcttctttttttgtggaaaaattatcaactataaaaattctagaaataaatattcataattatataaaaaaatatattcaattcaaaatattaaaaaagcaaaattgtaaaaatataagtaattaaataaaagtaaaataaataaattttaacattttaactttactctgcaattagaatttataagcaaattcctgttttgattactaaaattcaagcaaaaatttttattcttttctgattttgattatgatttattgacaatgccaagcaaagtaaaaccgaataataaaccgataattcttatatttatattttaaagagaaaaaatatatgttttaaattcgccgtcgcctgctttacggaggaatggaacaaagcgcaactgaggaacaatttgagtacgacgaaatggaaaacggcggagaacaaaatgtcaacggtatggtgcaacaaaatttggaaaatggagttgaagaaggggatggaggggattttggaaacgatgcgttggacgcacatggattgcgagccttttcaacacctcttaacgaacaaaacctaagcgccctgcagcgagacctaagaatgcaactcccggaaaatt

SEQ ID NO: 44692 - DNA, 1507 bp, Heterodera glycines
  unsure (1)..(1507): unsure at all n locations
aaaaaatggggtagtaaaatcgtattacgctcaaaagcttctcaaacaatttagcgctccaattccttctacaatcgcctttatacatcccattatgagcgctaaaattatcagagtgccgaaaatcgcatgtatctaagcctagcaaaaatggtgtaagtaaaaatcgtattacgctcaaaagcttctcaaacattttagcgctccaattccttctacaatcgccttatacatcnccattatgagcgctaaatttatcagagtgccgaaaatcgcatgtgatctaagcctagcaaaaaatggtgtaagtaaaaatcgtaattacgctaaaaaagcttctcaaacaatttangcgcttccaattccttctacaattgcctttatacatcccattatgagcgctaaaattatcagagtgccgaaaatcgcatgtgatctaagcctagaaaaaatggtctaagtaaaaatcgtaattacgctaaaaaagcttctcaaacaattttagcgcttccaattccttctacaattgcctttatacatcccattatgagcgctaaaattatcagagtgccgaaaatcgcatgtgatctaagcctagcaaaaaatggtgtaagtaaaaatcgtaattacgctcaaaaagctcctcaaacaattttagcgcttccaattccttctacaatcgcctttatacatcccattatgagcgctaaaattatcagagtgccgaaaatcgcatgtcatctaagcctagcaaaaaatggtgtaagtaaaaatcgtaattacgctcaaaaagctcctcaaacaattttagcgcttccaattccttctacaatcgcctttatacatcccattatgagcgctaaaattatcagagtgccgaaaatcgcatgtgatctaagcctagaaaaaatggtctaagtaaaaatcgtaattacgctcaaaaagcttctcaaacaattttagcgcttccaattccttctacaatcgcctttatacatcccattatgagcgctaaaattatcagagtgccgaaaatcgcatgtgatctaagcctagaaaaaaatggtgtaagtaaaatcgtaattacgctcaaaaagcttttcaaacaattttagcgcttccaattccttctaccatcgcctttatacatcccattatgaacgctaaaattatcagagtgccgaaaatcgcatgtgatctaagcctagcaaaaaatggtgtaagtaaaaatcgtaattacgctcaaaagcttctcaacaattttagcgcatcaattccttctacaatcgcctttatacantccattatgaacgctaaaatatcagagtgccgaaatcgcatgtgatctaagcctagcaaaaatggtgtaagaaaaatcgtaattacgctcaaaaagctcctcaaacattttagcgcttccatttcctctaacatcgcctttatacatcccattatgagcgctaaaatatcagagtgccgaaatcgcatgtgatctaagctagaaaaa

SEQ ID NO: 44693 - DNA, 967 bp, Heterodera glycines
ccatttttctgagaattaattcacaattaccgcagctcctgcggtaaatggaaaaaattttgaagaggctctgcggaacagattagcatcggggttacgagatagaatattgtcctaaaaagagatagccatttttctgagaattaattcacaattaccgtagctcttgcggtaatggaaaaaattttgaagaggctctgcggaacagattagcatcggggttacgagatagaatattgtcctaaaaagagatagccatttttctgagaattaattcacaatttccgcagctcttgcggtaatggaaaaaattttgaagaggctctgcggaacagattagcatcggggttacgagatagaatattgtcctaaaaagagatagccatttttctgagaattaattcacaatttccgcagctcttgcggtaatggaaaaaattttgaagaggctctgcggaacagattagcatcggggttacgagatagaaaattgtcctaaaaagagatagccatttttctgagaattaattcacaattaccgcaactcttgcggtaatggaaaaaattttgaagaggctctgcggaacagattagcatcggggttacgagatagaaaattgtcctaaaaagagatagccatttttctgagaattaattcacaatttccgcagctcttacggtaatggaaaaaattttgaagaggctctgcggaacagattagcatcggggttacgagatagaaaattgtcctaaaaagagatagccatttttctgagaattaattcacaatttccgcagctcttgcggtaatggaaaaaattttgaagaggctctgcggaacagattagcatcggggttacgagatagaatattgtcctaaaaagagatagccatttttctgagaattaattcacaatttccgcagcacagtacggtaatggaaaaaatttgaagaggctctgcggaa

SEQ ID NO: 44694 - DNA, 806 bp, Heterodera glycines
gggttgcgagataaaaaattctcctaaaaagagaaacccttttttgagaaatttatctcacatttcccccctcttttgggaaaagaaaaaaatttgaagagggtctcccggacggagtatcacggggggggtgagatataaaaatgtctcaaaaaaagaaaaccatttttttgagaataaattcacaattttcccagctttttgggtaatggaaaaaattttgaagaggctctccggaacggattagcatcgggggtgcgagatagaaaattgtcctaaaaagagatacccatttttctgagaattaattcacaatttccgcagcttttggggtaatggaaaaaattttgaagaggctctccggaacggattagcatcggggttacgagatagaaaattgtcctaaaaagagatgccatttttttgagaattaattcacaatttccgcagctcttagggtaaggaaaaaattttgaagaggctctccggaacggattagcatcggggttacgagatagaaaattgtcctaaaaagagatagccatttttctgagaattaattcacaatttccgcagctcttagggtaatggaaaaaattttgaagaggctctccggaacggattagcatcggggttacgagatagaaaattgtcctaaaaagagagccatttttctgagaattaattcacaatttccgcagctcttacggtaatggaaaaaattttgaagaggctctccggaacggattagcatcggggttacgagatagaaaatttcctaaaaagagatagccatttttctgaga

SEQ ID NO: 44695 - DNA, 724 bp, Heterodera glycines
  unsure (1)..(724): unsure at all n locations
aaaaaaaaaaaatcaattttttccaatttccttttgctttactcaaacaattattcnaatcaaaaatccaacccacaattaaactacattctatactaaacctattccccaattattctttctccccataaatctacacacatcatttcatggggactgccccgaaaacaaaaaaatcaattttttcaagtgttccgtttggggtactcaaccaattatggcaaccaaaaatccaacccaaaattaaactacaaactatataaaaactattcccaaagtattcgttctccccataaatctaacctcatcgattcgaaaacacttccccgaaaacaaaaataaatcaattttttcaactctccttttacactactcaaacaattatantcaacaaaaatccaacccataattaaaatacactctatantaaatctattccaaaaatattcattctccccaaaaatctaatctcatcatttcccaacaactcccccnaaaacaaaaaaataaattttttcaattatccttttaaaatactcaaacaattatctaaaccaaaaatccaacccaaaaataaattacacactatatggaaactattccccaancattccaactccccataaatctcatcacatccattcaatacaactaccccaaaaacaaaaaaatcaattttttcaaatntccttttaacctactcaaacatttatnnanaccaaaa

SEQ ID NO: 44696 - DNA, 1619 bp, Heterodera glycines
atcgatttttttgttttcggcgtagtccccccgaccctctgcgcccagatttatggggagaccgaatccttccggaatatcttccctatagcctgtactttaattctgcgttggatttttgctccccataattgtttgagtaccccaaacggacacttgaaaaaatcgatttttttgttttcggggcagtccccccgaaccgatgcgcccagatttatggggagaccgaatccttcgggaatagcttccctatagcctgtactttaattctgcgttggatttttgctccccataaatgtttgagtaccccaaacggacacttgaaaaaatcgatttttttgtttcataaatatttttttcagaaagtcatgcgcacccgtccgatctggcaagttaagcaacgattgctgactagccaaaaggttcggtgccgtgatgaaacgaaccagcactgcttaccccgcggcacccggcacggtcccccgaaggaatggatttaattaaattctctccttcggggatttttttccattaggtcttaaattttaaaattttttaattgctttttaaatatgccaaaaaatgtaggcttaatttttttagtgaaattcgatcactcatattttttgctaatgagcagaagcgtaccaaactttgcagggatactccccggtaaaggactaacttacactgaaatgagcgccgagctagctggctcaaaaaaatttttcgaaaatctgagtctttcgtttttatttatttgcaaaattaattcataaatattttttcagaaagggttctgaaacgcaccaaattttatttacatgttagtttaggcactctgatgctttttctatcaataatggaggtgaataaaattttaattgctttttaactttgggaaaaagtttaggcttaactttttagtgaaagtttgatcactcatatttttttagtctaatctactcaaaacggttcagaattcaataaaaataacattcacggtgcgaaaaatggggtttgacaagtttattggggaaaaaaagactttacaaaataatacccctgggagaagggagtgggaaacatgatttcaaaattttcaattttttctagtctaatctactcaaaccggttcagaattcaataaaaataacattcacggtgcgaaaaatggggtttgaaaagtttattttgaaaaaaagactttacaaaataatacccctgggagaagggagtgggaaacatgatttcaaaattttcaattttttctagtctaatctactcaaaacggttcagaattcaataaaaataacattcacggtgcgaaaaatggggtttgaaaagtttattggggaaaaaaagactttacaaaataatacccctgggagaagggagtgggaaacatgatttcaaaattttcaattttttctagtctaatctactcaaaacggttcagaattcaataaaaataacattcacggtgcgaaaaatggggtatgaaaagtttattggggaaaaaaagactttacaaaataatacccctgggagaagggagtgggaaacatgatttcaaaattttcaattttttctagtctaatctactcaaaacggttcag

SEQ ID NO: 44697 - DNA, 1218 bp, Heterodera glycines
tttcatagtttttattacaaaaaaattttgcacaacaccatggttcccccttttgtttttgataaaattcaaaagacttcttttaagtataaatacccaaaaccggactggcgtccattttcccttttcaaaacgaagctgaccctaaccattttttgagccaaaaacgaaatgaatccgcttttgtcacctttaccttgtccaaaatagcatctgtcaacttttcttgccggaaatgctcataacccgctgtttgactgactgctgactttcggccgcagattaacgttggactatagctccaacaacctcaaacacagcaatgccacccccctcatattgctcatcagagtatgaacaatatccaactgagggaccgtccaacagttttgtccacacttccgtttgacctcggcttgaatttgagtgaggaggagcgcaaagcgaaggctcgcgtgcctttgccttatttggacgcgcaaacagagaaaggtcaacactttggaagtttttcatttgtttggacagctaacaaaatgccaaaatcgaccctttaaaggtttggttggtctcaacatttcacacagcggcccaattttgggctccaagtacaattatgctggatttttatttagtaatcagaacgccaaaactttgcaaaacttaaaatttttttgggattttcccttgtaaaaatagaagagccgatctcgagttaaaaacataacttcgaaaaaataaacagggattcgatagagggggtcaaaatatgggcctatgcaaaatttcaagaaaatctgaccctaggaaaaattttttgacccaggacaaagttttttctttttctttcattttagtgtactatttccatgtctctaacatataaaataacacatgaaacatttatttgccaataaacaattttaataatcttttgactaaattagaaatattcttcagaattttcccttcaaaatgagcataaaatggttttatttgctctagtattcaccaagttataagctaaaaaaatttcataaaatcaagggtaaaatatagtgtgtaccttttactgtttgtatttgttcttttggcgttctgtatttattattattttatttatttgctttaaaaaattgaaatttatacacaaacacaaggaggatttgaacctgagaccccctttttgatgactaactcacagaccactaagacgaa

SEQ ID NO: 44698 - DNA, 785 bp, Heterodera glycines
ttttgggtaaaaattttcaaataacatagtaaaatgaaggtctggcgatgccgattttgatggagtttgttagtaaaattgagtaaatttccaaaaaattggccatttcttgttaaattttcatttcgggggggggggggtggatgtcccgaaaaggagccgacccatcacaattcaatttttcaaatcccataattttatattgccccatttttcgcgtttttgatttaaatataattattttcatttaaaaataaatgcgcaaaattaaaattgtgcaaataattggttcatccgtccatcatcatcaatcacaacagtgtgcctttggttgccctctttttgctccgaatgccttctgttgctgcgtttgtgccactcgtcgtcccttgcgcctcctccgtttcttcgtcgccgatcattcgcttccgaatcattcctttgcgtcgcatttgctgtattgaaaatatacaatatttttataaccacagggggagtatttccaggaatcaagagtcgggaatcccggtctcaaaaaaaatagcagagtgagggatgaatttttatttaatttttccaaattttcataagttaaaagtctcaattttcattaaaaaaagtttttttttgctgagctattatttttccaaattttaaaaaatttgaagcagttgtaatttactgggagcagtttgttttccctcgaaaaatcaaagatagaagaaattttttttctagaataatgttttccaaaaaaaaaaaaattaataaaacagggatcaggt

SEQ ID NO: 44699 - DNA, 724 bp, Heterodera glycines
cagcatttcaatcactgggactcaattctgcatttcaatcactggcactcaacccaccagcatttcaatcactgggactcaacccaccagcattccaatcactgggactcaacccaccagcatttcaatcactggcactcaacccaccagcatttcaatcactgggactcaattctgcatttcaatcactggcactcaacccaccagcatttcaatcactggcactcaacccaccagcatttcaatcactgggactcgattctgcatttcaatcactggcactcaacccaccagcatttcaatcactgggactcaacccaccagcattccaatcactgggactcaattctcctgcatttcaatcactggtactcaattctcctgtatttcaatcactgggactcaacccaccaacattccaatcaacgggactcaaccctctagcatttcaatcactgggactcaatccaccagaatttcaatcactgggactcaacccaccagcatttcaatcactgggactcaacccaccaacatttcaatcactggtactcaacccaacagcattacaatcactgggactaaacccaccagcatttcaatcactggcactcaacccaccagcatttcaatcactgggactcaatcatgcatttcaatcactggcactcaacccaccagcatacaggcactggcactcaacccaccagcatttcaatcactg

SEQ ID NO: 44700 - DNA, 947 bp, Heterodera glycines
ccccccccccccgcccttcaaaattttgaaaaataaataaaataataggagactcagaattttgaaaattttttataaaaactgatgacaagctaatgtgataaaacaggttaattcttttcctttcagtatccctgcaaagtttggggcgcttctgataagtttctgaaaaaaaaagataagcctaaactttttggcctgtttaaaaaggaattaaaaatttttaaaaatttattcatctccctttttgatagaaaaagcatcagagtgcctaaactagcatgttttaaaatttggtgcgtttcagagcattttctgaaaaaaatatttatgaattaattatgcaaaaataaataaaaatttctaaaaatttgatcgtccataaataatttgtaattgatcaggggctcaccaaattttgcagggatacgtatcggaacactacaaatgcttactaattttcctagattttttaaacccggtgaaaattttttgcagacaccaccattttgcacttaaaaaaatttcaaaaaactttaaaaattcatagaaaatttaaattcataggtactactgctaaatcaacgcagagacgcctttccttgacctttttaggcccctgcaaaatctggtgcgcttctgatcactactcgaaaaatgagtgattgaattttcactaaaaagttaagcctaaactttttggcctgtttaaaaaggaattaaaaatttttaaaaattttattcatctcccaatttgatagaaaaagcatcagagtgcctaaactaacatgtaaataaaatttggtgcgtttcagaaccctttctgaaaaaaatattaataaattaattatgcaaaaaacaaataaataatgaactctcttccttaataattttcctgcaccgaaggtactcactcggccgcttcgcggcctcgtggtgggccttcg

SEQ ID NO: 44701 - DNA, 1264 bp, Heterodera glycines
  unsure (1)..(1264): unsure at all n locations
gatcaggnaaattcatgccatgaattgaaaagtatttatttntattaaaatttgctgcttattctccgtaagaaagtttttgggaggaatttcacaaccttgccataggaaaaactcatatctgactcgtataaaacataactcgaacagtaggtatatttgttgtgcaattttatagtccagccttcgctagggctctcaccgcggtgtattttaggtgtgtctttgatgtatcaaaatttctctcggccgtgttgttgactgaaaaataaaacgaacttaaattattgcaatattgtttatacgaagtcttttgatattattctgacgacttccatgataataaatacttatacaaagtttatctttttatatatttcctcatcccaaacatggatggaaaataggcaataaatcgacaaatatttacaagttttgccatgctatttatctttcgggactcaatttatgacgaaaatatgggcttcaattattttttattttctactaacacttttctagtggatcaatttatagattcaggaaattcattgcatgaattgaaaagtatttatttttattaaaatttgctgcttattctccgtaagaaagtttttgggaggaatttcacaaccttgccataggaaaaactcatatctgactcgtataaaacataactcgaacagtaggtatatttgttgtgcaattttatggtccagccttcgctagggctctcaccgcggtgtattttaggtgtgtctttgatgtatcaaaatttctctcggccgtgttgttgactgaaaaataaaacgaacttaaattattgcaatattgtttatacgaagtcttttggtattattctgacgacttccatgataataaatacttatacaaagtttatctttttatatatttcctcatcccaaacatggatggaaaataggcaataaatcgacaaatatttacaagttttgccatgctatttatctttcgggactcaatttatgacgaaaatatgggctccaattattttttattttctactaacacttttctagtggatcaatttatagattcaggaaattcattgcatgaattgaaaagtatttatttttattnaaatttgctgcttattttccgtaagaaagtttttgggaggaatttcacaacctttgcataggaaaaactcatatctgactcgtataaacataactcgaacagtaggtatattttgtgtgcaattttatagtccagccttcgctag

SEQ ID NO: 44702 - DNA, 1213 bp, Heterodera glycines
  unsure (1)..(1213): unsure at all n locations
aagcagccgaatgtcccccaaaaaataaaaaaacgtgcgcgacgcgcccgtcctgaggtcgcgaagcggccgaatgccccacaaaaaattaaaaaacgggcgcaaagcgcccgtcctgaggccgcaaagcggccgaatacacttgctcatcacttatcaaacgcgcatgcactagcaacgaagtcctttgcgcgaagcgctcatgtcagcgcccgcccatatctaccaaaagtatactgcctacaccgagcaactgctgcgccacacgctagttatatatacgttagaatgataaggagtttcgtttcaaaaactaatttgagaagaacgggaatagctggggggctgaaattttgcacacaggggtaactcgagacggcgcatccgggaaaaatacggattttttggtccggtggccaactgagtcccagcggctcgaaaactgactttgccgccagtctcagtgttacgaaattttttgcttttgctttcagagcttagcggaccccaaaagcgaaatgccccaactatggcctacaactttgccagcaaaaaatttttgatcagatcaaaggcctgacctgtaggttaggcaacgtaagaatcactttttttggacacttcagtaccaggcgaatagctcgtaagggtttgctcggagcagggggtcgccagcggacttattgtagagctcaatgagctcgatttttacaaattttaaaatttcgaaaattttcaaaatttttcgagttaggcctaaaattcggtttttcggtttttgaattttatgattttttaacgatttttccagggaaaacgaagaccacttccaaaacatcgttttttgagctctatcgattagtgatgtttttagaaaattttcgattttttccaggaaatagaaaaattttttggcctaagcgggacatttgagtcccgggcccataactcgtcgggggttggttttagccaaaaatggccttagagcaaaattgtagagctttttaaatgctatcgaatggtgtactatatgtcgaaaaattttcaaaaattttcgagctaggccccctagaaatttttgaaaattttttttgggttgaagaatggagtgaaaatatttttctggggaatatttttgaggtgctgagcacgatatngacttttgttnttcgtttcataantttttagaattttttaaaaattcgaaattttt

SEQ ID NO: 44703 - DNA, 675 bp, Heterodera glycines
acaaaaataaagattcgatgggtgatcagtatgtgtactttttggtcagagtgatctctataccttctttatctatttgacaaaggctccctcatcactgatcagaagctaaattcatcgctttgaagggatataaaaacggcatgccatcctcatttacgatggcattggcattttcgcgccatcgttggcacattttgattactttgctcctccttctccttgtgccaccatcgcctgcagcagcttcatcagctaagtcggcaccacccgatgatggtggtgaattgccgcttcatccgtcctcaccgccccaccgcaaagcgccgccggctcagcaccagcaacatcggcactttattcagtacagcgccggcggcgccaggtccaagcggcaggcctaccaagtgtacctgggcaatgatgtaaaataattttgtaaaaattagtgaaaaaaatccaattcatcacaggtcagtgtgagcgttgaccgtggccaaaaggacagtgggccgtggggcccatggacagttgagcgcgaatgttgtaagtaccagcgcctttgatttttttatcagatcgggggaccagtcagtggtgattagtttccgcttttttccccttttaccatcaatctccctgaattttttaaaaatttttcttgagtaattttat

SEQ ID NO: 44704 - DNA, 1008 bp, Heterodera glycines
  unsure (1)..(1008): unsure at all n locations
ggatattcgcaaaggaaataatagtagaatgagagtcattaaatagaaataagaattcaaatgaaaattcatgggtgtttatataatattcatagttaatgggcatatgctacggcaatcaggggttggatttcttcagggatattcgaaaaggaaatatagtaaaatgagagtcattaaatagaaataagaattcaaatgaaaattcatggctgtttatataatattcatagttaatgggcatatgctacggcaatcaggggttggatttcttcagggatattcgaaaaggaaataatagtaaaatgagagtcattatatagaaatgagaattcaaatgaaaattcatggctgtttatataatattcatagttaatgggcatatgctacggcaatcaggggttggatttcttcagggatattcgaaaaggaaataataataaaatgagagtcattaaatagaaatgagaattcaaatgaaaattcatggctgtttatataatattcatagttaatgggcatatgctacggcaatcaggggttggatttcttcagggatattcgaaaaggaaataataataaaatgagagtcattaaatagaaatgagaattcaaatgaaaattcatggctgtttatataatattcatagttaatgggcatatgctacggcaatcaggggttggatttcttcagggatattcgaaaaggaaataataataaaatgagagtcattatatagaaatgagaattcaaatgaaaattcatgggtgtttatataatattcatagttaatgggcatatgctacggcaatcaggggttggatttcttcagggatattcgaaaaggaaataatagtaaaatgagagtcattaaatagaaatgagaattcaaatganatttcatggctgtttatataatattcatagttaatgggcatatgctacggcaatcagggggttggatttcttcagggatattcgaaagggaaatatagtaaatgagagtc

SEQ ID NO: 44705 - DNA, 791 bp, Heterodera glycines
atttgagtgttgagcagaaaaagagatagacgttttttcaaaattttcagagccaaactcgcccagaaagaaaatccagaaaaattagggtcgtcgctggtattccgaaaatgtggttggaattcatgtgagtgttgagcagaaaaagagatagacgttttttcaaaattttcagagccaaactcgcccagaaagaaaatccagaaaaattagggtcgtcgctactattccgaaaatgtggttggaattcatttgagtgttgagcagaaaaagagatagacgttttttcaaaattttcagagccaaactcgcccagaaaaaaaatccagaaaaattagggtcgtcgctattattccgaaaatgtggttggagttcatgtgagtgttgagcagaaaaagagatagacgttttttcaaaattttcagagccaaactcgcccagaaagaaaatccagaaaaattagggtcgtcgctactattccgaaaatgtggttggaattcatgtgagtgttgagcagaaaaagagatagacgttttttcaaaattttcagagccaaactcgcccagaaagaaaatccagaaaaattagggtcgtcgctactattccgaaaatgtggttggagttcatttgagtgttgagcagaaaagagatagacgttttttcaaaattttcagagccaaactcgcccagaaagaaaatccagaaaaattagggtcgtcgctactattccgaaaatgtggttggagttcatgtgagtgttgagcagaaaaagagatagacgttttttcaaa

SEQ ID NO: 44706 - DNA, 656 bp, Heterodera glycines
atagggccataatttgtatgattttgcatattttttctgcgcatatgctatgaagaaaggagctcaaaaatagcatttctagtaaaattttttgatttggggaaggttttactgcatataaaagcatattttgggggttttcgagaataaatgcatatttggccatttttgcatttttagaacataactcggtcatttttggcaaattttcttaagaaaaatgcaataaaaatgaaaaatgcacccctaaggatcgatctttttgggaatttaaaaaatatacccttgaaaatagaaaaattttgaatttttgtaagaacttttgaaaaaaaattgttgatataagaaaaatgtaatattgttttagcaaatgacaaaaattttaaaaattcgaaattgcatatatacactttgaaaatcaaatttttttttcaattatctaaaaagccacttttttaaagtcaattctgtatttttacacaattttgctttttttttttgagagttagaagccattttgggtaatttttaaggcatattttagtgcatatttgggcatttttcgggtttttagggcatatttgggggatttttagtgcatattttatgcgcatatttgacatattttagtgcatacaacttataaccctagtaat

SEQ ID NO: 44707 - DNA, 1015 bp, Heterodera glycines
  unsure (1)..(1015): unsure at all n locations
aaatagcttctgagataataaggtttatcataaaattcaaattaaaaataaccctcaannttattggtatgaacgatactttccaaacatgcacacgttttgcgctcgagctatttatcatcgggcttgtcaatccaaagcgaaacaacaaagatgctgttttgaacgaataaagggcataggttattttgaagaagtgtcaaagaacatgcagcaataagcctgcaaaatctaataagtggaaaatacatgagtatagaatttattttcagaaagtgtccacagacttttggaaaaatatatttgcaatttatcaacaattttgagaagtgagttagaaatgataaacttcacgattcaaaccaattttcgttgctctaattaaccgggataaaaacattcgaatcaattaaatagcttctgagataataaggtttatcataaaatttcaattaaaaataaaccctcaattattggtatgaacgatactttccaaacatgcacgcgttttgcgctcgagctatttatcatcgggcttgtcaatccaaagcgaaacaacaaagatgctgttttgaacgaataaagggcataggttattttgaagaagtgtcaaagaacatgcagcaataagcctgcaaaatctaataagtggaaaatacatgagtatagaatttattttcagaaagtgtccacagacttttggaaaaatatatttgcaatttatcaacaattttgagaagtgagttagaaatgataaacttcacgattcaaaccaattttcgttgctctaattaaccgggataaaaacattcgaatcaattaaatagcttctgagataataaggtttatcataaaatttcaattaaaaataaaccctcaattattggtatgaacgatactttccaaacatgcacacgttttgcgctcgagctatttagcatcgggcttgtcaatccaaagcgaaacaacaaagataatggttgaacgaataaagggcataggttatttgaagaag

SEQ ID NO: 44708 - DNA, 1270 bp, Heterodera glycines
  unsure (1)..(1270): unsure at all n locations
agtactattcttttaccttcatttattttgttgtatagttgattccgggagagcgtccggatttgaaaatttatcaaaaataaagaagtacaaaacttacttaaanaacacaaaaatgagaaataaaaacgatggaagcgctcctttcagaaatacacaaaataggtattcaattgagtttgcgttcgctaaaagactatgtcggcagaataaaaaaggtctcaacttatactaatttcctgataagtacgtctttacataattttcaaggtttttcagcttgatgagactagtcaccgttcagtatcagaccaatcggagcaaactatgccaaatacccaaaagttgtccatttttttttcttaaattattttaaaattaagtccgttaattcaaccccgctatgtaaagtgcttttcaaaaaaagataatgaaattgtttatctaatcggagaggaaaatgtgtggcgcaaatttatgtcgacaaatttcgtggaaccaatatataccttgtatgtactggttgcaaagaaatccaacgtttaaaaaaatcaaggttaataacatttttaggttataattttttcaatcattcagaacccctataatagcacgtgctattatacgagacgacaaacttttttttacaaaagctgaacaccataatgattgcatggctcatagtttagaatttctagaatctgaacaaatagagttatctcagcgacggaaaatattagaatgcacagaaatatggcaaaatgttgatccaaaatccctatgggccgaggttagatcaaatattaaagtccaaaaaaatacctaaaatcagggtcgcggaattgcgatgaagaaggacgttgagctaggaaaagacatagaaaatgatacatcttactcgctgaattacccaacttggcaaaatatacgtcgcacttacttgcgtagaaaagacagagcaattgcgcatggtcagacagtaaaagaggatccatttgacatcccagaaaaattacaattaactcggtttggaagtctaaaactcatgcttggaaaaagcattgcttctaacgatttgtacgattactttaaccagggcttcccatgtaaaattataccttaggtggctaatatatcgcagccgtaaagatggtgtactgatttttgctagtgacattcaagtacgggcggtccagaattgaaaaattttttgtcgccgatggcacatttgaactttgtcccaaaggctttgctcagatctggacttaca

SEQ ID NO: 44709 - DNA, 1048 bp, Heterodera glycines
  unsure (1)..(1048): unsure at all n locations
tatgggcccgggactcaaatgtccgnctcaggccaaaaattttttctatttccgggaaanaatcgaaattttccaaaaaaaaataccagtcgatagagctcgaaaaactgttgcttggaagtggtctccgtttttctgggaaaattcgttaaaaattcctaaaattcaaaaacccgaaaaccgttttctaggcctagctcgaaaaattttgaaaattttcgaaattttaaaatctggaaaaatcgagctcaccgagctctacaataagtctgctggccaccctgcgctcaggtcaaagcctaatgagttattcaacggggactgaactgggcaaagttggtactgaaaagttgccaatttctgcagcccttccaagtataggtagaggcctggaattttttttgaaaattagaaaacacttcaacttagtttcctaccagcaagcattttttgatcagagttttagaaaaaaagttatgggccatcaaacgcaagcaaaagtgagaaattggccgccaggactcagttggccaccggagcggaaaacccttatttttcccagatgcgcctcaaaaagttgtaagacccttccactactttcggggcgctcccggccttcggccgggagattttgttttttgaaacgaactgcaacgtttctctatagtagtataaactagcgtgtcgcgcagtaattgctcggtgtagacagtatgctttttgtatgtatgggcgggcgctgacatgagcgcttcgcgcaaaggacttcgttgctagtgcatgctcgaattcaaaattcaaaattttaataggcttatgtttttttcaaaattttaaaggcgacatttgcagcttcgcggcctcagacgggcgcttttgcatccgtttcttaaaattttgttgggcttggacgggcgcttcgcacccgatttaaattttgttggggtcaaacgggcgcttcgcgcccgttttttaattttttgggaattttcggcagcttcgtggccttaagacgggcgcttcgtgcccgtttttagactttgtgggg

SEQ ID NO: 44710 - DNA, 853 bp, Heterodera glycines
ggaggggggggggcgaaggcccaccacgaggccgccttcggagcgagtgagtaccttcggtgcaggaaaattattaaattttaaaaattttttaattgctttttaaatatgccaaaaaatgtaggcttaacttttttagtgaaaattcgatcactcatattttttgctaattgagcagaagcgtaccaaactttgcagggatactccccggtaaaggactaacttacactgaaatgagcgccgagctagctggctcaaaaaaattttcgaaaatctgagtctttcgtttttatttattttttgcaaaattaattcttaaatattttttcagaaagggttctgaaacgcaccaaattttatttacatgttagtttaggcactctgatgctttttctatcaaaaagggagatgaataaaatttttaaaaatttttaattcctttttaaacaggccaaaaagtttaggcttaacttttttttcagaaactgatcagaagcgcaccaaactttgcagggatactgaaaggaagagaaataacctattttaaatattatctagtcagttcatttaaataatttttatccaaaaaatttttttttgggttttcggggcagtccccctgaaccgatgcgcccagatttatggggagaccgaatccttccggaatagcttcactatagcctgtactttaattctgcgttggatttttgctccccataattgtttgagtaccccaaacggacacttgaaaaaatcgatttatttttgttttcggggcagtccccccgaaccgatgcgcccagatttatggggagaccgaatccttcgggaatagcttccctatagcctgtac

SEQ ID NO: 44711 - DNA, 1033 bp, Heterodera glycines
gagcatttgtatgtgtataaaatttatcaaaaaaacctccatccatttttctgggataacctctaaatataaaaatcctctgtgaaataaaatggcgattgtgcacagccctccgtctcatacgcaagcgcttttgtgaggtataaaatttctcaaaaaaagagatagccattttctgggatagagtataaatttaaaaattccctcaaaaataaaaggtctattgcgcaccgccctccctatcatgctcgagagcatttgtatgtgtataaaatttatcaaaaaaagagatagccatttttctgggataacctctaaatataaaaatcctctgtgaaataaaatggcgattgtgcacagccctccgtctcatacgcaagcgcttttgtgaggtataaaatttctcaaaaaaagagatagacatttttctgggatagagtataaatttaaaaattccctcaaaaataaaaggtctattgcgcaccgccctccctatcatgctcgagagcatttgtatgtgtataaaatttatcaaaaaaagagatagccatttttctgggataacctctaaatataaaaatcctctgtgaaataaaatggcgattgtgcacagccctccgtctcatacgcaagcgcttttgtgaggtataaaatttctcaaaaaaagagatagacatttttctgggatagagtataaatttaaaaattccctcaaaaataaaaggtctattgcgcaccgccctccctatcatgctcgagagcatttgtatgtgtataaaatttatcaaaaaaagagatatccatttttctgggataacctctaaatataaaaatcctctgtgaaataaaatggcgattgtgcacagccctccgtctcatacgcaagcgcttttgtgaggtataaaatttctcaaaaaaagagatagccatttttctgggatagagtataaatttaaaaattccctcaaaaataaaaggtctattgcgcaccgccctccctatcatgctcgagagcatttgtatgtgtataaaa

SEQ ID NO: 44712 - DNA, 1065 bp, Heterodera glycines
tgagcgagtgcagacggaacgaaagaggaatggcgaaaatggagggagaagaaagtgaggaggacatgaggaggaagtggcgaattgggaggacttgccaatcggacaaatttttatcacctaattcgatgatcagggacattcatttttatttttgcccaaattctcctttttctttgcattaattatgttttaattttaaatgttttcaatcatttaaattgttaatttctatttctcatttcctctcctattatctccgacacacatctcttgtaaattgacggcggtctcatccgccaaatttaagccattcattctttcccattctccctctcttcacttcacttcgacaaacacaatttaaaatgctttaaaacatttttattgctcttcgcatttccatcaaataaatcacaaactttttgaaaagaggcggaaaaccatttaacaatttattggcattggattttcactcatttcgtcaaatcacattctcacctcaccaagggaatttgactcaattcgaccactgcgaccaattgacacggacaaccattgcgccggacaatcgggaaacattggacaaattggaaattggacgcactgacaatttgcaaattggacgctctgacaaattggaatttggacgcactgacaaattggaaattggacgcgtttgatccaaatgtatggcggatcaaaatcaagaggtcactgtttgtgaattggcgaatccggcaagggaaagaaaccaaaggaaattgggttcctttctcacagtttatgtgaaccacttctcaaagtggaagaggattagaaatacagtggcgtatattaggcgaatttacaagggacctctccaatttgtacaacgaattgagccaattcaggaacgtaaactgctcaaagcaagtagtgaaactataaaaagaattaagcctctcacggcggatgaattaagagaagctgaggaagtaattatcaaagagatgcaagtgaattttcctccagatggaaatacaaggaggaatttacaaatgttcacagacgagaatggtatat

SEQ ID NO: 44713 - DNA, 580 bp, Heterodera glycines
atttccacgtattcctccccccccccattttcctaatttggttcatttctcctcattttcggtccctttgtccaatgaatgcgtcgctttgtcttcgctttcgctgtcgcgcggttacaattatcgcgatcaaattgtgattaaccccgaaagattggccaattacggacaatgcatcagcaaattctttgaggagcatttggataacgccgacgaaattccatacattcgcgcgggggagggatattttgacgtgcgattgaaagaggtgagagagaaacagagaccggggagagagataatgggaaagagagagagacggggaaaaacgaataggatataatggagaagagattgagtgagataattgaagagagagacaggggaaagagagacggggagacgccccaacgattgggtgttaaggatagatggatttgaattttgaccgaaccgggtgatttgttggtttttccttcccgaattttcccccgattccccggttcgaaaaaggttcttccgaaggtcctaaatatcctaaatggcccttgccccccccccccccccccgcccctcctct

SEQ ID NO: 44714 - DNA, 332 bp, Heterodera glycines
  unsure (1)..(332): unsure at all n locations
acgccaagggattttcggtctacaggcatcgcgaggacgcattcataattttgtggacgactttcggccgcttcgcggcctcaggacgggcgctttgcgcccgtttttaaattttatgggggatattcggccgcttcgtggcctcaggacggttgcttcacgctctttttaaattttgtgggggacattcggccgcttcgcggcctcaggacgggcgctccgcaccctttttatatttttaattcggccgcttcgcggcctcagcacgggcgcttcncgcccgttttttaattttttgggagacgttcggccgcttcgcggcctcaggacgg

SEQ ID NO: 44715 - DNA, 1207 bp, Heterodera glycines
ttctcaattttcccccggcggcgcctatcggcacccctctatggctttttttcactttgtttttgtttaaaaaactcacattttaaagttgcaattttttcgaattcgaacaggaaattcgaataattattttgatattaaaccaaaaatataaattgatttcgatttcagggttagaacaattctcacttattttttggttcaaacatttgacgagcggtaatttgtttcaaaaacccgagaaatttcccgagtcgggaatcgagactctcgcacagcaataatatgcaccgccggacccccccccccccccccatgttcccaaaaagttttttgaaaaaatttttctcaaaaatggcaaaatatgtgaaaaaatgtgccaaaccccgaaaaatgtgcgatatgtttattatttaggcgaaaaattggggtggaaggccggatttgaaccgccgctcggggccccttacgtggatccgttgtcttagccactagaccacatccaccactggagggattactgttgttatggggccatctttccttcattttggcccctgtctttttgctcccacagcaatttgagctcccacagctattttcgatcagccattacattcccctcctctcatattcgagcgccctcgctcgagagatggcgttgggccgttcccgctatgcaaggatcggcgcgcctccggttcttttgccccagtgccagctgttgtttctggagtgtcgagtggtgtgaagaccaaacgacctggggtgtccgccaagtgtcaccataagccttttcccattggaccgttttctcttttcacgatgatttgcatttgtttgctcctttccacagtatccaaagtccaatttggagccgtctccgtttgtggaggtttcgctgggccgaatgactcagcggacgccggtgaagccgaagactgtcaacccgttgttccagagcaaattcaacttcttcgtcaaacagcccgaggggcaggaactgaaaatccgagtgaggacgaaatttggcaaaatccacgaaaaataatggaataaatttgcaggcggtggacgaagggacgaaacgcgacattggcgaattgtccattccgttggctgccgttatgagagagccgatgatggagatgagccagcagagcttttacctgacgcatggcgtccattccagccccaattgtgctga

SEQ ID NO: 44716 - DNA, 1003 bp, Heterodera glycines
  unsure (1)..(1003): unsure at all n locations
aggtggaacagcatgaggacgatgcaaacgcaacgaccgtttcaagcagnacagaagaaacagctggtactgcaaagctcttagagcaggaggacgatgcaaacgcaactactgcttcaagcagtacagacgaaacagcagtgactgcaaaggtggaactgcaggaagatgatgcaaacgcaacgacagcatcaagcagtacagaagaaacagctgttactgcaaaggtggaacagcaagaggacgatgcaaacgaaacgacgggatcaagcagtacagaagaaacagcagtgactgcaaagattgaacagcaggaggacgatgtaaatgcaacgacggcatcaagcagtacagaagaaacagcagtgactgtaaaggtggaacagcaagaggacgatgcaaacacaacgacggcatcaagcagtacagaagaaacagcagtagctgtaaaggtggaacagcaggaggacgatgcaaacacaacgacggcatcaagcagtacagaagaaacagcagtgactgtaaagttggaacagcaggaagatgatgcaaacgcaactacggcttcaagcagtacagaagaaacagcagtgacagcaaagatggaagaacaggaagatgatgcaaatgcaacgacggcttcaagcagtacagaagaaacagcagtgactgtaaagttggaacagcaggaagatgatgcaaacgcaactacggcttcaagcagtacagatgaaacagcagttactgcaaaggtggaagagcagaaagatgatgcaaatgcaacgaaggcttcaagcagtacacaagaaacagcagtgactgcaaagatggaagaacaggaagatgatgcaaatgcaacgacggcttcaagcagtacagaagaaacagcagttactgcaaaggtggaactgcaggaagatgatgcaaacgcaacgacggcttcaagcagtacagaagaaacagcagtgactgcaaagattgaacatcaggaggacgatgcaaa

SEQ ID NO: 44717 - DNA, 1131 bp, Heterodera glycines
tgctaattgagcagaagcgtaccaaactttgtagggctttccccggtaaaggactaacttacactgaaatgagcgcccagctagctggctcaaaaaaatttttcgaaaatctgagtctttcgtttttatttatttgcaaaattaattcataaatattttttcagaaagggttctgaaacgcaccaaattttatttacatgttagtttaggcactctgatgctttttctatcaataatggaggtgaataaaattttaattgctttttaactttgggaaaaagtttaggcttaactttttagtgaaagtttgatcactcatatttttttagtctaatctactcaaaacggttcagaattcaataaaaataacattcacggtgcgaaaaatggggtttgaaaagtttattggggaaaaaaagactttacaaaataatacccctgggagaagggagtgggaaacatgatttcaaaattttcaattttttctagtctaatctactcaaaacggttcagaattcaataaaaataacattcacggtgcgaaaaatggggtttgaaaagtttattggggaaaaaaagactttacaaaataatacccctgggagaagggagtgggaaacatgatttcaaaattttcaattttttctagtctaatctactcaaaacggttcagaattcaataaaaataacattcacggtgcgaaaaatggggtttgacaagtttattgggggaaaaaaagaactttacaaaataatacccctgggaggaaggaagtggggaaccttgaatttcaaaatttttcaattttttctagtctaaatctacctcaacccggttcaaaattcaaataaaattaacattccccgggggaaaaaaaggggtttgaaaagtttattttgaaaaaaagaactttaacaaatataccccctgggaaaagggggggggaaaatggttttcaaatttttcatttttttaaagtcaattaactcaaaaagggtcaaaaattaaaaaaaaaaaatttccggggggaaaaaggggggtttgaaaatttttttggggaaaaaaaaattttaaaaaaaaaaccccccggggaaaagggggggggaaaaaatttttaaaaattttttttt

SEQ ID NO: 44718 - DNA, 1172 bp, Heterodera glycines
gggttttcgcaggcgcggatcacgaatatgacatccatttcgacctatttcgaatcccgaattcggacaaaagtcgaaaattaatttttcaccaaaatttacactttgtccaaaactggattttttcatatttgatagcgggagttgagccagacaattgagaaggatagggatgggacaacagataaattcgatgggaaataggcttaaatcggaactgatcagttcgaatttaactgatgagtcatgattcgccgagatcgtccccatttgcattcctcgttttgctccgattgaataaaagtcccgtgcattctgtgcagtgtgacgggaattaattaaaagtcaacatatttttctcatttatcaatttgagttggtaaacccgttaaatccataattgaaaacacatgaagcacattttttgtatgtttaacgtcaaaacttgcgataaaagttgggagaattccaagaaaaagtggaaaggcataaggtgaagaaattacatttatacgacaaagaattgatattgtctcttttcgtgtccacagttgccccatttctgaacaattttgaaattccccaaaattgcttggcaaaatgcgttttttagcaaaatattttgatcaggcattaggattatccaaaaaatggtggcacacaaaaagtacattcgccaaaaggtgacaaaaacaacggttaggaattgactggctgatgactggggtcacttcctctctttctttgtgtgacacatttttaacgcgccggcattgatcgaacactgacgtgttgcagttgccgctgtttgcctatgctcggccccacaattttcttcgccgtctccccaacccgtcgaactgtgccaattttggtgggattcattgctgccgtcggtttggcaacgccaaaactctcgaaacagtccaattgatagagcaaattgactgactcgtggaccagcaaatgctcctattgtggtaaagacgtaattagagaggaacaatgcctttgctatttttcaaggcatgtagttaaaaatcaaattttgcaaatgtaatttaagacaaaagttgataactgtttagcgtgaaccctcacatcttttgacattttttctttaaatagcttctaagacattttttagtgcttttattggtcgttgttgactg

SEQ ID NO: 44719 - DNA, 822 bp, Heterodera glycines
tcccgacaattgcggcccgacatttgaggccccagccaataaccgacatttgcggcccgacttttgcggccccgacatttgcggcccatttttatgtttttttcgtaaacattaaaataaattttctttttttacaatattaaatgaaacttttttttaatctattaaaaaaataaaaatttttatttaaaaaatgattgtataaaaaatttagaaaactaaaaaaattattaaaaatgggggggggggaaacgagctgctcctccgcgggaacctccccccccccactctcccatctggttaattaattgtttcaaaaatctttaactaattgatttatttttcatgcagaccgtgttccttgccatcactttgggcctcttgcacggcctcgtcttcttgccagtcactttggcactgtgcgtgcgcggtgttttcagcaccacagcaggcgctagtggcggatgcggcgcgccgtccccagcggcagccattcgcttcaacgtgtcgaccgcggcgccagcagcgatgccgcgacgacgcagtgacagcagcagcggcgtcatgtccaacaaatgaatgaccgacaacggactgactgaccgattgattacattttgacatttaaacaattggggctttggcagccgttttttgtgacttccaatgctttttgggtgaccctttttagttcgattttatgtttttgtgtcgtcttcctttttgcgttttttggtcgaactcaaaattcgggttatttcccgagtggatgggttcaaagattttatcatttttgttaatcgcattggacacacaaaagcg

SEQ ID NO: 44720 - DNA, 605 bp, Heterodera glycines
tggcaactcgtacaatatgcaactcgtacacggggcaactcgtacaaaaaaaattctaagaattttcaattaaaacatagaatttttttagataaaaaaaaatctaaatggattttctagcctagaaaaactttttaagacacttaaatttttaaaaaatttaagaaattaaaaaaaaatcagctgaaaaaaatagagctcgacctggacctggatccaagcctggatttttcctggatccaggtccaggtccaggccatttttcggcaacctggatttttcctggacctggatttttgtccaggaaatccaggtccaggtcaaatgtgaaaaaaaatccaggtccaggcaaaacaggaaaaaacctggattttcctggacaaaattttagaatttattttttcaagtgaccgatgttttttcaagttttcaaaaacaaattaaataaatttaaaaacacattattattattaattagatatttttagaggtttataagcaattaattgactttttcaaacctttttttgatttttaaaattagtttcaaaaaatccaggtccaggcctggatccaggtcccgatgagcctggatttttcctgga

SEQ ID NO: 44721 - DNA, 950 bp, Heterodera glycines
cccaactatcctcaaaatcttcatttccttcaaaaaggtggccaatctgtggcaaattccttatttcaccaccatttatttctcccccatttcttcaaaattttcgagacgtcccgaacctgcattaaccattggcgccatcaacgctaagtgttcggccatcctttcttcgtttgctgccggttcaaattcgccaaattcgtgtgggtccacttccaaaagttggtgtctcagctgcgtttcactcaaaatgctgccgtctcctgaaacatcatttaccgggttaatcggttcattcaggtttctcatttcattttgctcagaaacaggaatcattatctctatattttgttgctggttatccggtgcccgaatttggtttccctcgttgttcaaaattattccctgctgtcgagttctctggcgagttaagtgtggcgagcgtgtaatgaccattcgctttcaaccgtcttggttctcgaatttttcacacaaaaatctttggtttaaccgtcttggttctgccgaattcaaaccacttttctcaaccgtcttggttctcgaaaaatgcagcggtgatttagtcgaaaatgttgcagtgaattgtagaattgctttatctcagtctttgagcgaagcgaaggtaatggcgagtgttgttcccagtctttgggctcaaacaacaagaagaagacaatctgtcgctccccagtctttgggcaaaaggaacgagatgaaatgtcgacttcgaattgaagcgacaaaattcctatcccctgttgaaataaaacggcaaaatgagcttactcagttgagtccagaagcgccacgtagaacaaaaattgggcggggatgtgctcgaacgtcttcgactttgtccgagggttgcaattgaccacggtgtaaaaaagacaaaggcacaacgataaagaaaactcctaatcaaaatc

SEQ ID NO: 44722 - DNA, 1304 bp, Heterodera glycines
cccagtcataaaaatttaaaaatatattttaatgaattcgttattatactttaaatagttaattattaaagcataaatttgcttgatttccaatgcttttaccatttatgatgttatggatatttctttttttaattaaaataatttaaatgtgacgtttgatcgatcctcaatgaattttttttggttcaaattatgattaatttttttaaaatttatccggacctgtccggatctgctttatcaagaaaaatcaggattttaatagtccgggttcgttatcaaaactttaatagatctgaagggcaagaatttttgagaattcctcatctcaattgcagataagaggggcatcgccggaaaatttttaagaatatggaatttattgcgatttttttgccctattttggcaataaatgctcaatttttttttgtatttgaaggtaaaagtgttgtatattgcgggaaatatttattcaaaaattaattataattaccctttttcggagattgcccattggttcttgcttccggcgtatttttgttctgttttcctggtgccgctgcttgtctggacggggtcccactattccctgtttaaatataaaaattttaatttaatttcaaataaataaaataaaattataaaaaccatttttattggcacgatttctgtttgctttcctcgtcgtatttttgcccgcggcgcatgcatcatgtattagcaatgcaacgatgcataataatattaatataatgggaattctcatatttttttatgatatatttgggagggatataggatatatttttatggattgtataataaggtttccatgccgtatttatacacacgtttcatatgatttgaatacgcactcctatgtgtgtaaaaataatttccatcgctataactctgctttatacaaccctattattatatacacgcatataaggcattcatcaaagatatacattttacgtgcatataatgaataaatgcaatgcccaaatttgtatgatggcaaaaatgccaccaacaattgaagaaatacattcacatcattggcatatgcctatgattgattctacacttcaatgcaaagtcaataaacgcacgcgataggcgtgaaatatgcatatgccttttataaaaaaaaaacaatcaataaaagtaataaaattgaaataattttttatattataataaaaagaaaaattgtgttttataaccagggctcgcagatctgaggctttagcctcattttgtgggtttttgataggccaatgcggctaaattttca

SEQ ID NO: 44723 - DNA, 859 bp, Heterodera glycines
  unsure (1)..(859): unsure at all n locations
caaaaaacctttacatgaaaatagcgaaaaagtcgaaatcttgaaattttctcttaataacttttacggaagccaaaaaatctttttgctttttgtatggctaatagagcatgcaaagggctttcgaatgatatccacaattttggatttcgatgacaaaaaaaagatatagaggaaaacatgctgggcccaaccgtgccggcccaactgagcgagtccaacctggacataacatgtccgggcgacgtttcggcggtgacgttttgtccgctcccaaaatttcatgaattttaaatcccttgccctgagctgttgttatcattatcagtggaggagacagcacattgtgtcaaccaatgagaattgtaaccaattaactgaaaatttttgaattttttttcaatttggcattttgttgcattttttaccaaaatgtttggctgcattttgcccagtccgacagtttgcagcagaccttggacaccggcacgaagtgattgatgtgcaacagcagagtaaaagcccttgatgtgctgttcgtacaaccaatcggtgaatctttgtgtaaaaattggtgaaaacagtgatacggatgtaaatttttgcagtaaatctatcaattaaactaattaaattttaatttgtcaatcaaaaaggaaataaatttaatacaaaacggtgcctatcagttaagccggcaccccaaaactccaaaattttcttaagattactaataataatcgcaaaaattgcaatttttggtgaaatatgtttgtcgctataaggcgtagccagngggggggggcggctgagcaggctatagagcccacccgaaatgaaaacaggtatagagaatcag

SEQ ID NO: 44724 - DNA, 1841 bp, Heterodera glycines
aacggacacttgaaaaaatcgattttttttgttttcgttgcagtcccccgaaccgatgcgcccagatttatggggagaccgaatccttcgggaatagcttccctatagtctgtactttaattctgcgttggatttttgctccccataattgtttgagtaccccaaacggacacttgaaaaaatcgatttttttgttttcggggcagtccccccgaaccgatgcgcccagatttatggggagaccgaatccttcggcagtagcttccctatagcctgtactttaattctgcgttggatttttgctccccataattgtttgagtaccccaaacggacacttgaaaaaatcgatttttttgttttcggggcagtccccccgaaccgatgcgcccagatttatggggagaccgaatccttcgggagtagcttccctatagtctgtactttaattctgcgttggatttttgctccccataaatgtttgagtaccccaaacggacacttgaaaaaatcgattttttttgttttcggggcagtccccccgaaccgatgcgcccagatttatggggagaccgaatccttccggaatagcttccctatagcctgtactttaattctgcgttggatttttgctccccataattgtttgagtaccccaaacggacacttgaaaaaatcgatttttttgttttcggggcagtccccccgaaccgatgcgcccagatttatggggagaccgaatccttccggaatagcttccctatagcctgtactttaattctgcgttggatttttgctccccataaatgtttgagtaccccaaacggacacttgaaaaaatcgattttttttgttttcggggcagtccccccgaaccgatgcgcccagatttatggggagaccgatccttcgggaatagcttccctatagcctgtactttattctgcgtggatttttgctccccataaatgtttgagtaccccaaacggacacttgaaaaaatcgatttttttgtttcataaatatttttttcagaaagtcatgcgcacccgtccgatctggcaagttaagcaacgattgctgactagccaaaaggttcggtgccgtgatgaaacgaaccagcactgcttaccccgcggcacccggcacggtcccccgaaggaatggatttaattaaattctctccttcggggatttttttccattaggtcgtccgttagcgttcgattgctctagtcaatttttcaaaatttttgttgaaatatttgtcgtgctctgaagggcgtgggagggggggggggcgaaggcccaccacgaggccgcgaagaggccgagtgagtaccttcggtgcaggaaaattattaaattttaaaaattttttaattgctttttaaatatgccaaaaaatgtaggcttaacttttttagtgaaaattcgatcactcatattttttgctaattgagcagaagcgtaccaaactttgcagggatactccccggtaaaggactaacttacactgaaatgagcgccgagctagctggctcaaaaaaattttcgaaaatctgagtctttcgtttttatttattttttgcaaaattaattcttaaatattttttcagaaagggttctgaaacgcaccaaattttatttacatgttagtttaggcactctgatgctttttctatcaaaaagggagatgaataaaatttttaaaaatttttaattcctttttaaacaggccaaaaagtttaggcttaacttttttttcagaaactgatcagaagcgcaccaaactttgcaggaatactgaaaggaagagaaataacctattttaaatattat

SEQ ID NO: 44725 - DNA, 1336 bp, Heterodera glycines
gtagaaaacgttgaaaattataattgaattatttttaatttgaaattattattttttgccaattcaataaaaataatgaacttatttatttttcaatgtaaaataattattaatttaaattaaacatttattcatcaaaaaatttttattttaaaaaatttatttattattaataaaacaaaacaattttaaattaataaaaaccctgaaaataaccctaaaataaatagaaatataatgtgttgccgtccggatttgaacttgcccccacccccctaaaatgatgcctcagaatccccaatcacacggggattctgaggtcttgacgatgtcaaaagtaaaatctgatcacgtattcgtgatcagcatcataaaatagccctaaagacatgtttttggaagatttttggtgaaaaaattttttcaatcaaaaatcctggtcacccccctttggtcccgaatcccaaaatcggttttatttttgtaacaattcgtaagaaagcagaacatgtcccagaatccccaatcacacagggattctgagggcttaacgatgtcaaacgtaaaatctgatcacgtattcgtgatcagcggcccaaataacccctaaagacatgtttttggaagatttttgtcgaaaaaattttttcactcaaaaaccatgtgcacccccctttggtccggaatcccaaaatcacttttatttttgtaacttttttcaaaaaggtgataaaaatgtaaaataaaacttataaaatagagcaaaaaattgcgaatttttgtagtattttacttttacagaataactttcccgaagggagttaagattttttttctgaaaattcgaaaatttccaaaatttctggaataacttttttcatattgatgctaaaaatcacaaataaagcccataaaattctcctgatttttctctattttttaggcttaatttcatgaaaattgtaccacagtgaactgatttacgaattttcaaaatttcacccaaaatcccttgggccaaaaaaatgaaaaataatttcgaatttttaaaaaattccaaaaaatctgaaacgtaaaactaacatcatattcgtgctcaggacctcgaaataccccaaaaaaatatttttcacccccattttcaacccaaaaaaaattagaagaggtacaaaagtgattagaacaacagtgatcagaagaggtacaaaagtgattagaagaggtacaatatggtttgaaagtaaataaataaggaaaagtttttattaaaattaaaaatcgaattcatttaaatttaaagaatttttataataaaaattttttagtaattaaaaac

SEQ ID NO: 44726 - DNA, 693 bp, Heterodera glycines
cgtttcccccccgccgtttcccccccgcatcgtttcccccccgaatcgtttcccccccgccgtttcccccccgccgtttcccccccgcatcgtttcccccccgaatcgtttcccccccgccgtttcccccccgaatcgtttcccccccgagaaaattttttaaaaaaaattgctaacttagaaatttttcaagaaaaaaatcttagaaagtttgtttacaagaaaattctaagaaaaaaaattttttgagaaatttttatggtgaattactaagatttttcaaaaaaatttcaaaaaaatcgctaaaaatttctcaaaaatttttttttcttagaattttcttgtaaaaaaactttctaagatttttttcttgaaaaatttctaagttagcaattttttttttaaattttctcgggggggaaacgatgcgggggggaactgattcgggggggaaacggcgggggggaaacggctgggggggaaacggcgggggggaaacggcgggggggaaacggcgggggggggggaaacgagccgccccgggcattgagcgcacttctaccaattgagcttttttgattcccgaaatcgcgctctaaaagatttttatagtcatgaaaagggaattggtgaatattttttgtatatgaatagagagagccctgatttttttagatttttcctattttttac

SEQ ID NO: 44727 - DNA, 1139 bp, Heterodera glycines
cgccgccgggaaaaatttgtgatttttaatgcgatttgtttacatgtttttgtccaaaaatgaccaaaattttcgattttgggctaattttttaagaaaaatagtgactttatgccataaaatttcaaaaaattctcaatcatgagaaaaaaaattacatttttattggcatagtgccataatttaatcaaaatattgttgaaagttacaaaaatttatcaaatttctttgtattttttaaaacttttccaaatgctcattttcaaggacttcttgaattcaaggatacttttaaattttcaagcgggagggcccaatttcaaggacgtccttgccattcaaggacggatacgagccatgagttaaatataatataaaatgctaaaacggggtcaaagaattttccaccaaaccgaaacaatgcttatttgttaataaaagatcacaaaccagcctacgtaaagctaaatttcatatgattaaaaatattatataacttaaaatattaccccgatgcataaaacaacacgaattgaatattaaaatggatcatttattcatatagattttaaagctacttatcaagcttacaggtcatttgaactctgctacatattttaaaaatgcaatattaaaaattgcatagttgatgcatttgtgttaataaaagtttataaaataaataataattaaattaataaatgtaaaaaacaaaaataatttacatcgatgaagataacatgataaaatggctaaaaaaagaaataataatattataagtacatattaatataaattaaaaaaaataaaatctcagattcatagaataattaacaaggtgataaaattaaattaattaaattatacaaaaaggcttaagaaatgttaattaacgaattttaataatatgttatattgaatatcgaaatgtcaacttacttaaaaacgataaaactttacttttaaaaattaagtagcctatgaatgttatgagtaaatgctgattaaaattgagaatagtaatatataaagtaataatataaaaataaataaaatctcacattcagagagaaataattgaagagccgattaaaataaaaatgttaaattatataacttataaaattattttattaaaa

SEQ ID NO: 44728 - DNA, 1375 bp, Heterodera glycines
  unsure (1)..(1375): unsure at all n locations
tgcgcagtcacttttgtccaattcatcaccaatttctttgcctctttgttcccaaaattgggaagacaatttttcaccaaaatgcttcgccatgaaagcgtaaaaatgtgcggcattcgaatttttgtgttgttgttgttggtcattttgggaacggaaaatgcgtcagtggaaaatttgtcagcggttaaatcagtcggtcggtaaaaaagtttttttttttttgagaattaagaatatttttttatgattggcaaatctatttttaatggaaattttttttagccttttattgagctttaaataaacacaattataatttttaaaacttaattaaatttgttatctaatttattttaaaaaatcaaaatttttctcagaaaataattcttgtgaatttaatgaataataatgaattcgccaaaaaatatttacttgcttatttttcatttttaaggattttcagcaatacatatcacttaaatatttccactgactaattctccgaattttgaatagaaattctgtcgtttttcatttttattgttgttaaaattatttcgagcgcttcatatacatcataatatgataatttgaattcaaatagccgtaaaatcaatttgaaattttctgaaattaaaaattaaaatcacaaaataatgaaaaatatttggaaaaaattgtttttgttgaaatacgtattcataatagaaatttctgatttcattcacatagtttttttggaactttgtttgatacgttgctacagcataaaccatcaacaaatgaaaatttttgacagaaaaattattcataacttcgcttaaattgaactaaattttaaaatcttggtataattcgattattgtcttaaaattcaaaaaaagtcgttaatttgcacaaaaattatcacctgaggaataccagggtttttagaacattattaatcataattttttgaaaccttatggtttttttttgaaattatgaagactaatagagaacaaataaggctatcgaataatataaaataaaaatttaattccttttgagcgaagttatgattttttatgaataattttaaatttttcatttgctggtttttaaactataatggcattttcaaaaattttaaatatcgctcagaaaataaagtttatatttaataataaaagtgggtaatgctcttgacattaagattggttgctatataattatgctttttatgtggcaaaagccctctaactttgggcgtggcaatttttcaatcaattatggtcaataaatgtttaaaaaaatccataagagacacatagttttaataaagaanaccccaaatatgtataatattgttttgattttcttttttatttca

SEQ ID NO: 44729 - DNA, 493 bp, Heterodera glycines
atcttacgttcaagagccacgatgcttatgaactatcatactcgggcgataagatactcgaaggcgttgtgggaaaattggctacagggcatggcgtgagcatactggtcagcgatttccgtggaagcgatggtactggcttcacgcttaaaaaacgacctcgcctggatgccatcaatgatttagtggatagattaactgttgcggataaagggaaagatacaggaatactggccttgagtctaacgggtgatgattccgttcaaatcagaaaaattttaaacagtattatcaataattatctgcaacagaatgtcgagaggaaatccgaagaagcgggtaaaagcctggaatttcttaaggcacagctaccgcaggttcgacaaaacctcgatttagcagaaaacaaactgaaccaatttcgtcagcagaacgactctgtagatttatctctagaagccaagtctgtattggatacgatggtggcggtgga

SEQ ID NO: 44730 - DNA, 329 bp, Heterodera glycines
aaattgtttaatacacggaaacgaactgaaagtccttctatgcttcaattaaaaatcatttaaaccatttttagactaaaaatgaaaaataaaaaaaattggtacttgtgtgttatctgtgggcagatgttcaaatttttttatgtttttctctataacttttttctttggcatccaaatccaagattggtatcattcgaaagctcttcatatgctttattagccttacaaaaaacgaaatgattttctagcctggaaaaaattttattaagaaaaaacttcataatttcgaccttttctcaataacatgtttttcatgcataactttt

SEQ ID NO: 44731 - DNA, 870 bp, Heterodera glycines
aacatttatgggggagcaaaaatccaacgcagaattaaagtacaggctatagggaagctattcccgagggattcggtctccccataaatctgggcgcatcggttcggggggaatgccccgaaaacaaaaaatcgattttttcaagtgtccgtttggggtactcaaacaattatggggagcaaaaatccaacgcagaattaaagtacaggctatagggaagctattcccgaaggattcggtctccccataaatctgggcgcatcggttcggggggactgccccgaaaacaaaaaaatcgattttttcaagtgtccgtttggggtactcaaacaattatggggagcaaaaatccaacgcagaattaaagtacaggctatagggaagctattcccgaaggattcggcctccccataaatctgggcgcatcggttcggggggactgccccgaaaacaaaaaaatcgattttttcaagtgtccgtttggggtactcaaacaattatggggagcaaaaatccaacgcagaattaaagtacaggctatagggaagctattcccgaaggattcggtctccccataaatctgggcgcatcggttcggggggactgccccgaaaacaaaaaaatcatttttttcaagtgtccgtttggggtactcacacaattatggggagcaaaaatccaacgcagaattatagtacagactatagggaagctattcccgaaggattctgtctccccataaatctgggcgcatctgttcgaggggactgccccgaaaacaaaaaaatctattttttctagtgtgcgtttgtggtactctcacaattatggggagcaaaaatccaatgcagaattacagtacaggctata

SEQ ID NO: 44732 - DNA, 1258 bp, Heterodera glycines
tttttaagtctgaacattttttaattttggaactttcttataaatttttttttagtccaaaacaatgcatcaaaattatttgggctttgctgaaaatttcttgaattccttaaaacttatgaaaaatactaaaagatttccccttattttttctttttctcttacacatattttgcagtcggatgcgtgttattaacaccctctataggggtatgaataattttttccatatataattattccctggggtggtgtgctatttttgtccgtcttctcctgtttttatcgaatttgattcatttttagattgcaaattctgacggaccagttgttgattcggcacgtttggtttgttatgcatggaaggcgccattttttcgcctgactcctcaattgagcaaatttgtggcccttgacacaactgacgattggattttagtggacatgctttgggaggccagggtgggtttttgatggtagtggcagcaaataaattgtccatgtttatcgaaaatcggtatataaatgcctccaccgcgtctaattgtttttttgggagggtgccaaaaaagagtatattgtgcagaatttgacccaagaataaccagattcgtcatttacagcggattaaaactggttaaaattttatattgtttggggatttaaaaaaagaatgtcaagttttttgaattctccttaagaatcacattcatcaaacacattccaaaaaaggagtggatgctttgatcaaattgctgcgaacgaataacgaataaatcagacacgggaaaaaatgcacattgaaatatttatttattattttcaaattatttgttctttttattggtttcttctaccgcgtcaggacgagtcgacaggtgaaaactcagtgaacattggtggaacaattcggccgacagacaactcatttttacgaaaatttagaaagtaatcataaaaattgaaaatcattaatcaataaaattaaataattaaaaatttttaatttaaattaataataaattattaattttctaatttaacaacgtctttcgttaccagcttcgttaaatttcgaaaattaatcgtaagtgaagatgaattgaattagaatttataatgaagctgtaacgaagacaattatcaaattagaaaattaataatttattattaactaaaatttaaaatatttttaaattattttatttatttaattttattgattaatgattttcaacttttatacttattttataaa

SEQ ID NO: 44733 - DNA, 1148 bp, Heterodera glycines
  unsure (1)..(1148): unsure at all n locations
gctcaacagtaataggaatcccaccgcatttctcagaatattacgccgatactaattgttctggaattgtttctctgcgcgtttgtttggaaaaattgggaanaatggctatctctttttctgctcaacagtaataggaattccaccgcatttctcagaataattacgccgatactaattgttctggaatttgtttctcggcgcgtttgtttgggaaaaatttggaaaaattggctatctctttttctgctcaacagtaataggaattccaaccgcattctcagaataattacgccgatactaattgttctggaatttgtttctcggcgcgtttgtttgggaaaaattnggaaaattggctatctctttttctgctcaacagtaataggaattccaaccgcattctcagaataattacgccgatactaattgttctggaatttgtttctcggcgcgtttgtttgggaaaaatttggaaaattggcattatctctttttctgctcaacagtaataggaattccaaccgcattctcagaataattacgccgatactaattgttctggaatttgtttctctgcgcgtttgtttgggaaaaatttggaaaattggctatctctttttctgctcaacagtaataggaattccaactgcattctcagaataattacgccgatactaattgttctggaatttgtttctcggcgcgtttgtttgggaaaaatttggaaaattggctatctctttttctgctcaacagtaataggaattccaaccgcattctcagaataattacgccgatactaattgttctggaatttgtttctcggcgcgtttgtttgggaaaaatttggaaaattggctatctctttttctgctcaacagtaataggaattccaaccgcattctcagaataattacgccgatactaattgttctggaatttgtttctcggcgcgtttgtttgggaaaaatttggaaaattggctatctctttttctgctcaacagtaataggaattccaaccgcattctcagaataattacgccgatactaattggtctggaatttgtttctcggcgcggttgtttgggaaaaattttgaaaattggctatctctttttctgctccacagtaataagaattcca

SEQ ID NO: 44734 - DNA, 933 bp, Heterodera glycines
ccagaggatttttatatttagaggttatcccagaacccccctatctctttttttgataaattttatacacatacaaatgctctcgagcatgatagggagggcggtgcgcaatagaccttttatttttgagggaatttttaaatttatactctatcccagaaaaatggctatctctttttttgagaaattttatacctcacaaaagcgcttgcgtatgagacggagggctgtgcacaatcgccattttatttcacagaggatttttatatttagaggttatcccagaaaaatggctatctctttttttgataaattttatacacatacaaatgctctcgagcatgatagggagggcggtgcgcaatagaccttttatttttgagggaatttttaaatttatactctatcccagaaaaatgtctatctctttttttgagaaattttatacctcacaaaagcgcttgcgtatgagacggagggctgtgcacaatcgccattttatttcacagaggatttttatatttagaggttatcccagaaaaatggctatctctttttttgataaattttatacacatacaaatgctctcgagcatgatagggagggcggtgcgcaatagaccttttatttttgagggaatttttaaatttatactctatcccagaaaaatggctatctctttttttgagaaattttatacctcacaaaagcgcttgcgtatgagacggagggctgtgcacaatcgccattttatttcacagaggatttttatatttagaggttatcccagaaaaatggctatctctttttttgatagattttatacacatacaaatgctctcgagcatgatagggagggcggtgcgcaatagaccttttatttctgagggaatttttatatttatactctatcccagaaaaatggctatctc

SEQ ID NO: 44735 - DNA, 910 bp, Heterodera glycines
taaaaagagatagcatttttctgagaattaattcacaatttccgcagctcttacggtaatggaaaaaattttgaagaggctctccggaacggattagcatcggggttacgagatagaaaattgtcctaaaaagagatagccatttttctgagaattaattcacaatttccgcagctcttacggtaatggaaaaaattttgaagaggctctccggaacggattagcatcggggttacgagatagaaaattgtcctaaaaagagatagccatttttctgagaattaattcacaatttccgcagctcttacggtaatggaaaaaattttgaagaggctctccggaacggattagcatcggggttacgagatagaaaattgtcctaaaaagagatagccatttttctgagaattaattcacaatttccgcagctcttagggtaatggaaaaaattttgaagaggctctccggaacggattagcatcggggttacgagatagaaaattgtcctaaaaagagatagccatttttctgagaattaattcacaatttccgcagctcttagggtaatggaaaaaattttgaagaggctctccggaacggattagcatcggggttacgagatagaaattgtcctaaaaagagatagccatttttctgagaattaattcacaatttccgcagctcttagggtaatggaaaaaattttgaagaggctctccggaacggattagcatcggggttacgagatagaaaattgtcctaaaaagagatagccatttttctgagaattaattcacaatttccgcagctcttacggtaatggaaaaaattttgaagaggctctccggaacggattagcatcggggttacgagatagaaattgtcctaaaaagagatagccatttttctg

SEQ ID NO: 44736 - DNA, 867 bp, Heterodera glycines
aataagcgttaatttattttaatgatatgggttgaaaaaggttaaaattggttgattctattccttttagtatccctgtaaagtttgatgtgtttctgatcattcatcgaaaaattatgcggacaaaaaaaattaatgaattaatttaaaaaaaaaaaaattaaaataatggaaaactcagaatttcaaaaaatttttttaaaaccaataatcgttgaaatattttcaagttaagttagtcctgtaccggggagtatgcctataaaattttgtgcgattttattaattataaaaagagttgtttttcgaataaattttttaatttcatgaaaaaaatttgaaatgttttttattaaaaatttttcgaaaaaacttattaatttatcatcaaatttcaaaaaaaaaatcgctgaaaattttcaaaaatttttttctttatgttttcttataaaaaaaatttctgttttttcttgaaaaatttgtttgaatttttttttttaatttctgcggcgcggtttgtacgtccccgcttccccctccccgccctcctctcaaaatttaaaaaaactaaatttttttacaaattttttttttttgaaaaatctctgtcacccccccccccccccccaggaacagtattcacacatcgatcatgttccaggcgcatttcttcacattctccaacggttcgtcgccattttcaccaccaaacggggacagaccggacagcaaaatgaacgccagcacaccaacactccacatgtccgagtaaaagctgacgtacttgccgagcaccacctcgggcgacgcaaattcagccgttccttacgggagaaaaaaaataaataaataaattttctatttttt

SEQ ID NO: 44737 - DNA, 1611 bp, Heterodera glycines
  unsure (1)..(1611): unsure at all n locations
aggaaattaaaaggcacaaagaaataagaaatatgattctctaattgatacacattcagctgcggactgggaagcggacaccgttcagtgaaagagcaaaaaaaaaaaaaatgaaatgccaaatttggaggacctttgcctgaggggagttgtgaagtgtactttcggcacaaggaaaagagtgccaactcagtacagcggggcggacaacacagtacaggtgccgaaaaaggaggacgattgatgacgaattccctgaccctgcaggcattgatgttagccgagaaaagcctccgcgaggggcccgaaagtcgcgcggcgggcaaagcctatcacataatggacggggaagggccggtgccgtgccgggggaggggggtgattagctgtcatttgccattcttaggtggactccttccgcttttggtaccctctgatcaccgccattggctgtcccgtgccatccgtgcgcatttccttcacttttgcctatactttgggcatttttttcgagttcatctacaaattggtcgggtgggagccgtttttcacgcgatacgaagtgccattggaagggagggattgttgaccgttaaccttccctttcgcttaattcggcaggtggcactgatgggcgtgccgaacacttattccattgaaagggcacgccgcgacttaaactattcgccaattccgtcttctgacaaatggcacgcaccatcgaatttctgaagcagcagctgaaagacaacggcacaaccgccaattgggcacaaagcaaaagcattggcggacaatggctgcgcgatcggaaatggcttttcatggcctatttggtcgaagaggcggaacgaggcaaggaaaaccaatagaaattgatcatttcattttttaatcattcaatttttgatattttcgtctgatcagttaataattcatttcccatttctctttagcttttcgtcctttcaaatggtcattagctttggttgttctgctgctgcttctgctattgttcaccatttttttcaaatgttttctctttgcgccgttttcattgaattgtccaatggcattttagtcgatggcattttcaaagtcaaataatcaattggttgatcaaccaatcaatcaatcatcaatcactaatcattctaatcgtggccnactcaactnatcggagnatctctttctttctcancttttttaaattnctncttantttaacatttcncactaaattttaaataaataattttnatcattttttttattaatcattnntacctttatnaaataattacacaaaaantccntccntccnncacctcccccctcncccccnccccccaatcaatganttaatcacttcccattcnttaattncccaaattaaattacntctaaaaggnccttntcctttctttcttcaccaatcnttcattnctacaaaaatcaatnttctnntttttnnnatnnnnatnttnttnnttttnttntttctcccctncctttttccttnnctcttaaaagttttnctccctntttcctttncctccntcctctcctagaagaataagaaactcattcccctcaaaagacggctgaggg

SEQ ID NO: 44738 - DNA, 862 bp, Heterodera glycines
caaaaaaacccccctattttttcatcagattgccctaatgggcgctgtggtcggtcctgtcgatttacaccaaatggcattcccgcgccggcgcattttcgtcttccaacttggctacttcgagttcgaacagatcgctgatcagaagcccgacctggtggactacgggccgtggatggccgacatggacattcaggtgagccaaattgcacattttctaacagttttaaagtgggacaaatccagaaaatttttaagcgcattttactagggggtttgggcaaaacattttttaaatttttttttgaaaccccttcacaaccgaaatttttgttggaaataatatttttgatcaaatttttctatttcacattactgctacgcactcaaacagtgtttgttatcaccaaaatttcccaaaaaattttgcaaaatttttcctcacatccaccaaattaccaaatttttttttgtgtgaaatctattaaaaaatatgcccaagaatttcagaggcagtacccctctcgaaaaccaagccggaattctgggaccgtcccaactttttacgcttttcctctatcctttcgaaaaaaatatttaccaaaaattttcagacaaaaaagtcctcaatttttggattggaatttttttaaaaaaaaaaaaactttttcaaagcaacaccaaatatggccgttaaatgtttgttttctcatctttttttgctcaatttttataaaatttatggtaaaaatgtgattttcattctcagggtttgccgttgccttcggacgaattcattgagcaaaaggcgcaaatgctccaatcattttttggccgactcggcataccaacaacaacattt

SEQ ID NO: 44739 - DNA, 997 bp, Heterodera glycines
tacaaatgttccgagcatgggcagaggggcgcggagagcaatggccattctattctacagggaatttttaaatttattctctatgccagaaaaatggctatctcttttttgcgagaaattttgtaccatacaaatgttcccagcatgggcagaggggcgcggagagcaatggccattctattctacagggaatttttaaatttattctctatgccagaaaaatggcatctcttttttgcgagaaattttgtaccatacaaatgttcccagcatgggcagaggggcgcggagagcaatggctattctattctacagggaatttttaaatttattctctatgccagaaaaatggctatctcttttttgcgagaaattttgtaccatacaaatgttcccagcatgggcagaggggcgcggagagcaatggccattctattctacagggaatttttaaatttattctctatgccagaaaaatggctatctcttttttgcgagaaattttgtaccatacaaatgttcccagcatgggcagaggggcgcggagagcaatggccattctattctacagggaatttttaaatttattctctatgccagaaaaatggctatctcttttttgcgagaaattttgtaccatacaaatgttcccagcatgggcagaggggcgcggagagcaatggccattctattctacagggaatttttaaatttattctctatgccagaaaaatggctatctcttttttgcgagaaattttgtaccatacaaatgttcccagcatgggcagaggggcgcggagagcaatggccattctattctacagggaatttttaaatttattctctatgccagaaaaatggctatcacatttttgcgagaaattttgtaccatacaaatgttcccaacatgtgcagacgggcgcgaagagcaatggccattctattctacagggaaattctacatgtattctctatgccagaacaatgtctctc

SEQ ID NO: 44740 - DNA, 857 bp, Heterodera glycines
aggattttcatttaaaaaatgataaaatatgtatcaatttataaaaaaaactatgaggaatcatattttctctataggaaacccacgagtatacaaaaataaaaaattgaaaataatctaatttatgtagagggattgaaccaggggaaagaagaagggaaagtcaaggagactagccattaggccatttgcacacttgggtactgttacttttaaagaatatattaattattattttttatttttccctttgactccaattttcttcactaatttttcactcagaccccattcttaccagtgcttgtttttcccggttcccggttgccctaccgggaccgggacctgagcttttcaaaacccgggaccgggaaccgggaccgggacctcggatgaccgggaattcccggcccggtcccggtcccgtggcactctacttaaatataaaaaagttatggttatttaaatccacaaccttaagtctgaatttttgtccagaacttttttgaaactcaattaaattttttgaaattatattggtaaaagaaaattttatcttattgcttctggaaaaaagttataaagcattaaacagactatgttttttgccacagtcatgcgaatataattataaacatttaaaatttcaagtaataaaatgcaattgagccaaaattaatttatatattcgatagcgcttagaattctctatttacctttaaaatttcagaaaatttcattgattttgaaaaaagttatggacaaaaaattccgacttaatattttgtggaattttggctccataacttttttataatttcatataaaaattttctaaattaatattctgatagaca

SEQ ID NO: 44741 - DNA, 1123 bp, Heterodera glycines
  unsure (1)..(1123): unsure at all n locations
taacccgnatgctaatccgttccgcagagcctcttcaaaattttttccattaccgcaagagctgcggaaatgtgaataattctcagaaaaatggccatctctttttaggacaatattctatctcgtaacnccgatgctaatacgttccgcagagcctcttcaaaattttttccattaccgcaagagctgcggaaattgtgaattaattctcagaaaaatggctatctctttttaggacaattttctatctcgtaaccccgatgctaatccgttccgcagagcctcttcaaaattttttccattaccgcaagagctgcggaaattgtgaattaattctcagaaaaatggctatctctttttaggacaattttctatctcgtaaccccgatgctaatccgttccgcagagcctcttcaaaattttttccattaccccaagagctgcggaaattgtgaattaattctcagaaaaatggctatctctttttaggacaattttctatctcgtaaccccgatgctaatccgttccgcagagcctcttcaaaattttttccattaccgcaagagctgcggaaattgtgaattaattctcagaaaaatggctatctctttttaggacaatattctatctcgtaaccccgatgctaatccgttccgcagagcctcttcaaaattttttccattaccgtaagagctgcggaaattgtgaattaattctcagaaaaatggccatctctttttaggacaattttctatctcgtaaccccgatgctaatccgttccgcagagcctcttcaaaattttttccattaccgcaagagctgcggaaattgtgaattaattctcagaaaaatggctatctctttttaggacaattttctatctcgtaaccccgatgctaatccgttccggagagcctcttcaaaattttttccattaccgcaagagctgcggaaattgtgaattaattctcaaaaaaatggctatctttttttaagaaaattttctatctcgtaaccccgatgctaatccgttccggagagcctcttcaaaattttttccattaccctaagagctgcggaaattgtgaattatttctcaaaaaaatggctatctcttttta

SEQ ID NO: 44742 - DNA, 1208 bp, Heterodera glycines
atatttatgtagataaacatcatgtcgaacagttcttttgtgtttttgcctagtaatgtgagtgattaccctgacaatcagccgaataaattccgtgttcggcttccaaaacctttacattttaacggctcgtgggtgtgcggactgcacagtatcagttacccctactcatggtcaaccattggcacattggatgagcaatggattgacattcacttcaccgaccgcagagcgaccgatgaggacagacagcgagtgatcagagtgccggtgcctaaggcatcgcatagtcgggttgagcagttgagagaatttttgtctgtcactttgaggaatcatagcggtgcaaaactacaacctctccctcgtgaggtggaagagaatcggaatcgtacaacaacaaagcctctcggctcgccaccgcctttgaaaagacagaaaagagatacggtgtttgacgcgaatagaaaacagattgcccctcctccattgcataatgatggcgagaagaaattattgcccctccaccaccgcatcatgaaaatgatgacgatgaagaaattattgaggagtcaccacctcatcatgaagaagatgatgaagggccgattgaggagtctccgccgcattacgatgaagagcaaaatgatacagtaacagctcctgtcacaccaaaagtgccggtaccagcacctgtcacaagccctgcgaaaccaacaacagtaaaaacaccagctactccatctgtaacaacaccagcgcctcccacaactgcaaagctgccagtaaccgtcccttctccaaccacaaaaccaataacaccgacccctcctcctacaacaaccacacctacttcaaccacaaagttaacaaccggccctccacctaccacaaccacacctactccaaccacaaagtcaacaaccagccctccacctaccacaaccgtccctccagcaatcacaaagccatcaaccggccctccacctaccacaaccgtccctccaccaatcacaaagccatcaaccggccctccatcaacagaaaagccaataacaacggtgcctgcaccgccaaagacaacaacaacaagtacgccagcaatacgtgcagttcctagcccatctgttaagccgacgattccggtaccgccggcgcaactaaaaagctcggcactgtctccaaaatcaacaacccccatttctact

SEQ ID NO: 44743 - DNA, 271 bp, Heterodera glycines
cggacatctaatttttgaattgaaaaaaattgctctcaacttcctttttctccatattgaccatcatactcatactccccccacccttttcttcttccgccacccacctcccccgctacgcgccgctcccctccccttcgtgctcctctcttgatagtttaaactgaaggcgggaaacgacaatctgatccccatcaagctagcttctgcaggtcctgctcgagcggccgcccggggatcgatccccgatctagtaacatagatgacaccg

SEQ ID NO: 44744 - DNA, 967 bp, Heterodera glycines
  unsure (1)..(967): unsure at all n locations
cccatttaatcggcaattagatcaattaacccttattattccttttattggcacacaaacatcaccttttccttctcagctgaccgtcacttcgttgtcccaatgcggtgccgttcgcacccctgcgggcggtgcgcggacgcccacgtcaccgaagaatgcccctggcattgctgaggaaggactcgtcgtgcgcacggtgcaactgacgcggcaccacagcgaatgtgttgacgaagcggaagagggggaggaggaggaggggagacgcgaggaggtcgcgcgagggagaggggatgattagacattaattgatggaaaggggagcaattaagcactaatgaatcgggggaggggcggggtgggaatggatgatgaattcagcaaaagagacggcaaaattaaggggattcattaggcctatgaagctcctcattaagggggaggggagattagggcattcattagcggacaattagccaaattggccctttgaagaggcgacttacggcggagcatcgcgcgatgagtgcggaagagcagagggaattgtacaacgacggaccgccgacaacgacgacggccagcggcggcgcgtcctttgaggaggtggacgaggcggcggcgtcggacgacggcgacgacgcgcggcaccgcccccagcgaatggccacgcgccgaagcgcccctccggcaattcatatcgcatgacaatggatgaagaggctaatctgttgttttttgttggattgctcgccgattcatccgccggtaaaaaaaacatttgccgaaaagaatgccaaaacattggccattcaattcaatcacttcccttttcattcattgtgacagatttcctacttcatttttcatttctgatattgctcattgtctntaattaatcgctttaaagttggtatttggccattttggcacttttttcaattgttcgtttttttgtctgttt

SEQ ID NO: 44745 - DNA, 1354 bp, Heterodera glycines
ttttcccaaattagtcttttttttttccatctttccatttccctccttttcttccccccccccccctccaccgtattcctttttcggctaaaagtgcgttttttcttctatcatttttttcctattctctgtgaaacttaacaaaatggtcaaaaaaggaatttgatcagattaaatatgccattttgcataaactccctttggatgaatcagcagagacaaatttacatagaaagggattaatgaaatagattttcttttggaatcgatggaggggcggcggatcagcagagagtgaaaagaaacgacgcaaaagggggaaataatttaaatcaaaagtgacagacattggaggcgcattaactggccacaattggcaattaaaatgcaaaatgggccactcgaagatgcattggaaacagaggacctgaaaagttgacaaaaaagaatataaatatgcacaaaatgagaatattttaaaaaaataagaaataatttggacaattaattgtgccattctctgcgctttatttatgagtccatgtaaataaattgtcgcttcatctgttaattgctattaatatgtatttgcatgttcgtaaattgttttctctctggtcctctttcaatgcttctccgccccgttgctgtcctttttgcttagcatcggcaccggcgcgtcgtaagggggcggtcttcgctgctccagggaatttgtctgtgcttggtaatcgcgccttgggggaaaataaaactgaaaaaggtgattagttatattggacaccaaagagtggagatcagttgagaagtgaccaagtcgccattgttaagcgcaatcagccgaatcagcaaaaggccgtcgggtcgcaaagttcgaccgatgaaatcgcgaatttgggctttgcgggaaagcccaagccgagaagagctggggtcgatctgaactcaaaaagatggatcagaagccggaagtggacaatttgccctgtcgaggtaactgctgatcagctgaaaattgcttctggcgttgaacacccgcagaagccattgaaaacagttcaaaatgctgaacagagcgacaaaacaaaaccaaaaccagaagaaaatgaagattttttcgttgaactaaatgaaataaagtgatcgatagagaaagaaaaatgatggtagagaaaaagaaaagcaatcgatctagtggacaacaaagtgatcgatcgattaaacaggatggcagagaaaaagagagagaaaaacgatagtgatcgatcggggaaatggaatgatgacgtagaaaaagaaaaaaggtcgatcgcggagaaattgacggatgacagagaaactattaccgtttgaa

SEQ ID NO: 44746 - DNA, 1000 bp, Heterodera glycines
tttaaagcctaattagcagaatgtgaaatcttctcatttgtttctttatgatcattttgtttaattcgcaaaatccagctcattcttcgcgaaatataaactgaatcagtgtttgcggaatgaccgagctgataatcgccaataatcttcgattacaattttcttggtcacctttttggaattccaccatttcaactccttatcctctaaatataaactgaatcagtgtttgcggaggaccgagctgataagtcccaataatctccaatttacaattttcatgatcacttttgtgatattctcaatatttcaatttcttatatccaaatgtaatctgtataagtttacagtaggaaattgtaatttgggggttattggcgatttcaaatcgatccttccggaacactgatgctgtttatatttagagcgtaatgagctgaaaatgtcagaattcaaaaagtggggtcgcgaaaatagtaaatctgaggttattggcgcttatcaacctgatccgtctgcaacacttaaacagtttatatttaaagcctaattagcagaatgtgaaattctctcatttgttactttatgatcatttttgtctaattcgcaaaattacagctcattcttcgcgaaatataaactgaatcagtgtttgcggaatgaccgagctgataatcgccaataatcttcgattacaattttcttggtcacctttttggaattccaccatttcaactccttatcctctaaatataaactgaatcagtgtttgcggaggaccgagctgataagtcccaataatctccaatttacaattttcatgatcacttttgtgatattctcaatatttcaatttcttatatccaaatgtaatctgtataagtttacagtaggaaattgtaatttgggggttattggcgatttcaaatcgatcctttcggaacactgatgctgtttatatatagagcgtaatgagctgaaaatgtcagaattcaaaaag

SEQ ID NO: 44747 - DNA, 1122 bp, Heterodera glycines
  unsure (1)..(1122): unsure at all n locations
agcaggtgtcatttcgcgttcttcagcagtcccactgatgctggtggtgtggtgacagagctggcaattcttctgccggaactgatggctgtcgcggagcaaatggccgtcgaaaacaccgggcggaagcagcagcagcaagagggcaccgcccattttggtccgtcgtcgttcgcgtctccgtggcggtggcttcggcgctggtggcccctctgctggcatcagtgcgtcctcaattctttccgccgggcgcactccctccgcgggtgacgacggcatggacaacggcggtgagccgaagcggcagcccgacctgttcagcttcttcgaccaatgaacgtcttggccacgatgtgaatgtgtgggggctataaacgatggaacgactttctctgatcagtgatcacttaccccatcttttgctgtttcttttgtccaaatgacttttttattactgtttctccttaaagcgatgaccatttcccattttggattaacccaaatgatcacattgacttgattgatgatgataccctttctctgctgctgatgtccatttatttatacttttttccatttttggccctttttcttcaccaatgcgatgaatcagcgcctttctgtcaattgtctcgatcaatctttctttcttcctccccttctgttgtgctttctttctttcccataccctcgagagtgcttcgttctctaatttttttgtcccttcctctgctcttgaggttgcgcaattccaatccataaaatataagtacctatatgcttacacaacaccgaccattcccttccgcctgtccttgacttttaaggattccaataaaaatgtaaaagcactttttaacaaaataaataccagattgccaatttatgcactaattttttgatttgtaaaatttccaattttctctatgtccccttcggctttgttcgtttgttttggcactcggcagaaaggaggacgcaaaatgccgtgcacaaattgtatggcggaatacacacgacgcagaaaagaagtgggagaactttngtatgatccaaatgngaaaaaatgccacccnaatcagatcggntgtgcccgtcgtcgtttcggcttttgcgagcgat

SEQ ID NO: 44748 - DNA, 1186 bp, Heterodera glycines
  unsure (1)..(1186): unsure at all n locations
cttcgccttgcccaaatgcgtgacaaaagccgcgacgttaagttgcgccgccgtttgattgccgacatggcaccgctccgcgcatctccgctccgcgcatctctgccccgctgctgctcactgcccgcactgttggcgttgtttttcggcacgtctccgttcgtattccccgctttggtctctgccgctttgccaccgtttgctttacttgggtccaacatcgatttcgactcgtccccactgccattcgattcgtccgaagtgtcgcccgtggtatcccgtggcgccaaaggggcgagtctgacaataaagaaaatgcgaattgcacattttgccaactttgcacacaaatgcttttgcaaaatgttcacctgtcctgcgattcgtagatcatttcgctgggccgttcacttgtcaaattttggctcgcctcggaccttcaaaaaatgcaattgattagaaagcactcactgatcgatcggcttaaaagtgcttcacctgtcctccaacaaacattggtcttcactgcgtctgcgcgcaaaatcggctgacaatttgatgttggcaacatccaaattgccacagctcccattgatttgcgcatagacacttggagatgagttacaattgatgcttattggcacagtgcgcggcgggtccatgctgaaacggtgccttaaaattgcacatgttattggcgaatcaagcgaaaacggcacacatttccaaatggtgtttttcgcgcaattgagcagtccgagaaatgaacaatcttggcagtttcaatcttgagcagggcgaatttttgtcgttcagtccgttggttgccgttttttccgccttctttttgtttgcattttcagcgaccttaaaagtcaggtaatttttttccagaaatattccccctttacccacctgaaccattccaccatatgtcgatttggtggcattcattgcggccttataaatgcggacgtacacaaaaatgactatcacatatggaacgtagaagctggaggaggcactgaacagaatgtagtacatgccggaatttggacggcgtgcagcggcacgcgttcggattctgcagcacaaactgttgggcactgggtggtgccgttgcgttccatctngtctttcatgtaactcttccgtttgctggacgctaccagaaagcttggcgagc

SEQ ID NO: 44749 - DNA, 964 bp, Heterodera glycines
ttttagaggttctctcaggtcctttatcccactttctcctttctccgttccttctggcatcacattccgcctccctcggaagaccggtccctcgggctctccttggcccttcaccgacggacttggacactccttggtccagtggtcccggaagtgttgaagggatccacccaggagcgccatgtagaacataaaaggtaactcgcccggtgggactcgaacccacgaccccagcaatccgtgccgtgctctaaccaactgagctacgggcgcctcttttagaggttctctcaggtcctttatcccactttctcccacactccgttccttctggcatcacatgttaaaattttattatttttttaattcatttttattaatattgattcttctaaattcttttcgatttatttatttaatagaaaggttaatcaatttttttcatttaaaataattatttataaaataaatttaaaatatagatcattttaaaagagagcagcagcaaacgattccagctcatatatatatatatatatatatatatatatatatatatatatatatatatatatatatatatatatatatatatatatatatatatatatatatatatatgtgtgttaatagctgaaaataatatatataaaaattataattaattaataaaaaactaatttacgaattgtttgaatattttttctttgcttaatagcagaaaaaataattatttaaaaattatttgaaggcataattttttcaatttataatacaacataatgaaaaaatttataattcgagttgtatttgcacatggtaaaaaaataaaattaaataattggcttatttctacttttaaatatgcacaaataaacacattgaattttacttgcatatatttgaataattgtttaatacacttcttcatttctgatcagttaattaaaataatacaatgagt

SEQ ID NO: 44750 - DNA, 829 bp, Heterodera glycines
ctatcatgctcgagagcatttgtatgtgtataaatttatcaaaaaaagagatagccatttttctgagatagagtataaatataaaaatcctctgtaaaataaaatggcgattgtgcacagccctccgtctcatgcgcaagagcatttgtaagtgtataaaattatcaaaaaaagagatagccatttttctgggatagagtataaatataaaaattccctcaaaaataaaaggtctattgcgcaccgccctccctatcatgctcgagagcatttgtatgtgtataaaatttatcaaaaaaagagatagccatttttctgggataacctctaaatataaaaatcctctgtgaaataaaatggcgattgtgcacagccctccgtctcatacgcaagcgcttttgtgaggtataaaatttctcaaaaaaagagatagccatttttctgggatagagtataaatataaaaattccctcaaaaataaaaggtctattgcgcaccgccctccctatcatgctcgagagcatttgtatgtgtataaaatttatcaaaaaaagagatagccatttttctgggataacctctaaatataaaaatcctctgtgaaataaaatggcgattgtgcacagccctccgtctcatacgcaagcgcttttgtgaggtataaaatttctcaaaaaaagagatagccatttttctgggatagagtataaatttaaaaattccctcaaaaataaaaggtctattgcgcaccgccctccctatcatgctcgagagcatttgtatgtgtataaaatttatcaaaaaaagagatagccatttttctgggata

SEQ ID NO: 44751 - DNA, 1357 bp, Heterodera glycines
gctcggggccccttacgtggatcagttgtcttagccactagaccacatccacccactgagggaagactgttgtttggggtcattttccttcattatggcccctgttgcttttgctcccacagcactttgagctcccacagctattttcgatcagccattacaaccagttcagtcactccggaactaagccacttatcatattgactgtttcgatcgttggatggaatttttattaacttatagcattattggtgcaaaatctgttattaaattgtacaaaaattccaatttttttctggctgtgcctatcagtagcgcctgaacctttatggcaaccctggtttagtcggtataacggcttatacagacagttgtcccaaaaatgaatataccaaagcaatattgctgttgaacgttcgttatcacttcattggaagtgcaaattaagtcacggaaaatgaggtgacctgaatcacatttttgtattttttatgagcataatttttttaatattttgtaaaaaacaatagaaattaaatgacccggaatttaagaaacaccataatatggatgaataaaattttgcaaaaaatgaatcatccgaattttggaaaatctaatttcgtaccaatgaaaggggcggaaaatgagcgttggaggacagcagacaaatgcattttttgaagcgacttttgtctttaaaaattggagcaaatgacaaagcccatgatgaaattgattttaactgactaaggagtatattcgcggatatggtttaatttttatgataaatatctgaattttttgatcagttagaattagaattttaattaatggcgaaacagtttttatttatattattattattattataaaattattaatttcgatcattcagtagagagaaaaaattcactttacaatttaattgatatagtgatcctgtcaatattttaccattaatgtaaatttataaggaagagaaaaattcatttttgagaaatatttttattattatttatttctttttttcatatcgaataaattataaattttaatttttaataaaaagaaaaattgtcaacaatgaaattatgcctattttcaattttaattgcctttttaattgctcaaattgaaattgtagcggaaaagaaaaaattggaacaaaaaacatttgaagaaatatttggagaaaaatgggaagaaaaagaaaatgaacagaaaaaaagagaaattgttcaaaaattcaacaaaattaaagaaaggatcaaacaaaaaggaagaaaatattcagcaaaagaatggaaaaaaataaagagaaaatagcgaaaaaattggcacaaatcgaaagaaa

SEQ ID NO: 44752 - DNA, 1341 bp, Heterodera glycines
  unsure (1)..(1341): unsure at all n locations
aactcagcgccgggccatttgctgcagcattcgccgtcgatttcttcgccggatgaaagcaaagcttcaacctcagcggtagaaacacggcgcagcaaacccacgcgaaagaatggcggagagcaatttatgggtaataaaaatttaaattttgtaaaattcagtgggtgttttaaatttaaatatccctcgatctaccgtcgcctgatcaattccgaaattcaaatttggcatgttggcattttgcccccgtatcgctgaacaatctcttcgatttcagaatttggcacaaaatttaaatttttttttttggcactttaccatcccaatggaatgaatgcctttgaaattttaagcataggaaactgtttaaataaatttaaatttggcacaaaaattgtgacaaataatttcttggcattttgcccagaggaacaccgtattccgctggaggccatttcctcctgtatgctgcgcaagcacaaaaacaacagaaagccgcgcaccccattctccacccaacaactgatggcattggagcgcaaatttgtggacaaaaaatatttgtccatcgccgacagagcggaattttcgtcaaagcttaaactgacggaacagcaagtgaaaatttggtttcaggtgggcttggcaaatgggaaatttttttttaaatatttttaaatgaaattttaaatatttttttaatttttaaaatttaatttggaaattaaaaattcattttgttaaatgagaatatttttattatttgttcaattttctcaatagtttttatttaaatgattttaaattcgcttaattttcgtcccaaatttttttcaaattgccacaaaattcgtaaaaaattttttaaatcaattttttgattattatttctttataatcatcttcttacattttttgcgatttgttttttttctgatcttttggcattttaaagctttttccaacccttcggcggttggacagaaaaattttctaccaattttaaatttcaacgatttttctctgttttggccaagcctttgctcaaattttgaaaatattgctgtgttgtgtgtgtgccgtaataagcataattttatgtgccgaaatggccccaaatggccaacaactcgtaaattttacggcatttcccttccccctcctccgccggggggatttgtgccgagaagcccatccgattaattaccattnttatcgccgctccccccgggggttttccccttttttaccgtagccccccccccctcacttaaatataataataataaatttatttcacaccaccaccatcaagcagtagcagcagctgcagcagct

SEQ ID NO: 44753 - DNA, 953 bp, Heterodera glycines
atttgatcttccttcacggttttaattttaaaaaccccccccaccctccttttttaatggaatgagaccttatgttaaagtatatttaaagttatttctcccaaattacatacataacattaattgtgtcattctttctgtatttacatgttggtagttgcaaattttccggcacgtttaaaacaataacaaattattcatttattttcctgttttttcatacgctatcataattttataaccacatatttttcacctgtttctttaacttcttttcacctgtttttcacttcttttcacctgtttttcaaccgttttcacctgttttcaaacacacacgcacacacacacacgcgcacacacgcacacacgtacgcctgtacgcacgaataaggttttttaatcgatatgatggaaggaatggaaattttgggcgaaaagcgcggcaggggaggaggagggattggatgctggagggagggcgggaaattcggtcatatttaagttgttttttctgtctttctatctttatatttttcgcgtatttcatttatttagttttcatctctaagaatttttttgattcgctgtcaaatgcgatatattacaatttttcatttgtttcattgtttttagacctaccaccttttctcgtatattttttcattttttcgttttattcatctgtttgacacatgttatgaccttttttctacgaaattttcagatgggttttgacctttttttcgcaaatactttttcaaatgttttaatcgatgagcatggttaacaaatacgttcacaaaagaaaaaaatattttgtgaaatattatattaattttttgtaataataacaaaagagttgaggagagaaaaattggccaataggagagaaaataggcctaacaattcagtttttcgcacaatccaatcaaaaaacatgaaaatacacc

SEQ ID NO: 44754 - DNA, 862 bp, Heterodera glycines
ccccccccccatttcccccggcgttttttgatcggtgcccatttttctttgctcttcgccaccatggcatattgtctcttcctcacttcctacaaattgaatacttttcaaaataacctgtttggccccttcgcccttttatttttccctcccctcaaatttcaatgcccaaattcttttcactttcactgctctcgacagtaatcgatgaatgattggtatacccccctttcccccgcaattttgcccattttcgcgcagttcgcttccctttgaggcaatgattattcatccatttcccactatcctttccattcgttcctttctctattttacggccacatttgctccgttgaattgtatcacaacacaaacccaccccatcccttcgtcggttacgtttcccccccccccccttttccccttccgccgccgtccaaacgtcgcgtcgtcagtttgtcaaccaacacctctcatcacccatcatttcaccccctttctcatccgctccatccctcctctctttactcccctattccccttccatttgctctttctttcctcttccttttcctcttccatttgctcttccttttcctcttccatttgctcttccttttcctcttccatttgctctttctttcctcttcctttttctcttcctcttccttttccatttgctcttccttttcctcttccttttcctcttccatttgctcttccttttccttttccattgctctttcttttttctcttcctcttccatttcctctttctttaatcttcctttttctcttcctcttccttttcctcttccatgaggcttccttttcctttccgtttggtctttctttttctctt

SEQ ID NO: 44755 - DNA, 1481 bp, Heterodera glycines
cggtaatcagtgttctctgatcaactttgctgtttagccttattataccacgcaacagcagtgctgatggtcgagagtctcggtctcggggttctcgctctcgggttccggattttggtctcgggcctcggggttttcagtctcgggtcttggggttttcattctcaaactcgaggatgaagcttaatttcggggtcaagtctcggtttcgagagtgtcgggaaattttcggtctcgaactcactaatcagcacccaccaccacccgactaaaaagcgaccgaccgatgctcgagagtcttgagagagggtttggggtttgcgtgtgtgttgttgtgttgcccccccccgcccctcggtggggcgggaggagggggcgggaaggccaagatacctctccccccgtcggcgctctcaaattttcccatttcttcgttttcgtcccatccttccgtctcccatcattttggtcccctaacagaccatcatcatcatatatatcaccaccatcagcagagtcatcagtcatcattccatccgcgattatacgaaatttctcacttctattcgaattctgaattgtacatccatttggtttgaagccgacctcgaattcatagacccaaaaaaaaccttaaaattttacggatttcccaaaatggcttaattgttgatccatcatcctatattacctatctataaaataccaatttttcaatttatttacacttttttttcagctttcatggcctcatctttcatatatcgcggaagacacaaaggcaaaaataaattaattaaaatttttcatttattttgccaaaaattttcagggcaatattgttggctatgttttggacaaaatggaagaagaaatggaagacgacgagccccatggacacatcacttcgttggctgtcaagcgtacctttcgttgactcgtcttggcccaaaaatttatgaaccaaacggcacggtcgatggtagaagtgtaagtgtgcgaattcaagcattagtgtaattattcacctaattcaatggaagtgcagaagaattaaaattccaataagaattaaattttaaaaaaatattaaaattttactgtaaaatctaaataatttaaatagccgtttttcaataaaaattaataatttttaatggaattaattaatgagcattgaattcaaaattttattttcttcatttaataaaataatcttttatgaaataaatttttaattttgagagtaatatttaaaaataagtaaatttaaaaattaaattaaattatttagtctctcagaaatgaaaatatatcaacaaaagtttgttcgttcagagtgagctaggaattcatcacagagacctcaataggaattgaaccaagctcaatgtcaaaattgacaaagtaacgtaccactaaaccaaaaatcgtttgcgaatcacaaacaatttttccctttaataaaaaagatatttatt

SEQ ID NO: 44756 - DNA, 1758 bp, Heterodera glycines
  unsure (1)..(1758): unsure at all n locations
ttgagcgcggcagagacgggcggaaagcggagagtgatgccgagagaagagagaacgacggaggtaaacttaagatagacagggggcgaaagggaaaaagagtgagggaaaagcggagagtgagccgagagaagagagaacgacggaggtaaacttaagatagacagggggcgaaagggaaaaagagtgagggaaaagcggagagtgagccgagagaagagacagggaaagggaacgatgggaaaagcattcatagaaacaaaacctcgtggacgcgcacagtgaccaaaaccctcaaaagtggtcgagactcgagcttgataggtttgccccttcccacctgaactcctcgtcctcccccacttccgcttggtccgtcctcacgtcggcccatccgattgtctcttccgttcggtaattttccgcctcgtcgttcgtttcaacttttacgaaaattcggcgtaaaacatcgctgaacagagagaatggattttcggcaccaaacttaaaaagaaaagttttgtcggcgtttgcgttggtcaacggaatgacctgacgagcaacggatttgacccggtccgcacttctgaccaactccctccacttggccaactccttcgcgccctcgccctcctccaattcctcggcctctcttccgctcaccaaatttaccgctcggttccatttagccactaattgttccgtcattccgcttgtttctttgccttcaatcattggcccttgggacgaattgtcagcgatggaagcgacgaaattgtcgaaaaggacgggagaaaaaagtggaagcaaagaagaagaagggaagaccaacttgaacggaagtgaggggaaaagaggaggacaaagagggaaaaagggacagagagagagggaaggaaacatggagtgagacggaaggggaagaaggttagaaaggaacgtagggacaagtagatagagggaaaggggactgagagagaggaggacaggcgagaggggaagagaaatatggaggagggagaggagaagcgggggagggacggaaatataagagagacggaaggggaagagagttagagagggacgtagggacaagtagatagagggaaaggggactgagagagaggaggacaggcgagaggggaagagaaatatggaggagggagaggagaagcgggggagggacggaaatataagagagacggaaggggaagagagttagagagggacgtagggacaagtagatagagggaaaggggactgagagagaggaggacaggcgagaggggaagagaaatatggaggagggagaggagaagcgggggagggacggaaatataagagagacggaaggggaagagagttagagagggacgtaggaaaaaggagatagagggaaaggggaacgagagagaaaagggagaggaaatatggagggagacggagagggagagagggacgtatggatgggagacgagagagagaggaggacaggcgagagggggggggggaatatgaagagaaaggagaagccgaggaagcatagggcgggcgagcagactcactttcagctgggaaagaaattcgctgaggaaagttggaaaattggccagctgggattcgatcagagacacagcggggaacaaggaatagagtccggcacggaacggtttcaagtggcccatctgcgggtcggtgccaagttaggtgtgtgacggtagggtggngctgacctgnttgaaacagtgggcccctctg

SEQ ID NO: 44757 - DNA, 1373 bp, Heterodera glycines
  unsure (1)..(1373): unsure at all n locations
attgaccacaaaaaacggattcaccctctggatttgccctccttttgcgacatcgaggtcaaactcgtcttaacatttcctcatttgactggtgagcatcgacagaccaaccacagtcgtagttgaacccaaaatccacatcagttcggtgtgttcgggcaaacgactctgttggaccagcaaagtcttctccgaatcgaccgacaaattgaacattcagggattggttgactcaacggccaatgcttaccccacaagcgagcagtgtggccaatgtgcgaaagcagttcaaccgcaactgaaacagcgcaccaatgggaatgaccaattgacccccccccccccattgtcagcagtcacttgggcaggttcatgtcggcctgtcgaaatggagtgaaggtcagcgaccaacaaaaccctacgggcgatggacatatcctaaagcaagacggggtctgtgagaaaggaacggagaatccattctctcacattttgaaaggcaacgaaggatttgatgaagcccttaagaggaaaaataaatgaaaattaaaaagtaatccaaaatcggaccaggtaatttccgatgtgcaaattgccggtgggctgaatgccggaaacgagaacctttgacatttggagcagaaagattaagggaagctaatataaaacagacaaaagcataaattaaagaaaataagtgacgctgacaaaaaaaattgaagaacaaatggacgaattgaaaagcaaattgaccaattacaaattcaaagggaacacaattcgatttgaggggcatttgatgcgacaaaaggggcattcgaccgaagaagtgtcgttggacaagtctttcgaggagagagtgagcagacaatcggaacagaggcagtgaccgcagggcaaacagacggagcgacgcatttggccgaaggcaatttgggaagagcaaattttgcaggaaaatccctgaaaattgagtatacaggatggaagtgcttnnggtggtngcncgtcccgntggcgcttctcggttttgngtntncnnngngncgcccgtttttgcccgntttttgctgccgcttgccttcgctttgtgtccgtgggtgcttttctgtcgcttttttgccctgctttgccntgttggnttcctgcgctgcggcgttttgtgcgntggtggcccntccgnccttgtccncctctttcttgggtttcttggcgggggttgtnntgtccttgncttcgtttnngttttnccgttntgggctggggcctcnggctcnnttngcgtatggaaggcgnccgtttnctganccgcngananncncgtgttccttaaaagaaaccaagcggaatgaatttggtcgattccgacggga

SEQ ID NO: 44758 - DNA, 873 bp, Heterodera glycines
aagatttgtccttattttggggctattgttcttatttgcctattatttactatatatattcatatttgggaatttatggccaaatgttctttttttcttataaattaaaacaaattttccccggcggcgcctatcggcgccaccggacgctcctgtccaacctccaaaattttttaaaaaatgtcgcaaaaaaagccttttgaatgtaaaaatggtcgccaattgtctcaaaatcgaaaaattgataatttttgatgaaaatctgttaacaaatcaaagaaataaaaaaaattttccggcgacgcctatcggcaccgccggacccactcccctcccccgttcttcaaaatttcttggaaaaatgcgccgtaaaaaatttattaaaaattttattttttttagataaaaattgatctaagtttgctatttttctccccaaaattgttaaaaataatcatgggaggtgaaaaatataatatttgatacatttttgatcgaataaattgtaaaaatatctgatttgaagcaattttgcgaaatgttcttatttttgaccataaaatcttattttttggccttaatgttcttattttgaaaaattttcgatacgaaccctgccttaaaatgacttaaaaagtgttctaaactctgtttgaggcttctaacatgcatttttttgtgacttttttttttaccctttttgggatttttatgacttttttgagtttttgcgacttttttcgtgattttttttgactttttgaggcgaaatttgaattttagcgaagaaaatgccgaaaaatacaaagaaaatttcgatcggtgaaaaggcaatgaaacttggatgagttttttcttaattgttggaagaat

SEQ ID NO: 44759 - DNA, 404 bp, Heterodera glycines
atattgtatgcctccatttactgtattacaaccccttgatgtttttgtctgtctctgtacttactgtatgtatcccttctaatagaaaataaaagcgaaaaatgagttttgaggttttaatccgagcttttaggggactgtggacttttgctcaaaaaactgggtgtcctaatctgagtttttaaggcgaaagtccgttctccggcgattgggtcatttgggatttgaaaaattgacgggagcgcgaccgggaatcctgtaaaactcccagtgagcaaaaaatgcaatctgaaccgtgaatccccataaaaatcccgtgggagtcccaatcgtcacgggctctgctcattaattcatgctttctgaagtgattttttgcataaatgtggaacattttttgtgca

SEQ ID NO: 44760 - DNA, 1101 bp, Heterodera glycines
aaacatttccgaaataagagcaaaacatgggaaaaaccatgctatacttaaaacccattgcttttttaacgaaaaagaaaccaaaaagcaaaggcttttttccgtacggttaatttcaagaaatcaaccaaaaattttcggcgccgacggaatcagaattattatctatgtttttgtataagatttttcattaaattttccagatctattgaattcatgtttcggattgaattagaacaaaataaatattatattcggaatctacgcctcaaaaaacccatagaaagtaaccaaacaccactactacataagaatgaaaaaacaaattactttatttaataaaaatttggcaaaatggttaaataattcaaatttgtatgttttttgtcttttctctcacgaaagaattccattcttagggttctatatttaacccgaccccgagtcggggttaagggttggggttgtcgcggctgggagcgtcggtgtcggggttatccccggaaaatgttcaaaaaagtcggggcggggccggagtcgcaaccctaggctaaatataaaattttcaacacatttccatttgagtagagagtcatcgaccaaaatgtgatcgcttgtctcaaccgttttggccagcttgtcgccaaatgtccgattatatttttccatcaatacgtgcagtgatcgcatgttgcacttatgatgtgcaacttttacctcaagcactagaaaaatatgaatgtcacggatctgaatgtcaatgatgcgctcgtttagagacaaattacttctgctgccattatggacagcattggcccattcgaaatgacagaaggcagacgaataaatgtgattttcaaaatttaggttttttaacttataaatatcacttattttgttacctttttgctcatattttccttgaataaaacccaatgctttggaaatatttgggcctttttatttttgaaattttttcacccttaaatttattttctgaacatgaaatgccaaaatttgcatgattttttttggaataattttgcccaggaaaaaaatggagcgaataaccaaaaatttcaaaaattcggattaaaaaaa

SEQ ID NO: 44761 - DNA, 993 bp, Heterodera glycines
  unsure (1)..(993): unsure at all n locations
aattttttattttttcattttatattttgtcatttaatattgataaatttttgtcttgatcaatcacatatagactgactgtatcatgattcaaccatatattttttatgtgaaattattaaagcaacgaatcggttaagttttttttgatttttaatttttaaaaataaaaaaaattattttggttgatttgaatgatgtcttgtagaattgaatttaatttcaatcaagttatcctttcttctatcagataataatatgatggcatgatattctgactttttatgcgatttttcgttcgccttttattatagtaatatttttaaacattttttaaatttggattttatattgaatttttccatctgtaattattggttttattcttcagtcattttatatgcttaatttaatatatgttttaggtattaattttatatgttttctattaatgttctccctttttaatatagagtaaatttcggaatttaaaaaaacattaggttttaattttatttattgtagtaatttttttataaatacaattattttcgcaattaatcggcataaaataacatgaattttaaaacttcagtaaaggttttgaatttcttgtgatactttcaattgttgcaaacaaacggttgagagtgtttcttatacgttaactaagtttatttatgaaattaaataattgtaattataattatttggtgtttgttatttcatgtaacttcttaatagagaatttgtaggaaacattcatttgtatttgattgtttaatttaataagacaatctatatttctgctcaaaaattataaatttatctcttattttcattanacataaaaattattttcattatattttaaaagtctagataaaatatttttttgaatttaagattatttcatgaactggactcaaatcttgctactagtagcagcatggattttgtataanattatattttatttataaatgaacaatc

SEQ ID NO: 44762 - DNA, 1618 bp, Heterodera glycines
  unsure (1)..(1618): unsure at all n locations
tcggaggttgaatgatggcatttgtttttagggttatggctcggctactcaaggtgattattaatgtttttctactatatttaattatcgttcatccttaataattgtaaacccaaaaatataaataaatttcacaaatttaagaatttttttcttggttttacaatttctatgaaatttatttcgtttcttcaattttcttttgtaaaagtttttttttttaattttgcctttctcggttctattatcccattcccaaaccccaaaaaacagttcgctggttgcaagagtcgccacgtgttctgccgttggcggtgatgccgccaggcactcttcagcccatgccgcacggcacgctgctgacaacaacaacggggccttctttaccgtcaccattaccatcatcaggcgacacaacagcgcaattggtgatgccgcaacaacaacagcaactgtaccatcagcagcagcaacatcatgttttgtcgttgccatcttcagcgacagcgggtggccgagctgttcagcaacatcatcaccgacgttctgccgcttctcctgcggtggtctatcaacaaccgcaacagcagcagcagcatcagcaacactaccaccacaatcagcagcgatcaacagcagcaaatatgatgatgagcagtggtccggctaacatgaacatttcagtccgtgaattcttgagcaacaacaacgcggccagcagagggggagaccgttgatgatctgattttttttgattgaatttctctctttcttttttttttgcttgtttctcctttttgctcttcttcaggctttgatatgagacgcgcgcattgattgattattgatcatttaatcattatcatcttattatttgtgttcccactttgatcgtttgaaaatgtccgttttgttattttacctatttatttttcattaacggcaccgactgaagacacaaattttttcagtggcaattttcaactcactttattgccctttgctcacaacacacacacacattttattttacaaacatacagacggacattcatttcataaccaatggcatggcattggttagtttctgattggactcaataaaattgatagacaaacgaaaacactggttatcatagttcccaagttcaaaaacaacctaaataggtaccaaagtgtccactttcaagcatttgaggtgcaccagcagatccgtaaaatgggcaaaaacagacagagagagcaagcagcaaagtgtcatttgttgtccaatgaaagtgagtggaccacgacgacaacgacatgaaacccattccttcccccatcagctgctgcccatttcaaaaaaaattggattatttttgttacttttcttccacacattggtggaatttttgcttttagttggtggcgtgggtgggtgggtgcttatttgaaaagtgcactacatatagtgagtggataaagaaaatactgatgaaaatgcccggngggggatgcttttccctcgacctctcttctctgcctgcccaccactcattttcacttcccccgtcactgatgaggaaaaatgtatgcttaaaatcattgaggagcattggcggcgtatgccagcagc

SEQ ID NO: 44763 - DNA, 1008 bp, Heterodera glycines
cgaccccgagtcgggttaagggtcggggttcggggtccttgggggtggaagcatcggggttcgggtcggggttaaccccgaaaaatggccaaaaatgtcggggttcggggtcgggggcccaaccctaatacatatgttaaaaatcgcaaatttggtcatttttccgataaaacatgttaacaaattgcaatcaaattttaaacagcctgcaaaattttaaggattttcatcacctatgagtttttttaaattcgtcttttccagccttttatgtttaagttacatatagtatgatgatgtgccgaccacggcactttcccttttttgtgccgttttcatttgttgcagcttcacatataatgggtcaaacttaataattctttgaactcatccataaattgactgtgtacttcttcaattgccatcgaattggcacttcatggtgatcgcaagtcgatcaggtgtccactgaatgttgctgatcggaagggcacccgaagggttgccgaaaccgatcgaatgaatagccaaaaggaaaagcaaatatggataattagtgacggttttgattatttatattgaagaaatttgatattttctttcgcattggccacagttggtcaaaagtggtggtgaaaaagtcactcttggacaaatgttgaattttcacatgtccaaccaaattagtggtaaatggcaactcgtacaataaattttggggcctcggaatgccatccctgctatgtacgagttgtcagacacccaaattagttgcctaaaaagccgtattcttttttttgtctataaataattttggttagacaattttctttaaaatccaaacagcagtgaacaaaattcttcagttgatcagccgatggagtagcagaagcagcagcaggccgtatatccagaaaaaaatttcggggagggcacccgattttttttttgctcttgggccaacaaaaaattttgcacagtattatttccaaaatttcagcgccgggg

SEQ ID NO: 44764 - DNA, 1129 bp, Heterodera glycines
attcatttaaaaaaaaataaattttaaatttgggtttagtgcgttttgctggatttttaagataaaagataaaaaagtaattattttaaacaatcttccccatttttcaaataattcgcattttaaaattttttagatttgtttatattattgaaaaaatcataaatttttctaaaaaagaccaatttcattgcgttttttgtcctaattatagttttggccatcagcttttgcaagttaatgaaatttttgaaatttgtagaataatggagaacaccacttttagatctatcgaatttaattttaattttttttcaaaaattttccatttaatagttttttgagtgaagcccttttgctgattttttttaatccaaaatttggccctaaatgggaaatttaaaaaatgtggtaaaatgtttggcgcctcggatgggaaccgaacctatattgcattcatcatgtgggaaactataccattgagctaccgaggcaaatacgaccattctttggcgcaatacaatgtttttgatatgaatatttttgaaaattcttaaaatttattaaaagaacacagtaaaaattagaaaatgcaaaggcaaataaataaatatatatatatatataatttttattgtccaaaaattctccctataaaaaatatgtttttaaccccccccccccataaattcttaagaaatttaaaaaaattctcttaaaaattgttcttgttcaaaaactctcccctaaatttataattgaatttattttaaaaatccccccccccacataaatttagataaaattgaaaaaaaaattcgctaaaattttattgttcaaaaatcctcaccataaataatgtttttttaatccctccccccccccccaataaatcccgacgaaattaaaaaaatattctctccaaaattgtttagtcaatcaacaaatcatatcaaaattgagggccatggaatatcatcgaggtgtaatcataatttcaatggattcattttaaattctttcgtcagaatttcaacagtcaatttttgtcgttctgcttcatacaaattgtttggctcaagtgtcaacagttttccaaaatattcaaatcgctttttctttttcatta

SEQ ID NO: 44765 - DNA, 1150 bp, Heterodera glycines
cagcataagacgccgatactatgtttctgaattatttctcagcgcattgatcgtgaaaatttggaaaaatggctatctcttttctggtctacagtcaagggaattccaaccgcactctcagcataatgacgccgatactaattgttctggaatttttttctcagcgcatttgatcgtgaaaattttggaaaaatggctatctctttttctggtctacagtcaagggaattccaaccgcactctcagcataatgacgccgatactaattgttctggaatttttttctcagcgcatttgatcgtgaaaattttggaaaaatggctatctctttttctggtctacagtcaagggaattccaaccgcactctcagcataatgacgccgatactaattgttctggaattattttctcagcgcatttgatcgtgaaaattttggaaaaatggctatctctttttctggtctacagtcaagggaattccaaccgcactctcagcataatgacgccgatactaattgttctggaatttttttctcagcgcatttgatcgtgaaaattttggaaaaatggctatctctttttctggtctacagtcaagggaattccaaccgcactctcagcataatgacgccgatactaattgttctggaattattttctcagcgcatttgatcgtgaaaattttggaaaaatggctatctctttttctggtctacagtcaagggaattccaaccgcattctcagcataatgacgccgatactaattgttctggaatttttttctcagcgcatttgatcgtgaaaattttggaaaatggctatctctttttctggtctacagtcaagggaattccaaccgcattctcagcataatgacgccgatactaattgttctggaattattttctcagcgcatttgatcgtgaaaattttggaaaactggctatctctttttctggctacagtcaagggaattccaaccgcactctcagcataatgacgccgatactaattgttctggaattattttctcagcgcatttgatcgtgaaaattttggaaaatggctatctcttgttctggctacagtcaagagaattccaaccgcactctcagcataatgacgccgatactaattgctctggaatt

SEQ ID NO: 44766 - DNA, 1257 bp, Heterodera glycines
  unsure (1)..(1257): unsure at all n locations
taaataaacaaattnttgcggacattaattatattattccacccaagataatttttcattatactaatataatgtaaatcctataaccaatttaaatataaataataaaagggctgccaatttcatttaatacattttttcaatgattctatgtgatttaaataataggaaaacagattcttttttaacaacagtttggacttttatttacatatttggactttttaaaaattcttaagaatttttttaatttcccctcaaaaagatatcaaaaacaatttccaaaatacttaaccgttatgctaaatatattttttcatttttatcacatattgttcttatttattttctaagaattttttgtctaaaaaatcataatattataaagatttttattcacttattttggcacatctttgggggtttttgtaaatttttcttacatatttcgagatttttcaacataaaaaaatttccgtcaattcttaattgatttataaatacgaatttctaatttttaaatttaaatcccccctcactttttcagcttcctccaacactttctccgttcggatggcctttttccgctcgtttctctgctcaatcagtgccattgccacggcccttccgccgaatttctcgcccttccccttttggcctccattcgcgcgttactcaattcgacggtcggtctttgcaaatgtttcgttgttttatggcatttcaatcaaatggccttaggccatccgtcgcatttcccattaaatttgccaattggtcccaatttccgtcccccctgctaattacccccccccccattagcaaaattcatttccatttccatcccaaaatgctttttggcttctaattcgtctccaaatgcttcttccttttcagactggtcgtcagttcgttcagcaatcagccgaaacatttcagtcgatcgcatgggctttgcaatttcaaagtgcgcgttgtaaggcgaccatttgcaattctgcgatcgttcttgtcaccgactaggctctcctttcagcagccattcagtgtcgtctctcattggcatcagctcggtcgcttttggcattcgttctccgttcagcacaatctgtgacatgctttaacatcttgcatgaatggcactgccacttttggcatccccccaccgccgatcagtccgatcattaatgcttcatcctctctcccaccgattgatccgttggaagcatcggttcagttaaaaatcgccttcctctt

SEQ ID NO: 44767 - DNA, 1654 bp, Heterodera glycines
  unsure (1)..(1654): unsure at all n locations
ggcacacgacctttcctccgaagccttcgttttcaactccaccagaatcgccacagaatgagtgcacgggcnaattgcagacagaacagctgtgacttcctccgtaaattgcttnacaaacacaacaaaataattccattgataaagctgaaaataaacgtgctaaaatacttatgtacgtcattacgagtggtcggaataatatgtttgggtttttaatatttataaaatacatattttagcagggttgccagatctgaggatttatcctcattttgtggcttttgataggtcaatgaggatttttttggaaaatgaggatttttgtggctttttgagaaattttgaggatttttgaggcttttggggaaaatcctcagaatattttaaattttgataaattggcataatgtttggcaattatttaatttgaattttagtttttaatagagtatcaaacggaaatctcacccaaatttagccagaaaattacaatttttttcgaaaattcacaaaattatgaattttttttaatgaaaatctgctaaaaatatggtcaaaattctcaattttcccccctccgatgcctatcggaccctaaaaatcctttttctttttttttcaattttactcaaaattgcaaaatttggccattttgtggacaaatctgttaacaaatcacattaaaaattacaaaaattttccaggcgcctatcggcaccgccggcccctcaattctccaagttttttggaaaagcgccgcaaaaaaatcaacttcgatttttcatgctcagaatctcacaaaatgcttatttcgaacaaaaaaaattactcaaatcgatcatggacaatcaaaaatataacatttgaacattctatacgtgttttgaataaatttgtaaagtgaggctttttgacccaaaatgaggcttttttgcttgccaaatgaggcctttaaaaattttcatctgcgaaccctgggtatgtatgagttgggtttggatgagttgggtatggatgagttgggggtgactcacaaaaaatattagttatttacctatataatgtatataaaatttcagatgaatattctcaaaattttacatacctaactatttttaaataaaaaaattacaaccagcctgttgaatggggaattcgtcaactactgctcgatcgggtaagaattaaaaagggaatttcaaaatattgttacaaaaaaagatgatccccagtcgacactaacagccggtgaaacgctttctgattacgatgagaacattatcaacaggggtacgattgggaggccaaaaccgctattaaaatttcactcggtgtgcgggacgaacattcaattgctaagggaagggcgagtggcacgacgaaaagagtcgttttgcaagggtcttgcattcagcaaccgacccataagcatcaatgagatcgtatgcattcgattgagtgagatcggcactaattggagcggagttatgaggtgctgtgggctaattataagagggcggcggagggattaatgatgaacgagacaatgtgaataatttgcttattcagattcggtgtcactaatgttgatccggccagttttcgcgacattgaattgccanaagtattagggttttttaaaactaaaaca

SEQ ID NO: 44768 - DNA, 936 bp, Heterodera glycines
  unsure (1)..(936): unsure at all n locations
cccccccccccccccccccctcgcctcacgcatcattttcctccaattctcattctcagcgccaccacatcccgccaatatttcaccccatccattcattcattcttcgtacaaaacagcagtacggccattgcttgtgtcccctccgccatcaccatttccttggcttcgcaatttttgcttcaccttcaaattttgaaaaattttacaaaattggactgtttttttattgcatcataaaaatcattgtttctgtgcacaaattgttgttattttgttcagcaaatgcaataaattacaggctttttggccgatgaataatttattttgttcaaatttttcttgaattttctaaattttagaggaagaaatatgtgttccaaaaatgattcatcagtgcgcatcgacttgaagcgatgtccatgcattcactcattggctcaggtgtggtggtctttgttttgcagattttgcgcagaatttagtccaaaaaacgtaaaatgtgccgcaaaataagtgccgttgtgccagaaaatttaaaattttcgccctcttccgccctcctaatttacatccccatttttgctcagttggtggatgtgacattgcaatcgctgctttaccaacgacaaatgatccccgagccggcctcaacacttttgcacggctgcacaccggtggcggaccagttcagggacacctaccaaaaagtgggtaggccgcaaaaaaaaaatggaaaaaatcatttgggccatgcccganattttcttgggttagggcattanaaattnttagggtataaaatggtgaaaaccccgagcatcgttttaggggttgatcacggcgccaacgacaaaaaattttaaaaaaaaaaactcaggtccaacaaattctgcgcggcacttccgctccgccatggggacggacgcattcgcg

SEQ ID NO: 44769 - DNA, 1022 bp, Heterodera glycines
  unsure (1)..(1022): unsure at all n locations
agcaaccctctgttgagagtggcaatgctatttgctcctcggtttgcttacacagaacttttctccagcaaaattggagggttgtggaacagctaatcgaattttcaaaagagagttggttgaatattagaatatttggtaattaaaatatgagtccctttagaattggtctaccctacaacagaaattgacgccaattttgatgtgggcaactttggtccggttgagccaggaactgcctgtacatttgctgaccaagaattaggtcaaagcagcaacgagagtatagagaaatgtattggcaaattgcatcacctaaagctcggggcagaaccctactccaatctccccttaaaaatgataccaatgagtcaatatctcaacaaatttaagacataattgaaataattttcttgtctgcgattcgacgggccctttcgtgcatattttggccagcaccggaggaaatactttgtcgaaattcgggtccaatacattggaaatgtaagtgagcatttggcgatatttggcgcccgtgttgaaaaggcatacgatcagtcccataagttccatgtaccgtagggcccccgctgcgggaccgtaatttgtctgaatgggaaaaaaaactatgcttggacgtttcgttaattcagctagcatgattgtttctcaaaaatcacagtggtttttcgtaaaggaagccgaccatttcgtcactaggagttttttcaaaatacatcgtgacatttcgtaaattcgccaaggaaccagaaaattggaaacctgaatttacgattttgtttaaatagaacagagtggtaccattatcggttcatgccaatttttcaaaatgggaattaccgtattagtgaaaacttcattaaacaaggcaaaccctcccattnttttanagattcatctataggtaaatattgtcttttttcaaaagaatttccaacattttttgttcatttnattttttaattttttagataatgtcaaanaactatgaaagaataatt

SEQ ID NO: 44770 - DNA, 856 bp, Heterodera glycines
aaaacaggttaattcttttcctttcagtatccctgcactacccggggcgcttctgataagtttctgaaaaaaaagataagcctaaactttttggcctgtttaaaaaggaattaaaaatttttaaaaattttattcatctccctttttgatagaaaaagcatcagagtgcctaaactaacatgtaaataaaatttggtgcgtttcagaaccctttctgaaaaaatatttaagaattaattttgcaaaaaataaataaaaacgaaagactcagattttcgaaaatttttttgagccagctagctcggcgctcatttcagtgtaagttagtcctttaccggggagtatccctgcaaagtttggtacgcttctgctcaattagcaaaaaatatgagtgatcgaattttcactaaaaaagttaagcctacattttttggcatatttaaaaagcaattaaaaaatttttaaaatttaataattttcctgcaccgaaggtactcactcggcctcttcgcggcctcgtgtgggcccttcgccccctcccctccccaaaaaaggcttttttcaaaatttcgcaaaatatatatataaaatgccaccacctgcgcaacggaatccgcgaatgccaagcccacgcgcgcacacggcgcaacaggagaacgcggcgctgaacaggttgctgacgggcgcgtaggtgtgcacgcattggttgatcggtcttcccttggtccaaccgtagccgacaaacggacggggtggaccgaaatgtctgaaattttgaggaactggctttgcctttgtattcattcctacatgttcaatgtgctgatttgcttgggcgacatcgctgcctaatgct

SEQ ID NO: 44771 - DNA, 1044 bp, Heterodera glycines
  unsure (1)..(1044): unsure at all n locations
ctggaactttacacattcaaaaggatcgataagccacgctttcgcggtccgtattcgtactgaaaatcaggatcaagtaagcatttgcctttttgctctacgagaggtttccgtcctctctgagcttgccttaggacacctgcgttacgctttgacagatgtaccgccccagtcaaactccccgccntgacactgtcatcggcgcgggtcgccgggccaccgggtggcccgacttaaacaccaaaatggacaccctttcgggcgcactcccgttttaccgattaagtaaggaatcgatgaaagtagtggtatttcactggcgccttgcggctcccacttatgctacacctctcatgattcttcacaaagtcagactagagtcaagctcaacagggtcttctttccccgctaaatttgccaagcccgttcccttggctgtggtttcgctagatagtagatagggacagtgggaatctcgttgatccattcgtgcgcgtcggtagttagccgacgaggcatttggctaccttaagagagtcatagttactcccgccgtttacccgcgcttaatcaagtttccttggcttaacattcagagcactgggcagaaatcagacacggtcaacgtccacaaggaccatccgtctcctctgttttaattagacagtcggattccccgagttcgtgccagttctaaactggtcgttcagcgccaaccgaagtgcataccctgacgagcatacacgcagctgaagcgctccacaagcagctctcaccactagtccacgcaccatccccgaaagaacagcacacagccacgggcaaaagccgcctgtttcacgcaacagcccggctgacccgacctttagagccaattcttttcccgaagttacgaatctaatttgccgacttcccttacctacattattctatcgactagaggctgttcaccttggagacctgctgcggatatcggtacgatcaggcaggagattcaaatagcatccgtcgcattttcaagggccgtgtggagcgcacgagaca

SEQ ID NO: 44772 - DNA, 1182 bp, Heterodera glycines
  unsure (1)..(1182): unsure at all n locations
ccaatgttattttgtcgaaaccaatgccaaagggctaatgattgggcttttgccgttttgtcatgcgattctttgtttatctcggcacaaacgtcaancttntgcttggtggattggctatttgatgccggacgatgcgaccattctgtataattccgatttccttccgggtcaatttttaatttcgttgaattttaaaataatgagtaattctgttttaggccttcatacacgtgaccattttttgcctgaatggattccgatcaaactgatcaatggcacaatggctctcgattatcaagcggagtgaaatggaagcgattttgaaaaattgttttaatggaagtggaaaaatgctaagaatgttaacccacaaatttgtacacaaaaatttaaatttgttatgctgattctgattgtccttgctataaaagccattcttaggaaataaaacgtgtggaaattttgtttaatgctgtaaactaaactgataaaagtatcagttgttttgttcaccgacgagtaaatgttgaaattcatgggcttttaccttgagggtgattaagcgaaagagaaacgcaatcgatttggtttttgatttctttcaaagtcaaaaaatggcccatatgtaggcggaaatggaattaaaaagcgtgaagttaaagaacaaaagttaaatttataattaatattaaaatcttttattaaaaaaaaattcatccatttgcattgagttggatatttttatggaaaatatgtttatggattataactccatcctagaggcttaaaaccaatataaaaagcacgtttttatgtgtttcgtggcactcacagcccaggtaaaaaaattttatccaaacttcaaaatttgaaaaagacttgaagcttattaaccaaattaaaaataataattaatttacaanatatttttgtcttttccgcctaacttaatttttcaccatatcctcttttttccatgcataaatttgtttgattagaaataagagaaaatgcaaggcatattttgttatcatcgagcaaaacgctgaccccaaaaatgaatatganaggnnaaacatttttcaaaaaatctttttttttgggtcaaaccaataattaattctgtggntaaaccaatcctcagcgcggtcccaagttatgagaagactcaccatattc

SEQ ID NO: 44773 - DNA, 1556 bp, Heterodera glycines
gagtctttcgtttttatttattttttgcaaaattaattcttaaatattttttcagaaagggttctgaaacgcaccaaattttatttacatgttagtttagcgactctgatgctttttctatcaaaaagggagatgaataaaatttttaaaaatttttaattcctttttaaacaggccaaaaagtttaggcttaactttttagtgaaaattcgatcactcatattttttgctaattgagcagaagcgtaccaaactttgcagggatactccccggtaaaggactaacttacactgaaatgagcgccgagctagctggctcaaaaaaattttcgaaaatctgagtctttcgtttttatttattttttgcaaaattaattcttaaatattttttcagaaagggttctgaaacgcaccaaattttatttacatgttagtttaggcactctgatgctttttctatcaaaaagggagatgaataaaatttttaaaaatttttaattcctttttaaacaggccaaaaagtttaggcttaactttttagtgaaaattcgatcactcatattttttgctaattgagcagaagcgtaccaaactttgcagggatactccccggtaaaggactaacttacactgaaatgagcgccgagctagctggctcaaaaaaattttcgaaaatctgagtctttcgtttttatttattttttgcaaaattaattcttaaatattttttcagaaagggttctgaaacgcaccaaattttatttacatgttagtttaggcactctgatgctttttctatcaaaaagggagatgaataaaatttttaaaaatttttaattcctttttaaacaggccaaaaagtttaggcttaactttttagtgaaaattcaatcactcatttttcgagtagtgatcagaagcgcaccagattttgcaggggcctaaaaaggtcaaggaaaggcgtctctgcgttgatttagcagtagtacctatgaatttaaattttctatgaatttttaaagttttttgaaatttttttaagtgcaaaagtggtggtgtctgcaaaaaattttcaccgggtttaaaaaatctaggaaaattagtaagcatttgtagtgttccgatacgtatccctgcaaaatttggtgagcccctgatcaattacaaattatttatggacgatcaaatttttagaaatttttatttatttttgcataattaattcataaatatttttttcagaaaatgctctgaaacgcaccaaattttatttacatgctagtttaggcactctgatgctttttctatcaaaaagggagatgaataaatttttaaaaatttttaattcctttttaaacaggccaaaaagtttaggcttaacttttttttcagaaacttatcagaagcgccccaaactttgcagggatactgaaaggaaaagaattaacctgttttatcacattagcttgtcatcagtttttataaaaaattttcaaaattctgagtctcctattattttatttttttttcaaaattttgaagggcggggggggggg

SEQ ID NO: 44774 - DNA, 1729 bp, Heterodera glycines
aaatgcaaagtcgctatttcgcggaagcggtgttttttagtgtaaggatgggcgcagacgtaaaaagcacattttcgcaaaatttggtcaaaacggacaaagtgtcgacactcaaaacggacaaagtgtctacacacttgctgggacaaagtgtcgacaccgtgttttttgtgcgtgtagggcagtggcaagtgcatgactgtctgttttagaccttttggtcaccacagggacaaagtgtctaccccgggacattgggtcgacgcgatgtctgtctgtctgtcatccactggcctttgtataatatttcttttattggcttccactggccatttagacaattttcttttaattggcatccattggccattttataatgtttcttttattggcatccactggccttttcttttcttggcttccactggccattgtttttttattggcatccactggccttttcttttcttggcttccgctggccattagacaattttcttttcttggcaaactgctcacgggtgccacgcatgcccattcgccaagccctcgggttccaactgctcacgggtgccacgcatgcccattcgccaagccctcggatttacaactgctcacgggtgccacgcatgcccattccaactgctcacgggtgccacgcatgcccattcgccaagccctcgggttccaactgctcacgggtgccacgcatgcccattcgccaagccctcggattcaaatgctgcacgggcgccacgcatgcccattcaactgagcacgggtgccacgcgcatgtgccggtagctgctgctgcacgaacatccagacacgcatctttcggtagctgctactgcccagtcaacctggactgtgcacccgttactggctacaactcgaccggctagggtaagcaagtgcacgctccccacgcatgccctcagagcggctagttatctgtatataaaaataacgggggggctaaccactaaacgatttccctctccttaagggctcaacggatcgccacgggaccggtaccaatcgaaagagctcggttttctctacaaaatggcccgtgtggaaaaaattcgcaccagcaaaaattttttgtaaaattgggttaaagaaaaaaaacccggctttttacaattggccaaaaatgggttgtaaaatgtgtgttttcaccttatttctcaggaaccgtaagagctacgcttttgcggtaagcgaacaatttgtagagctcgtcgagaggaagggtgagaaaaaaatttcgtagctctgcgacaaattcgaacaaaggtataccccggcaaaggtcgaaaaaagccgattttttttgtgttttcgccttccggtttacaatccgtttacaattgcaaattcatccggaatgtccggaatttcacggattttgatgtttttcacgtgttttcttcacgtttacgtgcgtttttgacgtgaattctttaaaccggtaccggtttttcacgtgtgttcttcacgattacgtgtatttttgacacgtttgcttgcgttttcaacatttcacgtgtgttttcgttacattaacgtgtgtttcaatatgttagcatgtgatgtcgagtattatcgcattgtttgcgttgtgttttactatgctgcttcgcatgcaatttttacacgatatacaccataacgtctctgatggttctgcaatgctgcataataatactgatagtgatgttac

SEQ ID NO: 44775 - DNA, 1202 bp, Heterodera glycines
tttcatttcatgccattgtttcattttttatttgcttctcccttttttagtattttttcccgaccatgcaaaaattgaaaattggcccgctaatttttctcgaattttttatggtcaaaaaagtaacctgatataacaaaaaagaaggttttctgtacaaattagaccagtagaatccgaatatggccttaaatctgacctatcttttaaccctgagcttgtactgctccaactccatgcatgaagttggagctgtacaggtttgttgagaacccagagaccaaatctaaagccatattcggactcagcgtggtcaatttacttagtttaattaaattcggaatttcgaaaaccacttttaaaacattttgttatttgatggtcttgaaaaatgccgtttttggagaccatttttagactcggccctccaataattcatttttgaagtaataaaatttttttcttataattttttatagtcctaactttgctctatttactcacgttttctctgcctctgtatctcttttcattttctttaaatcagccatcaaaaatacatacctcgaaaatgaccatttttacattatcaactctaactccttaaatacttttctaatgggatttatcccttgcccgataaatagcaaactcattctcaataataatgtcagatatttcggatcatgattgtggttttttaaatttatattcataaaaaaattctttaaaaaaagttgtgcggaaacttatgttacaccctaagtacataattagggattgattgcacagaagaaagagaacaacacgagctgagaatgagaacagagagaaagagagaggggcgatgagaaggacggacggagtgacacaatcgaagacaatccgtcgcggataattagcactaatcacccaattggcaaagtgaacaagcccactatgatggtgcatcaccacactgaacaccttttggagcccaaattcattgcacttccaaccggacaattgaaatgtttggcaaattggggcaaattgccgagtacgacgttaaccctaaggcagcaaatgaatgaacgagtgttttggcattcttttgtcattaattcccatttatgactcacctcgattctggcggagaatgagaatcgaaaagggcagcaaataccgcggcctaaaaaggaaaatgaattatttgccatggg

SEQ ID NO: 44776 - DNA, 1242 bp, Heterodera glycines
  unsure (1)..(1242): unsure at all n locations
agcgatttgcttcctcagtcgacttttatcctcccgggtcggattgggtctttgagttgagccattgccacggatttcgagtggttggcgcttggaactgaagaaatcatagttaagtaaggtacgtaaaaattattctgtcttcccggtacaccncaaaacacagccgccaaaatacagccgagacataacacaaccgggaataaattttaaaaaattagaaaaatcttagaaaaaatgtttcttagaaaattcatagaaaaaactttctaaaaattttccagcgatttttttgaaaaaacttggtaatttatcagtgaattttgaaaaaatcgttggaaaatttaaaaaaaaattttgatcgaattttctaacaaagtaagacctttttcttgaaaaatttctatttgaaaaatttaaaaaaatctattccggctgcgttatgtctcgactgtgtttctccggctgtgttttgtctttttccgctgtcttccacgtcaaaattttattgaaattgttaaaatttgtgtgtgattgattaatgcaataaaataaaaaagcaaaaccaaaggaaggacctgatactgacgcataaactgcgcgtccggcatccaaatgtgcatgggccgtttgctgaccagcaaatgtttggtgcattgtatggaattaagatgcgaaaatggttttagcatattcatttttgtatgatgaatttctaattaaataagtaacaaaaaaaattcgacaaatcggagggaaaataaaagggtacttatgtattatctgtgtacagatttcaaaaaatttgcatatcaagggtaaaatatagtgtgtaaaaaacatattagaaaaaactatcaaaaatataattataaaaaatgggaaaaccttttgaaatgaataacggaaaattgtttgaaaaggaaaagtgcatttcctcaggaatgaaaggaacgaaaattaattaatattaaatggcgaattctgttaaggattgcgttcgtaaacaaattattaataattaattgaatatattaaaggaattggaattgtaaaggaaaaagtggaaaacaaacatttaatgagaaaatggcaaaaccccaacggatataacaaaaacagattttaattaaaaataataaattggaagcgactatggtttcaaaaagccgtataaaagggcttggttttcagggatttcaaatcgctcattggttccccccgaaatttcatttcttcccc

SEQ ID NO: 44777 - DNA, 816 bp, Heterodera glycines
agagaaatgccatggaattgggggggagagacggacagagcagagaaatgccatggcattggggggagagacggacagagcagagaaatgccatggcattggggggagagacggacagagcagagaaatgccatggcattggggggagagacggacagagcagagaaatgccatggcattggggggagagacggacagagcagagaaatgccatggcattggggggagagacggacagagcagagaaatgccatggcattggggggagagacggacagagcagagaaatgccatggcattggggggagagacggacagagcagagaaatgccatggcattggggggagagacggacagagcagagaaatgccatggatttggggggagagacggacagagcagagaaatgccatggatttggggggagagacggacagagcagagaaatgccatggatttggggggagagacggacagagcagagaaatgccatggaattggggggagagacggacagagcagagaaatgccatggaattgggggggagagacggacagagcagagaaatgccatggcattggggggagagacggacagagcagagaaatgccatggcattggggggagagacggacagagcagagaaatgccatggcattggggggagagacggacagagcagagaaatgccatggcattggggggagagacggacagagcagagaaatgccatggcattggggggagagacggacagagcagagaaatgccatggcattggggggagagacggacagagcagagaaatgccatg

SEQ ID NO: 44778 - DNA, 957 bp, Heterodera glycines
  unsure (1)..(957): unsure at all n locations
tgaactcgaaaatatactttatttttagtttcagacctcacccaggtgtttaaaattttttgaaaaatcgtcaaaattcctgtcccggaaaatccagtgaaattttgaaaattcataactctcttcgtttttggtcaaatttagtgggaataaagtttgaaaaatagcaaaaaattaggagaattttatgagatttatttggaatttctatcttccaaaataaaaaagttattccagaatttctggaaaaattcgatttttcagaaaaaaattcctaactcccttatgaaaaagtattttataaaaaaaatatactcaaaaaatccgcaattttttgctctattttataaattttattttagctttttatcacttttttgaaaaaagccgcgaagcggccgaatttccccaaaaaaattaaaaatggcgcgaagcgcccgtactgaggccgcgcagcggccgaatgttcccaacaaaataataaacgggcgcgaagcgcccgtcctgaggccgcgcagcgggcgaatttccccaaaaaaattaaaaatggcgcgaagcgcccgtcctgaggccacgaagcggccaaatgttcttaacaaaattaaaaagacggacgctattttgaagaagtgacgaagaacatgcagcaataagcctgcaaaatctaataagtggaaaatacatgagtatagaatttattttcagaaagtgtccacagacttttggaaaaatatatttgcaatttatcaacaattttgagaagtgagttagaaatgataaacttcacgattcaaccaattttcgttgctctaattaaccgcgataaaaacattcgaatcaattaaatagcttctgagataataaggtttatcataaaatttcatttaanaataaaccctcaattattggtatgaacgatactttccaaacatgcacgcgttttgcgctcgagctatt

SEQ ID NO: 44779 - DNA, 1361 bp, Heterodera glycines
  unsure (1)..(1361): unsure at all n locations
agaagaattaagagtgaaggtaaaagagaaaatgtgtgtatnaaaggattttaatgggaaattttggtagaaataaaaatgaaaaatggaagtaatgataataatgagaaatgtttgggtattttatttttgtgaaatgttttaaatgaaggtagaaattaaataataattaataaattgtaatgaattgttattaagataaaaattggagttgtaaatgttgggtaatgattagaattgtatcagaaaagtgaggtgtgatggatataaggagagaatttgatgagaaaatttttgagaataaaaatggaagttggggatattgtaattttatttattttgtggtgagtgataattaaatttttgattaattgataagaaattatgaagaattaagtaattgatggaagtaagaaaaggattttataatnaaaatgaggataaagtgagattggaggttgatttgattgtatataatagtaaatatggtgaaataaaagagattcagtaatttgtataataatatctngnttttttgaaaatggtattggaaaanttgttaaaatattataataatggatggggacaagtaaaataaagcaacgaacaacggaaaatttctaaaaaatttttcctattttatagtttcaattttttttttcaattaccactaaacacgaaattctcttgaataaaaattccaggtcccggttttgcctataattcccgcgtctcgtacaactgtaattgcgtgaaatctatcataaatagggatcggattcttagttttttaactattttttctgcggctttaactcgacgagaaatgcacgaaaaacacattctttttcgaaaatttttcgtttttagtgccactattcatcactaggaatcactattttggagcttcgccactaaaaaaactatttcggaagttagccactaaaataattttttgccactattttggcgtttcgtcattatttttgccactattttggcattttttggaaaatttcccaaaaaatgcaataaaaacgaaaaatacaccccaagaatcgacctaaaaaattttcaaaaatacacccctaagaattggaaaaatttcacaaaaattcttcccccaaatttttttttcttgttcaatattttctaagaaaatattttgtaactgcaatcagtgaataaaatctttttccttaattttaaattattttcaaattaaaaaacagctatttaaaaaattacacccctaaatttggaactttttcgccactatttttgccactattttggaatttttttctcactatttagttaattattttgggattttttatcactaaaaatccgatccctaa

SEQ ID NO: 44780 - DNA, 891 bp, Heterodera glycines
tcatccattaaattggtataactaagagaggatatcacctaccctggcactaatcgctcgccactaattttataagctaaaaattatgaagagggttccggttttggggcaaataccttttttttaatttggtttgaacttctaggccatgttttttcgtgcccttttgctgccttttgggattttcaggccctttttgggttttagaaaatttattgaccaaaatgcaataaaaataccccccccctaaaaactggttggtttttctcaaaaatcatccactaaaatttgattttcttgactaaatattcggattgtgaaaacttttaatcatttaagtttgaatatttttgttaactatttttgggccgtctttttttgctcttaaaatttttctaaatttttagcttgaaaattgtaaaattccgtaaaataattgcaaatattaaaaatatatatgttgtatttgcagcaaaatttgcctacagcgtttcaccgagccttacaccactgtttgcggccatactttttggttggtgtgaaaattggatttttgaaaaaaaagcgaaaggtttgagccgtaaatttaggcaaaaaatggtggcacccctttttcgaaaaaaatcaaaaaattttcccatgtaaaatctttttattcagctcggatattttctgacacccatttcttgaaatcggactcgaacataagccgagaaaccgggctttttctatttccaaattttcgatctacacaaggcattaaaatatgaaaaaatatctgagtatcataccaatactgcgcagtaatgggactttgttcgagtcccgtttcaaacgccgaattgggtcgaaatgaaagggctccattttttaggcaaataaaattcacga

SEQ ID NO: 44781 - DNA, 926 bp, Heterodera glycines
cccaaattttaggcccccagccacagccccttgcttccccaccttgtaagtcttggatttgtcaaataaattcaagacttcaaattaataatcaaaaattctcttaaaatttttttgaacccaattcaaaaaaggaaaaaaatttgcagtcaaaaaattattcgaatttctccaattttgtttccataatttccgaaagttattcggtatcataatgccaaaacaaaacgaaatcgttttaaaatattcctttctggacttgacttggtttcttgatatcgaagctgttttctacgctatttctaaaacggttataccaaaccccagatttttgaatccggttttcagaaaaaatgccttgtggtgaaaacaatatttcacatttcactccataactttgtgagttcggcacggatcgagaccgggataagaccattggaaagagcagctcgagctctacaagaaggtatggaaagaaaaaatagttatttctgggactttttcagaaatcagaattaattctccaatgtggcccaaattttaggcccccagccacagccccttgcttctcccagttttaagtcttggatttgtcaaataaattcaagacttcaaattaataatcaaaaattctcttaaaatttttttgaacccaattcaaaaaaggaaaaaaatttgcagtcaaaaaattattcgaatttctccaattttgtttccataatttccgaaagttattcggtatcataatgccaaaacaaaacgaaatcgttttaaaatattcctttctggacttgacttggtttcttgatatcgaagctgttttctacgctatttctaaaacggttataccaaacctcagatttttgaatccgggtttcagaaaaatgccttgtggtgaaaacatatttcacatttcactccataac

SEQ ID NO: 44782 - DNA, 1371 bp, Heterodera glycines
agttctttgatggaaagtttgttgattgggcggtcgacattgcgggcggcgattaccaaagggatttcctaagaaaagattcgctttaagcggctaattcgaaatttactccgccagaacgagcgcgactgctcacgaaaacatcccaaagttgttcagcccgactcgaattctgagaggaaaagtgaaccaaatgagaggggggggggagtgacttggtcgaggaagggcaacagctcgtctttgctgggaaggcacactttgagcgacaaattgtcataagtgccggggggaaggcctttggcgctgcattccgccggcttatcccctttgaagatttggatgaactggcgaaaaccgccaatcgtttggcaaatgtcgcagtggacacttaaaagaaaatgggaaagtcagagggacagaattggggcggggagcatcacaacagacagaaactcacaaattgacagattcaaaagcccttcgccaccgcacttaccacacacaaaagtaacgaattatcattttgatgctcgagaatttcaagaaaaacggagaatccgaaaaaatcaaaaagatatatacagaaaaactgaaagttttagttttagtattttttagagtttgttggcaattgttccgatgacctgacattttgagaagccctcaagggcgagactctcgattacactgtcatccctccccccgttccctccttcttcctcccccctccccatccgcctttctcctcttgtcttaccacgaccctatgccgccacatccctccttgtcagggttcacacatctctctggcttcccgtggatgccaatccttgtctccacgtgtacgtaatatttcttgttgccgtccaatcctggagcatacaccttcaaaaaatgccattagcttttggcattgtgccgttctcctccgtcccttggacctccactttccctccgcccatttgaaagcatttgtggcccgcgtcgtccttctcttctttgaaggcgacacccgtggatttgtagctggggaatttgatgatcagattctccttttttggacctgaaatgttttcaaattgcttaaaaaaatagcgaagcaccagaagcggcggaacatgggaaatggcgttcaattttgatagaaatttcggcgtcaaccgatggattcgtcataaaaacgatcgatgcgcacaacaacagcgccgtggggagcattttggggaatggcgcagagaatcgacggacagaacggcggcgacaactgtccgcccccacgaacattgcgaacgatgtgctgacagtgacagaagcggaggaactttttaaggggatcatcctaagaatgagagggggggggggaatagt

SEQ ID NO: 44783 - DNA, 1099 bp, Heterodera glycines
  unsure (1)..(1099): unsure at all n locations
ttgaaggaaatgcactgggacccatcgagaagtctaaaatgggagcancagtaagggaccacaatttctgctagaataagagaatttggaattttttttgggagaaagggaaattctcccgggccntatttcgtgtcgataccgtatttggtcctattttggaggagaaatggagcattactgtattccattacccccgacccccaattttttcgcctcacccgtctgtggtgccgttgtgaaagccaaaaggcccgacgaattggtgaagcatttgtggagcttagagtcgataggaattcgggacccattggattctaacgatgatgaattagcttccgacctttttcgagactcagttaaatttaaggagggaagatatgaggttggatggccctggcgcccagggggtaaaattaaactgtccaacaactttttcctggcctactcgcggttgtcaggcctatcccaaaaattgcgttccaattcggagtttcgggaaaagtaccaagcaaccataatggagcaatttaaaaaggggataattgagcctgcagttcgtacgggtggcaacgagcattttattccccaccatgccgtcgttacccccaaaaaattgcgcatcgtttacgatgcctcggcgcatgagaaaggaaaagcatcactaaatgaaatgattattcccgggcccaacttagtcccggaattggcgggcgttttactccgttttcggtcctccgctttccctgtcctgggggacatccaaaaagcctttttggccgtcggtcttagggatgaagacagagaggtggccaaattcctctggctaaaggatccttccctgcccttaacccacgaaaatttagttgtttaccggttcaagcgcatagcgtttggtgtcaattcttcacccttcctcctggcttccgttcttcagcatcacttaaccttgaatggggaccccctggggatgaacggaatttctatgttgacaatctgcttctttgtagtgaaacggctaccgaagcagccaaagccgtccacattgctcgccaagtgatgacaagggcagggatgcacctccacgaatttgtggcag

SEQ ID NO: 44784 - DNA, 1315 bp, Heterodera glycines
cttttatatattgaacgtttatttcgttataacataccctcctcaactttttacacatttttaatttggttaattgagacaggcattaattccattgcttcaaatgtggtacgagagattgcccatgattatcgcggccgttagtatccccgcattttgtaccagcgactattacccactgcattggtatgggacgaatggctgcaaacatcatcgagttctgaaaggacatgagcagtcggctctccttatccgtgacagagagttgaccggctacgaatacaatttgatgggcatcgactcaattccggaggaggattaactgaccaacgagtgggattttagaacattagacgatgacgaattcctcgattatccattatgctgtctaattgtggatataatgtttaaatgaaacaatgttatgtgcaattctggcctgttttcctaatagattttctcttttggttgtgttttgattagtttctccccaattattggccgttgtagtcgagtgttagaaaatccaaacattttggattttgatccggttcaaaaatttcggctggtaaataacttagttgtgtattactcaaaaacatttaactaagtttaattttcacggttttcaattgttgcggtgaaaaacgtatttttctgcaggcggcgaaatgtctcgcagagaaaatccagaggcgaataaagaaaaaatctaggcgaggtaaaatgttttttttaatttaaaaaaaatccaaaaaagataaaaggcacgccaaaagtaagcaggaaaaatttagacctcaactaaatacaatactggtttggtatgatttactacatctttggtatatttcgcacatcactcttccttatacataggcattatggttgccccatttaattattttgtactgttgccgataaccttcttttctattctgtgcctttcgtttttcgtcgctggtgttgccgctgactcttcaaacgatttggaattgagcattggctcttcggcggctaccaaacttgttcagggtgccatagatgggacacttcgttctccgcgtttcatcgaattggaattggccagcaaaaatagtccacgtcacgccttggcccatgtttactccattaaccgagtgaatgttggtcagtcttttgtccttttcaatggctatttttcatgtctttattccaggctttctcgaggttcactttaatcagagccaaattcgggtggagacgcgaagggtggtgctcaactccacttctctgaagggcatgacatcattgccgttgctgtggacgggaagcg

SEQ ID NO: 44785 - DNA, 800 bp, Heterodera glycines
tgtatattctctctttttattttctctttggcattatgtatttccaataggcgaaatgaatgtttttggcttagtaggcgaaatgaatgtttctggcttagtaggcgaaatgaatgtttttggtttggtaggcgaaatgaatagtaggcgaaatgtcagtaggcgaaatgaatagtaggtgaaatgacagtaggcgaaatgtccggttttgggttagtaggcgaaatgaatgtttttggcttagtaggcgaaatgtcatcgtgccgatttggacgagttggtagtttttttgacactaagatcttatttttggcctcaaggtttcttttcttggaaagttttccaaaccctacttttaatgcaaaaaaagtttaacaaaaaccccgtcctgtttaatagaatttaaaaactaagtttctctttcctttcaggcaaactatgatcatcccatttaaccggttttaccaaagaacagcaggccaagcaaaaaactgtcctttaaggacacattacttctcaataaaatttactgcccgggttagttgaatacacagaacaataaaaaaaattttgcccattgtttacttttgtacgtcacagacgcctgcaaacaactacccaacaaatgccaaaacggcggatatcaaaaccccaaaagatgttcaagatgcctttgccccggatggttataggggaacatactgtccattctttctatagaggttctgttgggaccggtactctattgtccgcccatattattttcattcctttattctctcccctttatctctcctctc

SEQ ID NO: 44786 - DNA, 1107 bp, Heterodera glycines
  unsure (1)..(1107): unsure at all n locations
aaggaaatagtgacgatttcggaattaatgcgatttgatttgctttttgagcatttctancagagaagttnttcggcacattttccttctttgctcctatttttcaaccatattaatcactagggctgctcgggattcttagtttcggttctcaagccgagaaatttctcaggtttttggcgtctcggacccgatatttactttctttttgaatgagaaataaaaattttaaaaattacttatcgacttttcagtggaagaaaaaatttgtgtaaaaaataaaattgttatcaatgttttaattatttgcatagaaaaaaaagcaaaaataacatcattgtttagctattttcgcgccatatttcgtaattttttaaatttaattttttgaatctgacaatataaccacgattttcaaatcagatggcaacctacatgactaaccaagccaattactcaaaattttcaaaattgactataatcctcgaaattgtaattttgacaaaatctattatttaattttattaactaattttcggcgcgcctcaaaaaagacaaaatgaaatgttttaacaaataaaaaggaaatcaaattaaaaaaatgaaaaagattcaaagcaaaaatatattataggaaaaaaaaagattttttaatgaggataaatatgaatgcctttgatttttaaaattttcttcaattttcaaaattattagctgaattggtaaagttttggcaatttgaaaaataaaataataattttaacagaatgtcatgtttttttaatttagattattgtgagaaatttgtgtaaaactaaaattttgaaaaaaatctcagtctaagcttacggaaaacttcgactctcgagaagccttataactagagttgagcgggaccgggaattttgggcaaccccgggaccgggaccttttcgggttgaaaacccgggaatttttggctgggaaaaccgggaaaaaaccgggacttaggtacgcagttgtccgtgtttaggtcccggtcccgctcaactctacttttaaccctacaaaatatgctgcgtctcctaacttggggactgttctggagattggtattcactacagaaa

SEQ ID NO: 44787 - DNA, 1486 bp, Heterodera glycines
ttacggggcagctgcctcacgagccatgcttttgcctccctcctacgttggagctgtggtataccgctcagtgctgtacgtgtgaaagcctgtgtatggctgctgcgtggcaatgtgtcggtggcgggccgcctcgcttggctggttcgctgcgccaatgtgggatgcacgctcgtggggcgacctaacggctgtgctggcgtctgtgcgtcgttgagcggttgttgtggcaggcacataacacactgactggggatggtggtttcgttcccggtcttacgtgccgtaactagcggtgtgtttgtgcttgctgctacgtccgtggccgtgatgagacgacgcggtagtgcccgtgcttggcctagcacgtggcttaagactcaatgagtgtcagctcgggcaccgccagctttttctttttttttcattatttttttttacacttctgttgaagaatgaattctagtcttatcggtggatcactcggctcgtggatcgatgaagaacgcagccaactgcgataattagtgcgaactgcagaaaccttgaacacaaaacattcgaatgcacattgcgccattggagttacatccattggcacgcctggttcagggtcgttaccataaaatgcactgcttgtgcgttgcttcgtgggatcatgtacttgtacgtgttcttacgttacttgctcagctcggctgtgggggttttggtgtgctggcgcgaacttgtggttctaattcgcgttttacggaccgtaactcaagcgcaccaatgctttgcatgctgtggcggagtgcctggattactggcattcctgctttgatttttcgacctgaactcagacgtgaacacccgctgaacttaagcatatcagtaagcggaggaaaagaaactaacgaggattcccgtagtaacggcgagtgaactgggaagagtccagcgctgaatcgcagctcctctggggttgcgaggtgtagcgtatagaccgtgagcttgggttggcccgcttgttcaagtttcccttgaccggggctccagagaaggtgcaagacctgtccaactggcggtgcctacccatctttacgtgtcttggagtcgggttgtttgggatcgcagcccaaatcaggtggtaaacttcatctaagactaaatacggccacgagtccgatagcgaacaagtaccgtgagggaaagttgcaaagcactttgaagagagagttaaagaggacgtgaaaccgatgaggtggaaacggacagagctggcgtatctggtctgcattcacccgtttgttgctgtacgttgggctgctagcctccagactggggtttgctgtccttctgttcagtggcgaatggggcatttgcaggcggagtgcgctgagatgctcggagtagctgcgtgagctcggtcttgaggccagcctttcggggtctggtacccggatcgggggagtgctgtttactctgggtgaattgtgcaatg

SEQ ID NO: 44788 - DNA, 1034 bp, Heterodera glycines
  unsure (1)..(1034): unsure at all n locations
gtccaaacggacacnttgaaaaaatcgatttatttttgttttcggggcagtccccccgaaccgatgcgcccagatttatggggagaccgaatccttcgggaatagcttccctatagcctgtactttaattctgcgttggatttttgctccccataattgtttgagtaccccaaacggacacttgaaaaaatcgatttttttgttttcggggcagtccccccgaaccgatgcgcccagatttatggggagaccgaatccttccggaatagcttccctatagcctgtactttaattctgcgttggatttttgctccccataattgtttgagtaccccaaacggacacttgaaaaaatcgatttttttgttttcggggcagtccccccgagccgatgcgcccagatttatggggagaccgaatccttccggaatagcttccctatagcctgtactttaattctgcgttggatttttgctcctcataattgtttgagtaccccaaacggacacttgaaaaaatcgatttttttgttttcggggcagtccccccgaaccgatgcgcccagatttatggggagaccgaatccttccggaatagcttccctatagcctgtactttaattctgcgttggatttttgctccccataattgtttgagtaccccaaacggacacttgaaaaaatcgatttttttgttttcggggcagtccccccgaaccgatgcgcccagatttatggggagaccgaatccttccggaatagcttcactatagcctgtactttaattctgcgttggatttttgctccccataattgtttgagtaccccaaacggacacttgaaaaaatcgatttatttttgttttcggggcagtccccccgaaccgatgcgcccagatttatggggagaccgaatccttcggaatagcttccctatagcctgtactttattctgccgtggattttgctcccataattgttgagtacccaaacggacacttgaaaaatcgattttttgttttcggggcagtccccc

SEQ ID NO: 44789 - DNA, 846 bp, Heterodera glycines
  unsure (1)..(846): unsure at all n locations
aatgccatttcgttttgtcgcacttgcctaaaagaaccttcactggccatctgntgttgtgtgctgtgttcggctttttttatgatgggactgattttggnattcttttcccattttggcacatttcattcacccgatttgacaccgtttcgtcccaaagttaggaaagtgacgctgttcttgagaatttatgcgaaatttcaagggttcgcgtgtcactttctgcgttgtttggttcgggtgggttggcgtttcgtcgctttgacgggaaaggggcgggggagggggacaaaggggcgggggagtacggccacgcttcggcttcttctcctcccaccgttccttgggctttttcccttctgctgctgtttcgctttcactttcgtccacgcgttgcagcagtcgcttttcctcctcttcctcctcctttgcccattagcagcaattagttaatgaggggggggggtggtgttaatgatgcttcttccccttcttctgctgcttcttcctctgattgatgttgttctgcttcttctgcttttgctcttctgtttttgtcctttgctgttccgttgtctccccttttgtgcttattattaattattattaatgttttgccttttctccttcgtcttcccctgcttcttctcccattagcattgtccgatggattggaaaggtgcgattgctgcgcacgtcttctgcctccgctgcttttcctactggttcctgttactttggctgaatcgtcggcgaattcgaggagaagaagctttcattgcttctagcgatcgacaataaaaaaaattgagcatggacacaatgtgagggggagaagggggactc

SEQ ID NO: 44790 - DNA, 811 bp, Heterodera glycines
aacccatggagccatgttttcacgacttaagaaaacaaaaaaaaattcgaaaaaggggggacaaaccaaagtattaccgcgaactcttcttcgagtgtcgccggctctaaaggatttacattttattagagtttttggctctactcctgtttacgtgtcctgtcctttctttgctgatttgtaaggattttttttttgaattatgacaacgaagaaaacgaatgatgagaagctactgtggtgattctatgtgattgatatgaaaaaatataaatttagagtgattgaaaatttgaaatattaagatttaaaacagaaaaaaagatagaatgatcttggcgcaaataatcggacaaattggctacagtttaaactgaagagttaagatgaagagtgaatattgtcttaaagtttcttaatttgtctatttaaatttcatttttgtaatatttttgggtttcccaattttcacctttttctttaattaatttgcattattttttgaatgaaccgtgagaattatttatgacagctgaattcaatttacagcattaaatttccgcttggtttggggtgtctatgatgacttttacaatccctatttttgcctattttcaggatttttgaataaacaataataaaaggaaacatacacccctaagaaatgacccgcgaaaattcaaaaatacacccctaagaattaaaaaattttctcaaaaattgatcgatataataattattgtttttttgtgaaaagtttttgatttaaaatttgtccgtattcgaactaaactcataaaatatttaaaaa

SEQ ID NO: 44791 - DNA, 584 bp, Heterodera glycines
ctattttttggggattattcgctccttgaaagtctgcatactgaaataatacgagaaaacaagaaaattctaacatttcaagaaagttacaaaggaaaataatcaacagttaattaataaatcaaatcttttttggaaattgcctgaatgttcgaacatgaacaaggtgattgtataaaaacccgggattgtcaattgattggactcataaagtgcattagagcccaaaaaaaacatcagattgcgtgaagaacggaaattcgcagtgaaagtgcaacggacgcgagaagaaagaaaacggaaggagaaaaggaatttaattgaggcgacgaagaaacaccggaaaggcatgaaaggacaattggaggaaatgctgaacaacaccaaaggggcgaaatgggaggacgacgaagagggggtgaaaaagggggggggagcatcaagaaacaaatgccaaccgaacattttagggcggaggacgaaaagccagctacaaacttggacgaaagggtgggaaaggttcagcaaccgatggcaggaaaatgagcagaaagggcagagacaaaaagttcggattcggggga

SEQ ID NO: 44792 - DNA, 1119 bp, Heterodera glycines
  unsure (1)..(1119): unsure at all n locations
acattggtgcaatttatacaaaaaataatttaaaaaaaaaggatgacgtgtttttttaatttttttttgcattaaaaaaatgaattttcaaccttcgcccgnncttttgaatcgcgtgaatgaccgggtaacggtcggtgggccaatgcggagagataacacgccggaaaacggtatggaacctgaacaaaaaaagatttttatagcagcgtcgaaacaatattttgaaaaaaaaaatgggacataaattggttaccatgtgatcgcctcatctgaatgaaaattgcgctcctccttcagcgttttgaccaactgtttgggcgtgcttggatggatgagacaccatctgcaaaaactggggttaattcagtaataatgcaagaaaattttggagaatttaatttggattgaaaaggacaaaaaaattcggcgcgggattttggacgagaaaaatgccgagtttcgagtggcaacacttgatttgggacttcaacgaaggcaaaattaaatttgacaaatgttggtggaattttcataagctatgatgcccaaaaattttataaaaatataaattttcaactattttcaccaccttttttgtcccacaatcagtgcgttccacgcggatgtgcccagcgggtcaatgtgaattgcggtgcccgaccgggcaggtcccatcacaaaccaactgaaaaaaccaaatcaaaaaacgcgaaaattttaaattttccgtaaacttgtaccggtaggggggcctgcgtcgttcggtcgcgtaccggaacaagtcgtctttgaacatgggcggcacgctgtagtcagacaacagtttgcttgtttttgtgcgctttaaaagtgtgtgaaatttgcgtttgttccatcaaagaatttttacattttgatagaaattttcattttttggttcgaaatgtaatgcgtttggtagtaaaaatttgtaccaagggatgtaatacggattcaaagttccaaaaaattatttaggtgtcgaaattactaccaatccccttaaaattgtacacttaattnaagattttnggtcacattntttccaagggtcccccaaaaaattattatttttttttggtacaagaaatgcacaaa

SEQ ID NO: 44793 - DNA, 948 bp, Heterodera glycines
cccactccctccgccgttcatttcatttgtctcatccccacctaatctcggaaatcaccgcccgtcgtcatccatcgctcaatgaacttttattgcaatctctgacccattgctaaatgacgttcctccgatcaagacatttcattattctcttctcaaaaagaattatgcaatacttatgtacggcggagggagcatatggcgttgagaaaagcaaatttaaaattagtaaacgaacaaagggacaattgattaaggggaaaaggttgcatatttctctgatttttgagtcgaaggaaattattgcactttaaatatttatggtttggttaaaggtgaggaaaacccaagaaagaatttgaaagagataaattccggaaatagccaagaccaaaagcatgtataaaataaaataatatgcacatgtattgttactcagggaacgaggctgccggacgtcattatctttttcaaaaaagagaatttcgtgggaggattaccaactggtgaatccaataattataatttgtttgttaaactgcaattaaaagagcaataagcaaaaacgtgggcaaaaaatttgccaaagtcagttaattaatttaaggcaaaatatgtttagtattatttcatttaagtaaataatagaaattgtcaaaattaaattttatttgtttaaattaggtttaaatattttttttctcttactcacgctgcctttaattaatgccgcggccattttcctaatcacttggattaatgcgtggataatcggtaatggttggaaaaacagaaaggctgcttgtgccggaaatgtgtgccgacgacgcaccgttgcccaaggaacggtgcaaatgtcaacggaggtttatggcaggcgaaattgtggaagagagcgagcaaatggcgaggagagggaaggaaaaggaataaataattaattagcag

SEQ ID NO: 44794 - DNA, 811 bp, Heterodera glycines
agcagcagacaatgccgttgatgaaaatgagcagacggagagacccttgtttgagcagctacagtactatgtgcaccgggtggagcgtttcgcactacatcgacacgttacggaatttgtgctcaatggacaacatgatgagccggaagaggcacttctcaccgcatttgagcatatcatcggacaagcgatacggaacgcagaggccaaaacagagcaggatggcggtggaacttctggccctcggcgacgcgtccttaaactaggcgttttgctaaatggaaaaggtagtacaaaaagaggacctaattaattttacatccatccatgtaggacttaccgacccaattgtgttgccggttcgttctcctgaacaaaacactgctgaagttctgatggccgagcttgacaaattgggtcagtcggacggcgacgaggaagtccatggtggtgggatcagcaaacgatcgttgttgctcagtgagccgatcgaaattatcgtcacatgcatagcacctcctgttggcgcagcaccgcgcttccacccataccagcattggggatatgatgaatcgcatatgatacgaattttcaacaccggagacaatttttgcctcttccatgcgctgattgctacacgtgcctacactgacgctgagtttttgaagtcaaccgttcatctgcaagcagttgaatgggggccaaattcaaacagtagtgatgtaccagccgatattatacaacgtgtgatgaggcgagtggatttttgctctgaccacaaagcgctgaaccgactgatgtccaaccggga

SEQ ID NO: 44795 - DNA, 1022 bp, Heterodera glycines
aaaattttttggggaaaaaaaacttttcaaaataatacccctgggagaagggagtgggaaacatgattccaaattttcaattttttctagtctaatctactcaaaccggttcagaattcaataaaaataacattcacggtgcgaaaaatggggtttgaaaagtttattttgaaaaaaagactttacaaaataatacccctgggagaagggagtgggaaacatgatttcaaaattttcaattttttctagtctaatctactcaaaacggttcagaattcgataaaaataacattcacggtgcgaaaaaaggggtttgaaaagtttattttgaaaaaaagactttacaaaataatacccctgggagaagggagtgggaaacatgatttcaaaattttcaattttttctagtctaatctactcaaaacggttcagaattcaataaaaataacattcacggtgcgaaaaaaggggtttgaaaagtttattttgaaaaaaagactttacaaaataatacccctgggagaagggagtgggaaacatgatttcaaaattttcaattttttatagtctaatctactcaaaacggttcagaattcaataaaaataacattcacggtgcgaaaaatggggtttgacaagtttattggggaaaaaagactttacaaaataatacccctgggagaagggagtgggaaacatgatttcaaaatttttgttgaaatatttgtcgtgctctgaagggcgtgggaggggggggggcgaaggcccaccacgaggccgcgaagaggccgagtgagtaccttcggtgcaggaaaattattaaattttaaaactttttaattgctttttaaatatgccaaaaaatgtaggcttaacttttttagtgaaaattcgatcactcatattttttgctaattgagcagaagcgtaccaaactatgcagggatactccccggtaaaggactaacttacactgaaatgagcgccgagctagctggctcaaaaaaaattttcgaaaatct

SEQ ID NO: 44796 - DNA, 1070 bp, Heterodera glycines
tttatattattattcatcattttttcatgcacatttcaaaggcaataacatcagtgagttaaataatcaaggtaattaatttgtctaatcatttttaattagggagaagacaaaatgctaattacgtttgtgagaaatgatcataaaatgcaaattagtgaatattcaaagcagaaatatggggcatatcttggcattgtgtattttataagaaagaattggcaatgtgacaaaattagcgaggaacttgaagaatataaacggacagaatatcaaaaaaatcgcagatatttggacattttgtacgaatatttaagtagagaatatgctggatttccaacagtgaagccaatatttgtcattaaaaatcgaattgaaattgaagcaccaataatttatgcgatttattgtttggtccgaatttcgcaattttgttttaaatcaaaatggggtaatttttatgaatataaattaaataaattctttaataatgattatgaaccaaaaatgctgaatgaggagagattaaattatgcatttaaattggaaaatgaaccaaaaatgccaattaatgaaataattttgcaattggcaattgacacagcgaatgaatgtcaaacaaatgaacgtttagatggaataattagacaaaattttgacgaatttctgagaaaaatgtttaaaaaagcggagggaagggtaaaaaattacgatgatcggttgagagtcgcaaaaataaataatgacaaacacaaaataattgtgggttcgaaattcgatgataaatggacatgggtgagatttaacatttaattagaattagtaaattaaaaatttagaaagttaattagaattaataaattcaaaatttagaaatttaattagaattaataaattcaaaatttagaaatttaattagaattaataaattaaaaatttagaaatttaattagaattagtaaattaaaaatttagaaagttaattagaattagtaaattaaaaatttagaaatttaattagaattactaggaggaaatttagaaagttaattagaattaataaattcaaa

SEQ ID NO: 44797 - DNA, 1256 bp, Heterodera glycines
ctgattgaattttaaataagctcttttaattgtcaaaccccaccaaggcaattctttttcgatccattccagaaaagaagacttctctaaaccaaccagccaaattttgcaaaagttcttcctgaaactaatcatccatatttaatgtttttaaattcaaaattgataattataagggataagaaaaacccagaaatattaaaataaagcttacacaagaaaaggcataatatttgaaggttcgaatattagcaatttgaataaaaaggtaaaattaaaaatgttatttttcatattttaatgatcttgacgaaacatcattttctgtgtataaaaacatttttacatatttatttttcacataaaatattatgttttttttaattttctgtcaagaattttcaagttttttgaatattggaattgaaaattttgacccttcgtggtgtatttttatttttgtttttatttcattttttaaagaattttgaaaactcaaaattctgtatttacaaaatattgactcaatccctaaattatagagttaaattagcatttaaaaacaaatgtttttgtcatctcaattaattgccatttcaacttgcctaaatgttgtttttttgacaattttctcggacattttgcaattttcttggtaattttccgggtataaatgcgtctgaatgcttccgcctcgcctgtcaatgtcgtagaccaattgcatgcgaatgcgactttcgacaaactgacagaatttggcagctccaaatttgctctcggacacacaatttattaaaatgtaaaagtcatactgaaaaaattctttcaattgagcttttcatattaattaaaataagaatattggattttaatggtgaaaaaataacaaattaaaattatcaaaaaaacaaaaacaaaaaaaaaataagaaacaatgaaaaagtaaaaaacaattaaataattaaaatggttagttatttttttagataaagaaaatttccaaaatttaaaaaattaatttaatatacataattgattatcaccattttattgaaatgttctgctgaattgcttattaataatgaccagtcagtgtttccaattgtaatgttttgaatacgatccaatgcttaatatttattaatagatatttttaaaaatatttaattcaatttaacactatttttatataattttcaaaataatttttttatcaaaatttgtgaaccttcgtgcatatttttgatgataactct

SEQ ID NO: 44798 - DNA, 903 bp, Heterodera glycines
agttcacatgagcaccgcatcgacccccatatccacgccaacgactgtcctatcccagtccttcgtaatcccaaaatactcggcatcacatttgacccacaggtcacctttaatgctcatgtctccactctccgcaccaaacttcaaaaacgcaacaatatcctccgtgccctcgcaggaacaacctggggccaatgcaaagaagtcctctccaccacttacaaagccattggacgctcattactaaattatgcagctccaatttggtctccccagttggctgactcccactggtcaaccctccaacgctgccaaaactccgccctccggacaaccactggctgtgttactatgacatcctctgaacatctccattcagaaacatccatcctgcccgtcaaagatcacaatttccttcactcacaacaattccttcttgcctgatatttctccgatgcattttttcattcgttttcctttctttttcctgtaatgaaaaaacccttccgttttaattttcttttcgtccactaccaaatttgaggctgcgtcttccgttttttccggagacattttcccaatttcacggtcattcgtttggacaaaggatgcagcggcaagtgaagaaatgccctcagggattataacgcaaaaagcagtgccaacgagaagcccagcgccgaaaatgctcgctatccgaactttcctctagaaatgaattgttcatactaattcttcaccaaaaagcacctcattaagcgaaaagaataacggaataaatccagccaaataagagccgataaacattgtcagcgaaatcaccgcgaggattggctcgtccatcatttcttatttatcaattacaaatatttataataaaaatgattagagaatcgtgtcgaa

SEQ ID NO: 44799 - DNA, 1119 bp, Heterodera glycines
  unsure (1)..(1119): unsure at all n locations
ttctcaaaattattaatgtcccaacaaggagaattgataggattatttagtgaggattttcccctggaattagagnattttatagttttgatnatttaaagaaaaatatagtagggagaaaagttggataanatttattanggatgtgaggnatgggntggangaaggnatagaaattttagaggngaaggagggaaagtggggtagatattgggttggagatattaaggaatggnaaggtgtttgaattaaatgtagaaatgtttgtttttattatngttattaatttaattaagttcatttctaaattatcagtccgacactgttcgtgccgagtttttgcatgcgcttgccctcagacatgagcaagaccgggacgatgccaacaaatacatcaaacggaatccaacaccacgaaatgttagcatgaattttatacataaaaaacactggcaattttacattaaaaatctggcataatttaatattttagcaaaaagagccggcgaaaacagaaaattacggctttccctatgattttcattcaattttgcattatgctgctgtgaaaacaagcgggtcagttattttaaaggtataaatgaaaagaaaataatttggcaatgaatcagctattacgacatgattacgctgaaccgtttttaccaacgcacaatgtttcactcaacatatgaactttcgtttaaagacgccgccattatcaacaaaatttattgcgacggtaaatcgaattaattcattataaaatagagtgaattaatttaagaaaattgcaaaaacgttgaaaacaaatgccaaaagggaggatatcccaacccaaagaattgcaaccaatgcctgtgcccggtgggatacggtggagaaaaatgcgaaatggtcgaaaatggtaaaaaaaaaattaaaatgataaaaattattaatatttcagatggaaattgccaaactgacagggcaaatggaattgaagcagattggcaaatcgaacgttgaagccaaaagtgagctgcacaaaaaggatgagtcatgtggatgccattggcaaataaggcaacatttatatgaaatataaaaaataaaattaaaaaacgaaaacaaaca

SEQ ID NO: 44800 - DNA, 980 bp, Heterodera glycines
  unsure (1)..(980): unsure at all n locations
ttcgatgtgnnccgaggaaatgatcacgcggaggtcgtcgcgaatggcgacgattttgcgcaggaagccgatgatcaggtccgtgttcaccgaccgttcgtgcgcctcgtcgacgatgaccacggagtacgcctgcagcaacgggtcgctcatcagctcacgcaacagaattccatcggtgacgaactgaagaagaggcaagaaatggcatggacagattgggaacaaacaatcggacccgttcaaaaattgccatggcatgccaaacacaccttaatgtgagtgcgtgccgaaatgcactcgtcaaatcggaccgaatagcccacagcgtctcccagccgacacatcatttcgtccgccacgcgactcgccagcgaaatggcggccacccgtcgcggctgagtgatgcaaattctgcgcccattttcggcccaaccaaactcagtcaaatactgaaaaaaacagtagacgaccactcaaaagtgatcagagaataggccatgtttctgtttgtttgttatttcttcaattacttgtggcaattgcgtgcttttgcctgatccggtttcacctgaaattgaaaggatttgtgggtttaaagaactacggaataaaaaccgaattgctaacggttttcacttttcaattctaagttatttggcatcggacaaacaaataaacgccatttggttagttcccaagaaatataatacatccattggcttaaattgctgctttgatgacttgtaattgctcgccaaacaacttttgcgtgttttagacattcttaaaagtagaggtgcgcaacggagaaatcccggaaaagaagtctcatttcgacttttccgcttggattggctcaccgacgacgaccaccgtttggaagtgttcgcaaaggtatagcaaatggttgcgacactttgcgatgggcagtcgttggcgctgctgctgtagggacatggccaagaaggggttgtggc

SEQ ID NO: 44801 - DNA, 368 bp, Heterodera glycines
ctctagagtcctcaggtagtttgacagggtaattgcctatgtattctcccaccagaattcggacgttaaaatgttgcttctatagaaccctttgtggtgatttgtcgcccgcttagccatgggaagggctgttcggagatcagtctcagccgagtgcccaatcgccagtcgcgtgggggccgaagggaactgattttctgcaatttagacacttttgtgacggctctaatgcatttataaggccataaaaatattgacaacttcttctttcacccaagcttcaaaaacttattgtcaaaatgcacagaaaataaattttgatttttatggtcatagcttttttgaaacataacgaaattcggtacttg

SEQ ID NO: 44802 - DNA, 1104 bp, Heterodera glycines
atatttagatttttcgaccctggtttttaaacaatgaaaaataatcatttcgtaaaaactagaataatttgtataaattttagaaaaacaaatattaattttttattaattcgtaaattttaaaatttttagaccctatttggggacccgacacttagggaacccgacatttacgggattttaataaaacaaaaaatatatttaaaaatttaattttaggcacaaaattagacaaatttatgtctgctttagccagcgttaattccattgcaagaaaagacaaaatttggttgaaggctttgatgccattgaaaacccaaacgatgatgatattcttacttaattcagatggcagggctggagcgcggacagaaaatcccgcggtcgcggatcgcggaaaaaaatgccgtcgcggtcgcgccccacccctgtcataaggtcttcgttgtagttttttgtcccaactttttttgccattttcctgctgtttgtgccggtgatacgacatttgcggcgcccagcaaaaaggacacttgcggcgaagaaatttgttttttaattgtttttgtttttaactgacagaaaacaaattttatttattaattaataaaatcctattttagttttaaattttatttctgattaacaaattattttaataaaaagctcattcccattcctcaaagcctttcatccctattcgaaatgaaagcagaaagttagaattgtacctttgtagttaattggccccttttctgaattttatcataacaaattgttaattaggtgaaataaaatttttttaattaaataaataaaattatcccattttttttgccgttttttctgctgtttgtgcccttctttttgggtcatcgtttgcccaacactcaaaggcaaataaaactgaataaatgaacgataaaaactctgaattatgagaacaaattcaaatatttattatcttttttttgacctgtctatttgacctccccctcctccaaggtcatcattttgccgaaaattagttaaaaatgaaggaatggtcatttatttttatttctctttttattctttgtcatttattcaacagaaaccattttt

SEQ ID NO: 44803 - DNA, 847 bp, Heterodera glycines
ctaattgcattattgagggggaggagggggggggggcctccacaggttctttgagttggaagggccaacgggcgacgacggacagcggcggagcgaagtgaagtggcacagacatcgacctgactgactgactgacagcaaaaccatgccattcggtcatacaaaacccccgggggcgaagcagcaaaacgaaaagcaataagcctcccgccttcttttcaattctttagtccattcgatgttcatttgctcattctcactccaattcagccgggtgttcctttaaaaaggatatgtccgaaatgccacaccctccgctgccggggaacctccaatccctccataatttatgcagaatggcatttttgcccttaaataacaatgcgctgtttgatttaatatttgccctctttttcattcagcttctccttgtccgtcctcgtcgctttccacgccagcggaagaaacgatcagtcgttttcattttgacagcagagaaattccgaccgcacaacggcaccaaaatgattgtccatcaatcgaaaatcagtgccgtaaattccctgtcggtgcgctaatcgccgcctccgacgcatcgaagcgaaaacaatgcaaaaatgaggacgacgaagaattgtttggagattgcgcaacaattggaggggacagagcagcaaaagcagaagagggggaagagaaggacaaattaatgacaaaaggaagacaaatggaggagagaatggaagaaaaatgggagaagagggaaacggaggaacggaagcgaaaggcgagggagagggaatgccctggggggagagagacggatgccaaacaactacaacaacaa

SEQ ID NO: 44804 - DNA, 1446 bp, Heterodera glycines
cacttcacattgtaaaaataaaagtcgaagccacatttcacgcaatgaacgtgttccggtcctttaaaatcaagtatcattaatttattcaccattttgattaacaggcgggctaatttatatttaattttaataaaaattttatgtaaaaacataggtttagttaaaattaaaactaaaaatcctaaacataatcatttggaaaataaaaataatggtttgttaaagagaagcacaaaaattgatcaaactgaaaaaacaggcccagctcggaatgattaccatgatttccggtgcactttaacgccttatcattttgcgcctgtatttctttttgtagattagaagtcgaagttggtttttttgttggggttttgtaaggcgcaatttggggtcgttttggcatgattaacacaagaaagtttaaaaaatattttaaataaagttgctaagaaaaaagatttatctgagatcgttatttaaaaatcagtattagcattttattgaaattttttatgcaattttttgttctaattccatttttaattataacaaaaattcctgcctgtttattactcaaaacacccaaacaattttcataaaattcttaaaaagtaggcaaaaattatttatttttgtcgttaaaaaacgaatcccagacgtccagcgccaattaaggcgcctagcctcatcgcgcgccaacaaaggcgcgcgaggctacgaaaaccgcatgcgaatttttggattgaaaaataaataataaataattattatacaaattaacttattattatgactttcaaaaataaatgattaatgagctaagaaaatgttgagttaacggcccaaaaaaacgtaaaaaattaacaaaaaaagaattaaataaatgagagaaaaaaaggcaccataaatcgtgaaacatggacataaaatagcaaaaaaaaagctataaactatggagaaataaccacgaaatcagcaaagaattgtgaataaaaaatatttcactttatagttaattaatggaaatcactttaaatgtgttagatttatttgaaaaaacattaaaatgactatttattttcaaaatatgtattatgattaatctaaatttaatttattttaatgagaaatagcccacaaaatttaggggatagaatattaaaataaaaacaaggtggagaaattgttgcatcggttgtggcgtatggtatgttgtgtgtgtgtgtgtgtgtgtgtgtggaaaagagctgaatatgcgaacaaaaaatgattcgattggtctaagaggaaggtcggctgccgcaacacaagagccgatgagaaaaaaagcacgtcgcttcgattgattgggggggggaaggtcggctggcgcaacatgagagacaatttggcgaaagagacaaaatgggagaaagggaaagaaatgaatttaagggggggggg

SEQ ID NO: 44805 - DNA, 1337 bp, Heterodera glycines
ggagggtgtatttgctgcgtcgaagagaaggaatttgttgtcgctactgatgccgaaagaaattggccattgcgcaccgggccctcttcccggttcgtaatcggcgtcctccatgacggctttttgcctgttttttttcaaccatgaactacagaaggctactctaaataaggtagcaataaaaaattaatgtataaaaatgattggttcaaacggacgcaattttgccagcatttatgcggtcagaaacgagcagcttgaagaagtgcagcacaacatctgaaacagtagtgttcgacaaagcgatacaaagtcctgtgttgttcccgggcgcagaaaatttcgaaaaataatgctggccgcaattttgccagcatttatgcggtcagaaacgagcagcttgaagaagtgcagcacaacatctgaaacagtagtgttcgacaaagcgatacaaagtcctgtgttgttcccgggcgcagaaaatttcgaaaaataatgctggccgcaattttgccagcatttatgcggtcagaaacgagcagcttgaagaaatgcagcacaacatctgaaacagtagtgttcgacaaagcgatacaaagctgtgtttttccccggcgcagaaaatttcgaaaaataatgctggcgaatggtcaaaagagcaaaacaaaataagaaaagcttttcggatgcccttcccgaattttttttttctggatacaaaacgaatggggacggaacaaaatatctccgccgaaatatcgccggtcgaaatatcgccgccgaacattaaattttttttaaacctagaaatttttcataaaaaaaattactaggaaatttcttactaagaaattcaagaaaaaattttttgaaaaacttatcagcgcttttttcgaaagtttatgaaaattgctgtttttttttgaaaaatttgccaaaaaatttttcaatgattttttcaggaaattttcttataaaaaatttcttaagatttttttcttggaaatttccaagtttggaaaaaaattttgaatttctgcggcgatattttggggtgtacccaaaacgaattccctcccccatgattcatttacttctactggtagtgtaactaatcattaccctccggtagatcgcagtctatcctaagcagcaacgagagaagcgctttcaactatgaaaaagtcatcctcactcctttaaaaggaaccaatttaatgaaaacccaaagtttgcgaaattttcagcccctccttttacgtacgtaaggaaaagatgtcaaacgtagatgaatcggaatacccgctgacgcattacgtttgaggcatatatggaca

SEQ ID NO: 44806 - DNA, 934 bp, Heterodera glycines
aatatgcgatggatcgggcgaactgtgcactcctcggcggatgcattcggcggaggcgtcgccaaaaggtgggaaaaagacaaacctcgggaaagggccatttctttaattatttactcatgaaaaattcattttaagcgcctttggagaggccaaaagatcattcgcctttttgggccatgtccgagcgttggcttattccctccttggcttcccaaacacactgactgcggatgacatgaacgaactgagccaaatgatcaaacatttgaggctgagacgaaattccgatgggagcgaaggagaggacagagacgaggaagagaagtgagagagagcatgaaaatggggtgggggaaagaagggagagaaagggagggagagagagaggggggggggagagacagacagcgaaagagaaaggaatttattagcttttaataggctaccgtaataaaataaaatgagtgatgggaaaaggataaatgttctccaattttcttttacaactttaggtctcctcctctgcccatgttccaatacaatcggtcgacttcgatcgtttgccgctttattaacacaaaaaacaatgttgaatcgggtgctgatgttttttgctcaccattattactaaatgattattcttattccaactaatgcccgacaaagccaaatttaaagtgtggtcggggagaccgaccgacccatcgttttggccaaaagcccctaaacatcgcggtttagtctttgcttctcaaccaacttgttaatggatactttcctaaaattcacatttggtgtttttaaagactgatttggcagcttggtccacatatcctcatctagtcacccaaaataaattctttttattggtaatgattaaaatgtataaatgcgactggttatgtgtgttcgtttttggtttccctcgtcg

SEQ ID NO: 44807 - DNA, 1145 bp, Heterodera glycines
  unsure (1)..(1145): unsure at all n locations
cacttccatcgcctctncgccgtcgtcctttcgcgtctgttgcatacgctctccttctctcgctgcagtttgtcccggttctgcagcttgcgcaccaacatactcagcgtgtcctcccgcagtccttggatgtcgcgcaacgcgttcggatccgtcttctgcatgatgttggcctgtcacgagaaaggggcaatgaggaaataaagacaaaaaatttaaatntaaaaacgctaagataactaacaacaagattaggtggactttctattccaaaataatttttcttacttgaaaatctattgacattatggcagttttgtattgaataaaaggtccgtaggaacgtgttgtaccttcaaacgcaacagtccgtattcgtccgccagtttgagccgctcgcccaccaccatgtcagtctcggtcgcttgcagcaaacactgctcgcacatcgcagtcactgtcggaatgaaatacatgcgggcgagttcgagcagtccgcgcgtatttggcactagaagaaaagggaaataaataaattgcaatatactgaagctactttagaaattgaaaaacatttaaatcaggattgggtctccccctcctctaaaaccccgaaaataaattaaatgaatgaagacttaaaaaaagttcgttgggtggtgcatcccactccaattatcttggataaactgtataaatgatttttctaagaaaaataccatgcggacgcttgtgactcgggtaaatgatgtacaaaaactcgcggaacacgtccggcgacacggtcttcagctccacttcctgggtgcgctgctcgcgaaagccctcactgttgaacatgcgctcgaagccctcggaaaacattgaaagcaactgcaaaaaagagcatttaaaacgggatttaagtggaaattttttttgttgttgtttaaatttaaattcatttcccctccatttcccacaaaaaaagcatacttctttgttgacgtaaaatttgtgcttgccatcattgcccactttgacaatggcgttggacgatgccgaaggcttaccaaagtccaaaattgngaagaaactgaaacaaaaagacggtgctaataaacgccaattggaaaatatttttgcatgaaaaatggttttgcaag

SEQ ID NO: 44808 - DNA, 927 bp, Heterodera glycines
tcaaaccgcactgatcgtcgacatttgcatgctgttctccccacggtacggcgcctttgaagccgcacggaacgaaactctgcacaaatacgacgaattggcacaacacctccggcaacagggcctgaccgtgttcttggatgcgtttgttgttgggccgctcggtgggtgggatccccacaatgaattggttctcaacagaatgcacattggccaacactaccggcatttgatgcgcaaactgatggtgtccgacgcgatcaaatggagccgggacatttacgtggagcacatcaccggcaccaagcagtacaacgactggccaatggcagaaaatggagacggagacgaatagaggggccatttcctttttcaaattcttttgtgccaacagaagcgatccatttattttgatcagtcattttttgcctcacttccacatctattgctcacaatggatctctcattttatctgcccactctcgcaaatttctatgtgcactgatccggttgaccgacagttttccattcatctgatcatcaaatcatttatttgtcttttccaaacattctcttaaataaacttaaatctgttctttacggcttaatctccgtaacgacccctaccggggtcaaagagattaaccaatttttggaaaaaggtcgcagtagggggcttgccccctctcgaccgcgcgtcggcccggtattgcacttacctccgggagcggcgcatctcccccgcgggggagatcaaaagagcaaaagcattgggtgaagcaatgcaaatgccaggggattgattcttcacaattctgcctgacaattttcatttaaggggaaaacaaaatcccatcgatcgccaatcgtccatcccgtcaacttaaaagggaaaaccaaatcccatcgtccatccatccgtcgaaa

SEQ ID NO: 44809 - DNA, 625 bp, Heterodera glycines
ccagagtaaacagcactcccccgatccgggtaccagacccttaaaggctggcctcaagaccgagctcacgcagctactccgagcatctcagcgcactccgcctgcaaatgccccattcgccactgaacagaaggacagcaaaccccagtctggaggctagcaggccaacgtacagcaacaaacgggtgaatgcagaccagatacgccagctctgtccgtttccacctcatcggtttcacgtcctctttaactctctcttcaaagtgctttgcaactttccctcacggtacttgttcgctatcggactcgtggccgtatttagtcttagatgaagtttaccacctgatttgggctgcgatcccaaacaacccgactccaagacacgtaaagatggataggcaccgccagttggacaggtcttgcaccttctctggagccccggtcaagggaaacttgaacaagcgggccaacccaagctcacggtctatacgctacacctcgcaaccccagaggagctgcgattcagcgctggactcttcccagttcactcgccgttactacgggaatcctcgttagtttcttttcctcccgcttactgatatgcttaagttcagcgggtgttcac

SEQ ID NO: 44810 - DNA, 1342 bp, Heterodera glycines
ttttatgaggtttattgtggttttataatgttcaaacttaccaggttattccagaatttctggaaattttcgattttccctaaaaaaattcataactcggttctgaaaggtcatactgtaaaagtaaaatactacaaaaatccgcaattttttgctctattatataaattttatttggcatttttatcacttttttaagaattgttataaaaataaaagtgattttgagattcgggaccaaaggggggtgaccaggatttttgagtggaaaaattttttcaccaaaaatcttccaaaaacatgtctttaggggtattttatgacgctgatcacgaatacgtgatcagattttacttttgacatcgttcagacatcagaatccctgtgtgattggggattctgaggcatcattttgaggggggggggcaagttcgaatccgggcggtgtacattatttttgctatgcatttttggttatttttaatgtttttaattcatttaaaagagtgtttgttttttaattaattttttaatttaaattaaattatttttttgtgaaaaattttttaaaattaattttttgtttgattaaagaatttcatataggcgaagttcggacccgggcggtgtacattatttttctttgtatttttgggttatttttaatgttttaattaatttcaagatttttataaattatttaatttatttatttaatttcattatttattttttgaatttataaaaaatgaatttcatttcaaaataaatatttaattattaattttcaaaattatatttaatgaataaaaagagtatttattataaaaaaattttaaattaaaatgcaatcgatttttataaaaacttttcattatttatttaattttaaaccatgttgtacctcttctaatcacttttgtacctcttctaatcacttttgtacctcttctaatcacttttgtatcttttatcacttttgtacctctttaaatcacttttgtacctcttctaatcacttgtatcttttatcacttttgtacctctttaaatcacatttgcacctcttctaatcactgttgtacctcttttaattgctgttgtacctcttttaattgctgttgtacctcttctaatcactgttgtacctcttataatcacttttgtacctctttaaatcacatttgcacctcttctaatcactgttgtacctcttttaattgctgttgtacctcttttaattgctgttgtacctcttctaatcactgttgtacctcttataatcacttttgtacctctttaaatcacatttgcacctcttctaatcactgttgtacctctt

SEQ ID NO: 44811 - DNA, 1284 bp, Heterodera glycines
  unsure (1)..(1284): unsure at all n locations
atttgaatcaatttttcacgaaaattgaatttgattgctacccttcaacaaattttcagtaagagaatttataaaaaatggctaaatacccttggaattaagactaaaccgaaccaatcatatccagtaacatatcttgaaaaatcacgtcagtttggacccttctgtacaaggccagagcccgtggtcacggatttgttattagtatttgaaattggcaaaacttttccattctttgggcagctggacaacaatgacaaagtacagtaaaataaaaaataatttttatgataccgtatttcttgaaatatagcccccgggggcttgatcttgggggctttgtttcaggggggctgtattcagggggtatctaattctggaagggggtctctatttctaaaatttttaaaagtgagtctttatttcatggggtgtctgatttagaggggggctttgtataggaaatgccgtatttatcgatttaatttttatataatcattagggttataatttgtatgattttgcatatttttctgcacagctatgaagaaaggggctcaaaaatagcatttctgcgttaaaattttttgatttggtgaaggtttttagtgcatataaaagcatnattttgggggtttttgagaataagtgcatatttggccattttaaactttgaaaaccaaaatgttttacaattgtctaaaaaactctccttaacctatgttttggagtttttaaagtcaatctgaatttttacacaattttggtatttttttgaaggtcaaaagccattttttggcagtttttaaggcatattttattgcatatttgggcatttttcgggttttttagggcatttttgggggatttttagtgcatattttatgcgcatatttggaattttttagtgcatacaacttataaccctaataatcattcactttgaaaagattgccttgtgcattcagtgtgagtgaattattattattaaacttaatattatttaatttaatatttttggaatttcagtgcatgccattcaaatgggtgacaaaatgatgcgttattccgtgcagccatttgcccgtttaaaactgatcaatgaagaatttgtttttgctcgggcgatcatttactcacacatgggtcaaaatgaccctccattttttaaatgttttattattttaagtgtcgccaaggcttagtgatcaggcacaaaaattgttgcgcagcgaagcggagaaatacgctgcattattaatgagtgttgtacaggtgcaatt

SEQ ID NO: 44812 - DNA, 1044 bp, Heterodera glycines
gatttttttgttttcggggcagtccctccgagccgatgcgcccagatttatggggagaccgaatccttccggaatagcttccctatagcctgtactttaattctgcgttggatttttgctccccataattgtttgagtaccccaaacggacacttgaaaaaatcgatttttttgttttcggggcagtccccccgagccgatgcgcccagatttatggggagaccgaatccttccggaatagcttccctatagcctgtactttaattctgcgttggatttttgctccccataattgtttgagtaccccaaacggacacttgaaaaaatcgatttttttgttttcggggcagtccccccgaaccgatgcgcccagatttatggggagaccgaatccttcgggaatagcttccctatagcctgtactttaattctgcgttggatttttgctccccataattgtttgagtaccccaaacggacacttgaaaaaatcgatttttttgttttcggggcagtccccccgaaccgatgcgcccagatttatggggagaccgaatccttcgggaatagcttccctatagcctgtactttaattctgcgttggatttttgctccccataaatgtttgagtaccccaaacggacacttgaaaaaatcgatttttttgtttcataaatattttttacagaaagtgctctaaagcgcaccaaattttatttacaactgaattttagcactctgatgctgtttctatctataagggagatgaataaaattaaaaaaagagtgaagtcctggctaaacaggacaaaaattttaaggttgtgtggaaagagtgaagaactgggttcctccagacaaaaaattctaagaaaatatatgaagcattagaagggatctcagcagggtccctgcaaaaataggagagcttctgatcagtctagaacggtgggtgaacaaatgcaaaaaataattaaagaaaaataatgctggtgtgggaagagagaagaacggcgttcctccaggcaaaaaattctaagaaaat

SEQ ID NO: 44813 - DNA, 461 bp, Heterodera glycines
acacacctccttgaaactgttgagccaagctatgtttccttcgccgtccaattcttcgcaaaacaatcgcttcggtttcccgtcttttctcggagtgttcaaccattcggacaacacttgttcaacggaaatcccattcagcccatcatcatcagcaatcacatcatcaagcatcagcagatcgcaattgattgaaaccaattgatcaagatcagtgagaattgtgggcgaaatgcgctgacacaattcgtcaaattgttcgtcatcgaaaaagcccaagtggcgaatgcttggtgcaaaaattggccaaatttcgcgcgccaaaacatcccaaatcggatgttcatcatcatcattatcgcttgaacacagagtcaattccaaattggtgccacttttgtcccaaatttgcttattggcacggagaaattcaatgacggaatgatcaatgtaactgaaaa

SEQ ID NO: 44814 - DNA, 978 bp, Heterodera glycines
cgatttatttttgttttcggggcagtccccccgaactccccccagagatttatggtggagaccgaatccttcgggaatagcttccctatagcctgtactttaattctgcgttggatttttgctccccataattgtttgagtaccccaaacggacacttgaaaaaatcgatttttttgggttttcggggcagtccccccgaaccgatgcgcccagatttatggggagaccgaatccttccggaatagcttcactatagcctgtactttaattctgcgttggatttttgctccccataattgtttgagtaccccaaacggacacttgaaaaaatcgatttttttgttttcggggcagtccccccgagccgatgcgcccagatttatggggagaccgaatccttccggaatagcttccctatagcctgtactttaattctgcgttggatttttgctccccataattgtttgagtaccccaaacggacacttgaaaaaatcgatttttttgttttcggggcagtccccccgaaccgatgcgcccagatttatggggagaccgaatccttccggaatagcttccctatagcctgtactttaattctgcgttggatttttgctccccataattgtttgagtaccccaaacggacacttgaaaaaatcgatttttttgttttcggggcagtccccacgaaccgatgcgcccagatttatggggagaccgaatccttcgggaatagcttccctatagcctgtactttaattctgcgttggatttttgctccccataaatgtttgagtaccccaaacggacacttgaaaaaatcgatttttttgtttcataaatatttttcccagaaagtcatgcgcacccgtccgatctggggagttaagcaacgattgctgactagccaatacgtatcggtgccgtgatgaaacgaaccagcactgcttaccccgcggcacccggcacggtcccc

SEQ ID NO: 44815 - DNA, 1059 bp, Heterodera glycines
aaaaaaaaaaacccccgggggggagaggaggggggaacacatatttttaaaatttttcaatttttttgtggttaatttttcccaaaccgggttggaaatcaaaaaaaaaaaacattccccggtgggaaaaaaaggggtttttaaaaaattttttggggaaaaaaagactttcaaaaatatacccctgggagaaaggggggggaaaaatgagtttaaaattttcaatttttttttattttattttattcaaaacggttcaaaatccaataaaaataccattccgggtgcgaaaaatggggtttgacaagttttttggggaaaaaaaagctttacaaaataatacccctgggagaagggagtgggaaacatgatttcaaaattttcaattttttttagtctaatctactcaaaccggttcagaattcaataaaaataccattccacggtgcgaaaaatggggtttgacaagtttattggggaaaaaagactttacaaaataatacccctgggagaagggagtgggaaacatgatttcaaaattttcaattttttatagtctaatctactcaaaacggttcagaattcaataaaaataacattcacggtgcgaaaaatggggtttgacaagtttattggggaaaaaagactttacaaaataatacccctgggagaagggagtgggaaacatgatttcaaaattttcaattttttctagtctaatctactcaaaccggttcagaattcaataaaaataacattcacggtgcgaaaaatggggtttgacaagtttattggggaaaaaagactttacaaaataatacccctgggagaagggagtgggaaacatgatttcaaaattttcaattttttatagtctaatctactcaaaacggttcagaattcgataaaaataacattcacggtgcgaaaaatggggtttgaaaagtttattggggaaaaaaagactttacaaaataatacccctgggagaagggagtgggaaacatgatttcaaaattttcaattttttctagtctaatctactcaaaccggttcaga

SEQ ID NO: 44816 - DNA, 902 bp, Heterodera glycines
gaacggattagcatcggggttacgagatagaaaattgtcctaaaaagagatagccatttttctgagaattaattcacaatttccgcagctcttgcggtaatggaaaaaattttgaagaggctctgcggaacagattagcatcggggttacgagatagaaaattgtcctaaaaagagatagccatttttctgagaattaattcacaatttccgcagctcttgcggtaatggaaaaaattttgaagaggctctgcggaacagattagcatcggggttacgagatagaaaattgtcctaaaaagagatagccatttttctgagaattaattcacaatttccgcaactcttacggtaatggaaaaaattttgaagaggctctgcggaacggattagcatcggggttacgagatagaaaattgtcctaaaaagagatagccatttttctgagaattaattcacaatttccgcagctcttagggtaatggaaaaaattttgaagaggctctgcggaacagattagcatcggggttacgagatagaaaattgtcctaaaaagagatagccatttttctgagaattaattcacaatttccgcagctcttgcggtaatggaaaaattttgaagagtctctgcggaacggattagcatcggggttacgagatagaaaattgtcctaaaaagagatagccatttttctgagaattaattcacaatttccgcagctcttgcggtaatggaaaaaattttgaagaggctctgcggaacagattagcatcggggttacgagatagaatattgtcctaaaaagagatagccatttttctgagaattaattcacaatttccgcagctcttgcggtaatggaaaaaattttgaagaggctctgcggaacagattagcat

SEQ ID NO: 44817 - DNA, 612 bp, Heterodera glycines
ataccgaaaattttttttttattaataatttccattctttaaattttcctttttttacaatttatgtcacccagcattcattgtttgtttctgtctcttcctaggtaagaagaattaacccacagattggtgaccaaactggtgccaccggcggggtcggcgacggcactttcattgagcgtggcatttgcgcccgactgtccgaaaatgacacggtccatcggaacaccgcgctgatttctgtacggcgccgaaaggagctgatgatcacccgcgtggtggacctggtggccgcgcacggtttgatttccaagtaaaaaaataaataaaaaaaacggatcggcaaaaaatgggggaaaaatatttaggattggggctcatatccttgtagtttttgccgaaaaaaaattccgattttcctaattcatacctcctcaaagacctatcacaccaaaatttcccaaataattttgctaaatttttacaaaaattcaattttacacatagaatatttccttttttaattttttttgtgttttctaaaaatatacgacattgagagttgataaaaacttggagatacatttttaaaatccctatctcctcactttt

SEQ ID NO: 44818 - DNA, 957 bp, Heterodera glycines
  unsure (1)..(957): unsure at all n locations
agtcttgaatttatttgacaaatccaagacttaaaaccccccccgcaaggggctgtggctgggggcctaaaatttgggcctcattggagaattaattctgatttctgaaaaagtcccagaaatgactattttttctttccataccttcttgtagagctcgagctgctctttccaatggtcttatcccggtctcgatccgtgccgaactcacaaagttatggagtgaaatgtgaaatattgttttcaccacaaggcattttttctgaaaaccggattcaaaaatctgaggtttggtataaccgttttagaaatagcgtagaaaacagcttcgatatcaagaaaccaagtcaagtccagaaaggaatattttaaaacgatttcgttttgttttggcattatgataccgaataactttcggaaattatggaaacaaaattggagaaattcgaataattttttgactgcaaatttttttccttttttgaattgggttcaaaaaaattttaagagaatttttgattattaatttgaagtcttgaatttatttgacaaatccaagacttaaaactgggagaagcaaggggctgtggctgggggcctaaaatttgggccacattggagaattaattctgatttctgaaaaagtcccagaaataactattttttctttccataccttcttgtagagctcgagctgctctttccaatggtcttatcccggtctcgatccgtgccgaactcacaaagttatggagtgaaatgtgaaatattgttttcaccacaaggcattttttctgaaaaccggattcaaaaatctgaggtttggtataaccgttttagaaatagcgtagaaaacagcttcgatatcaagaaaccaagtncagtccagaaaggaatatttntaaacgatttcgttttgttttggcattatgataccgaataactttcggaaattat

SEQ ID NO: 44819 - DNA, 1012 bp, Heterodera glycines
  unsure (1)..(1012): unsure at all n locations
taagagctgcggaaattgtgaattaattctcagaaaaatggctatctctttttaggacaattttctatctcgtaaccccgatgctaatccgttccggagagcctcttcaaaattttttccattaccctaagagctgcagaaattgtgaattaattctcagaaaaatggctatctctttttaggacaattttctatctcgtaaccccgatgctaatccgttccggagagcctcttcaaaattttttccattaccctaagagctgcggaaattgtgaattaattctcagaaaaatggttatctctttttaggacaattttctatctcgtaaccccgatgctaatccgttccggagagcctcttcaaaattttttccattaccctaagagctgcaaaaattgtgaattaattctcagaaaaatggctatctctttttaggacaattttctatctcgtaaccccgatgctaatccgttccggagagcctcttcaaaattttttccattaccctaagagctgcagaaattgtgaattaattctcagaaaaatggctatctctttttaggacaattttctatctcgtaaccccgatgctaatccgttccggagagcctcttcaaaattttttccattaccctaagagctgcggaaattgtgaattaattctcagaaaaatggctatctctttttaggacaattttctatctcgtaaccccgatgctaatccgttccggagagcctcttcaaaattttttccttaccctaagagctgcggaaattgtgaattaattctcagaaaaatggctatctctttttaggacaattttctatctcgtaaccccgatgctaatccgttccggagagcctcttcaaaattttttccattaccgtaagagctgcggaaattgtgaataattctcagaaaatggctatctctttttaggacaattntctatctcgtaaccccgatgctaatccgttccggagagcctcttcaaaattttttccattacc

SEQ ID NO: 44820 - DNA, 1008 bp, Heterodera glycines
gaaaaaattttgaagaggctttgcggaccggattagcatcggggatacgagatagaaaattgtcctaaaaagagatagccatttttctgagatttatttcacaatttagctaactctgacggtaatggaaaaaattttgaagaggctctgcggaacggattagcatcggggttacgagatagaaaattgtcctaaaaagagatagccatttttctgagaattaattcacaatttccgcaactcttgcggtaatggaaaaaattttgaagaggctctgcggaacggattagcatcggggttacgagatagaaaattgtcctaaaaagagatagccatttttctgagaattaattcacaatttccgcagctcttagggtaaggaaaaaattttgaagaggctctgcggaacggattagcatcggggttacgagatagaaaattgtcctaaaaagagatagccatttttctgagaattaattcacaatttccgcaactcttgcggtaatggaaaaaattttgaagaggctctgcggaacggattagcatcggggttacgagatagaaaattgtcctaaaaagagatagccatttttctgagaattaattcacaatttccgcaactcttgcggtaatggaaaaaattttgaagaggctctgcggaacggattagcatcggggttacgagatagaaaattgtcctaaaaagagatagccatttttctgagaattaattcacaatttccgcaactcttgcggtaatggaaaaaattttgaagaggctctgcggaacggattagcatcggggttacgagatagaaaattgtcctaaaaagagatagccatttttctgagaattaattcacaatttccgcaactcttgcggtaatggaaaaaattttgaagaggctctgcggaacggattaacaaaggggttacgagatagaaaattgtcctaaaaagagatataaagaatcgagaattaattcacaatttccacaactcttgcgg

SEQ ID NO: 44821 - DNA, 1031 bp, Heterodera glycines
agggggggggggtaaagcggtgtgacaattgaccgctaattgggtcatttgctttgccttttgaatttctaaatgttcgacccctccagggaggtgcccagatggtggacatcaccggcactttggacggttcccaacagcacgcggccgcgttgcatgcgcagcaactgctgatgctttccgcaatagtgcagcagcaacagcagccgcagcagcatccccaacagtacattttcgccctgctaaattccttcgcggcgggaaacggactgaacggaggtgggaaaattgggatggcatcggcacaaccaccgcactcttatcagcggattatcaggggattaccgtaacttagtcgagaatggatgggagatttggcgctacactgctgcatttccccttccttctctagctttctccctttctctcccttttctctctacctctctctttctcttttcccctctttatttctcttgccgccctctctttctctctctcctgcccaattttattgttgcgttgtgcgaatgagtgacagatcgccacatttcactcgcaacaaatggggctggcgatttatttttaagaacaccagcgcagaaatgcacggggttagggcgggtggcaacactccgcggccggcgaccggccccccgggcaatggacggaccatcgccgtcgtttcgtcaaggccacccaaaaaaatccttccgatcgttcccgcaacctctccccccccccaattgcacacttttattgtctttcctatcggacactctctccttgaaggacgaacggatccattgcgcagattaatgatctcaggacgaaaaaattggggtggcggatttgtgatttgtctgctggcaattgggggggggggggaggtggtgtcgtcgcgtcgcccgccgttccctccgtcgctgcgccggtgctgccgattcgctgctgattatccattcgctcctcctcctccgtctgtgttcctttttgtgctgttcgtcgcccgttgcttctcccctcccctt

SEQ ID NO: 44822 - DNA, 964 bp, Heterodera glycines
cagtgaggaatccttggaattcattacggattggacccccccctaaaaaattacaacgaattgatacatcggaacacagtcttcatcatgcatttggctcgaactcgggcagaactttacgccaatttgagcatcgctcacattttccacagtaatgccaccgtagtagcgtatcggttgctgtgtattttgctcgattatcagtcatttttaaaggaattgaccatggcaccgggcaaacaatggtcgaccgtgtaccgttgttttcaaaaaagtccatgcgaaaatttggaggttcaccgcgaaagtgtgtacctataccatttcaaatttttaaaaaatgttttgttggacaaaaaaagtacccatggcaatgaattggcgcaaaaattgcgcgaagaagtgggagtatttggaaggcttgaatcactgttgggaaatgatttttttaaatacttatggagcagagatgaaatcaaagacaagttattcaacccaaattgtaagatcttatgaaaataattgtttaaaaaaagtaaaatgcccggatagggccaaaagtcacgcaggcccggtaggggtcaactccgtctggccaactccgtctcagcaatgttcaaaaagctataacttttttctttgaaaaaatatgtaaaaatttaatgatgctcgaaaaaaaacttaaaaaccaaaaaaaaattaaatgattcattattttagtagagtttttatatgaattttttgaaatcatgaaaataattaatttaaaaaaataaatttcttagaataattcttttttgcattaagttttccgcaacgaaaagcgtcttctgaccaattatcatcaaacaatttcgagtgccaatgagttgaagccgacacaggcgcgattgttggctggattgacagtgctttacaatcattttggtcaattggcactcacatttagcgacacgaaattgaa

SEQ ID NO: 44823 - DNA, 621 bp, Heterodera glycines
attacataccggaattttgaaatggccgggaccgggacttggaaaatgggatcgggacgggatcccgggactcccgtttttccgggactcccggtcccggtcccagtttttgggccgggatcccgccgggaccgggactttttcaaaatttgtgcaactttgattataaatttaaaaaatattggtaatcttctattttagcttgggaataggccaagcaatgcaacgaccttttttgtctgtttttaaagcactttttagggcgcgctttttcaaaaaaattttgggcaattaagggtgagggtccggcggtgccgataggcgccgccggggaaaatttttgtaatttttaatgagttttattaatagattttttccaaaaagaccaaattttgggattctgcgtcatttttttaagataataaggattttagggatcggtggggaagttttgcagattttacatccattttaagagattttcaacaaaaattgcaattttgaatatggattttgtgatctttttaacaattgaaattgtacaaatttccaaaaatcccttaagttgtatcttcgaactttgaaataaaaacatttttccaaaataattattaaattttt

SEQ ID NO: 44824 - DNA, 739 bp, Heterodera glycines
agtaataggaattccacccgcattctcagaataattacgccgatactaattgttctggaatttgtttctctgcgcgtttgttggggaaaaatttggaaaattggctatctctttttctgctcaacagtaataggaattccaactgcattctcagaataattacgccgatactaattgttctggaatttgtttctcggcgcgtttgtttgggaaaaatttggaaaattggctatctctttttctgctcaacagtaataggaattccaaccgcattctcagaataattacgccgatactaattgttctggaatttgcttctcggcgcgtttgtttgggaaaaatttggaaaattggctatctctttttctgctcaacagtaataggaattccaaccgcattctcagaataattacgccgatactaattgttctggaatttgtttctcggcgcgtttgtttgggaaaaatttggaaaattggctatctctttttctgctcaacagtaataggaattccaactgcattctcagaataattacgccgatactaattgttctggaatttgtttctcggcgcgtttgtttgggaaaaatttggaaaattggctatctctttttctgctcaacagtaataggaattccaaccgcattctcagaataattacgccgatactaattgttctggaatttgtttctcggcgcgttagatgggaaaaattggaaaatgctatctctttttct

SEQ ID NO: 44825 - DNA, 465 bp, Heterodera glycines
  unsure (1)..(465): unsure at all n locations
tgatggtcagaaaataaatgttattttatatttttaaataattttttaggcttttggacaattatgttgggcgtcctcgtccccatggaacatggtcgcaaccattgttccgcccggaccagtggaacatctaccaacgaacattggatggagatgcgaggacgaacaataacgcagaagcggaataccaccgtttgcagggcgcgttcaattgtcgtcatccatcgttgtggaatttcattgatgttcttcgacatgaacagaaaattgcataccacaaatacaattctgcgatcgctggattgtcacctgagaaaaagcgaggaaaatatttggcagcagaccaacgaattctgaatatggttcgcaattacattccattgaatgcagtgaatgaacatgattctcttccncccattccccagcccaatcaattaagagtattttggaatttcttcgaggtat

SEQ ID NO: 44826 - DNA, 1199 bp, Heterodera glycines
cagagcattttctggaaaaaatatttatgaattaattatgcaaaaaataaacaaataatgaactctcttccttaataattttcatgcaccgaggtactcactcggccgcttcgcggcctcgtggtgggccttcgccccccctccgcccttcaaaattttgaaaaaaaaataaaataataggagactcagaattttgaaaattttttataaaactgatgacaagctaatgtgataaaacaggttaattcttttcctttcagtatccctgcaaagtttggggcgcttctgataagtttctgaaaaaaaagataagcctaaactttttggcctgtttaaaaaggaattaaaaatttttaaaaatttattcatctccctttttgatagaaaaagcatcagagtgcctaaactagcatgtaaataaaatttggtgcgtttcagagcattttctgaaaaaaatatttatgaattaattatgcaaaaataaataaaaatttctaaaaatttgatcgtccataaataatttgtaattgatcaggggctcaccaaattttgcaggaatacgtatcggaacactacaaatgcttactaattttcctagattttttaaacccggtgaaaattttttgcagacaccaccacttttgcacttaaaaaaatttcaaaaaactttaaaaattcatagaaaatttaaattcataggtactactgctaaatcaacgcagagacgcctttccttgacctttttaggcccctgcaaaatctggtgcgcttctgatcactactcgaaaaatgagtgattgaattttcattaaaagttaagcctaaactttttggcctgtttaaaaaggaattaaaaatttttaaaaatttattcatctccctttttgatagaaaaagcatcagagtgcctaaactagcatgtaaataaaatttggtgcgtttcagagcattttctgaaaaaaatatttatgaattaattatgcaaaaataaataaaaatttctaaaaatttgatcgtccataaataatttgtaattgatcaggggctcaccaaattttgcagggatacgtatcggaacactacaaatgcttactaattttcctagattttttaaacccggtgaaaattttttgcagacaccaccacttttgcacttggagaaatttcaaaaaactttaaaaattcatagaaaatttaaa

SEQ ID NO: 44827 - DNA, 668 bp, Heterodera glycines
cactccgttgtttgtttgtgtcactaccgttccttggctcgctatttggtcattagctgatgatccgtccggcacaatgctaaaagcgtactttcccggcacggactgtgccgggacggggcaacggacgagcgaaggactgacccaacggcctttgctgagcgaagtgccgaacagacaaccgtaacgggcacgaggccccctgagggaaagtgaggcaaatgcgaagaaagtgccatttattcacttgggaaaagcattgcccaaaacggagacaaaggcaaccgatggcaaaggaaagggcggcgaaagcgaagaatttcccgacgcattcgaaagtgcgacggacgaagcctgcggaaggatcagtgacagcgaaggcaattgctggggacagatcagtccaagcggacaaaggtcgcaatcggcacccatccaaccgggcgagcagacgcacgccctgccaattggggggggggggtgggaaagaggctaattaacccatcaattagcaatgctaattgttgtccattgatcagccagtcccccattaattaaactgaaagtgccttgtttgacgatcacagcggccgtggatacattcaaagtcgcaatgttttatggcagagatttgatcctcggcatatgaaaaatgggagcccgaaaca

SEQ ID NO: 44828 - DNA, 1003 bp, Heterodera glycines
  unsure (1)..(1003): unsure at all n locations
gagtgcttaaaaacaaaaatataaaaaatagtaaatcataaagctaatgcaaaagtaaagtccgaaaaataatgcaagaacaatcattaattatattcgcttggtcgagaaaaaaattatctgggccaacttcaaaataaataaatattaataaacctaaagaaaaattggcatgaccataaagtccatatttagtaatttttgcaattaattaaatattaatttaatgcacaatttataaaaaaagaaaaaactaagtcacaaagatatgcatttatattgcaaatcggtcaaatataaaattgaattaacaagaaaaaattaatacaggaaagtttatcgaatatgttgacaaagaacccaacgagaattcaaattgaatcaacctaacaagagagggaataaccaggataaatttttaaataagtaaacttggaatttaatcgaataaacaattaaattgaataaataaaacgaagtttttaaatgaaaatcattatttatctatatttataaacaaacaaatcaaaaaagtgaatttacaacaattttaataaaaataataatgaaaaaacagttattagagaaaataaatattttaagcccaaaataaattattttgattcaactaattaaaattttaaaaacacaaacatttttaaaattaaactaataaaaatgaaaaaatacttattaaatttcatatatttcaacacaaaatcaattacggaataaggacatggacagtaatttattataaaaaccaaagaacatataacatataatggggcggttacgaattttgtatttattcaaaaacataacaaataattactacaatattttatgcgaccatttcgataatttaattcaaatattcaaagaaaatttgagacaaagaaaggataaaaacaatctacaaatttatatttatttacaantaatcgaatgctttaaggacctaatannacaaaacctataaattataaaaaatatacaaact

SEQ ID NO: 44829 - DNA, 1181 bp, Heterodera glycines
  unsure (1)..(1181): unsure at all n locations
tagtcattctcgattggtgttgacgatccagcattcagtgtacaattgttttaaacctctcaacatggtaaatcaaaatcctaataaaaatttcgttgaatttcttcgcctcttatttgtgcaaaattttcgaaaaagtaattttctatttaaaattaaaaaattcagaagcaaattcaagaattttttttatttttaaatgcattttttaccacatgaattatgattaaatttttgcgtttcgaattcattttgaaattaagaaaaataaaaattgataatcatttgatcatttttagcgcactttaagcaccgccgttaggcagcgcagttccaaaatttattccatgccacagatattatgggcaggacacgccaagtacctcaaacttgggtaattaaaccaaagaaagaagtgcagtggggaagaatgacgcccaaaatgaaggaaatattcgatgctgtgcgaactctttgtgacccctctctgactctgccaatgcagcagtttacaatttttaccactatttttctctcactcatcgtctgctcgtctctcctttattataagctattttccaaagccaacgcccttcttctgttagtcatttctcattggtgttgacgatccaacattcagtgtacaaatttgttaaacctctcaacattttaaatcaaaatcctaataaaaatttagttgaatttctccgcctcttatttgtgcaaaattttcgaaaaagtaattttctatttaaaattaaaaaattcagaagcaaattcaagaattttttttatttataaatgcattttttaccacatgaattatgtttaaatttttgcgtttcgaattcattttggaattatgaaaaataaaaattgataatcatttgatcatttttagcgcactttaagcaccgccgttaggcagcgcagttccaaaatttattccatgccacagatattatgggcaggacacgccaagtacctcaaacttgngtaaataaccgaaagaaagagtgcagtggggaagaatgacgccccaaatgaaggaaatattcgatgctgtgccaactctttgggacccctctctgactctgccaatgcagaagttgaccatttttaccactattttttctctccctcatcggctgctcggctctcccttaatataaagctatttt

SEQ ID NO: 44830 - DNA, 1024 bp, Heterodera glycines
  unsure (1)..(1024): unsure at all n locations
cagacttttggaaaaatatatttgcaattatcanccaattttgagaagtgagatagaaatgataacttcacgattcaaaccaattttcggtgctctaattaaccgcgataaaanacatccgaatncaattaaatagcttctgagataataaggtttatcataaaatttcatntaaaaataaaccctcaattattggtatgaacgatactttccaaacatgcacgcgttttgcgctcgagctatttatcatcgggcttgtcaattcaaagcgaaacaacaaagatagtgttttgaacgaataaagggcataggttattttgaagaagtgtcaaagaacatgcagcaataagcctgcaaaatctaataagtggaaaatacatgagtatagaatttattttcagaaagtgtcaacagacttttggaaaaatatatttgcaatttatcaacaattttgagaagtgagttagaaatgataaacttcacgattcaaaccaattttcggtgctctaattaaccgcgataaaaacattcgaatcaattaaatagcttctgagataataaggtttatcataaaatttcatttaaaaataaacactcaattattggtatgaacgatactttccaaacatgcacgcgttttgcgctcgagctatttatcatcgggcttgtcaatccaaagcgaaacaacaaagatgctgttttgaacgaataaagggcataggttattttgaagaagtgtcaaagaacatgcagcaaataagcctgcaaaatctaataagtggaaaatacatgagtatagaatttattttcagaaagtgtcaacagacttttggaaaaatatatttgcaatttatcaacaattttgagaagtgagttagaaatgataaacttcacgattcaaaccaattttcggtgctctaattaaccgcgataaaaacatccgaatcaattaaatagcttctgagataataaggtttatcataaaatttcatttaaaaataaaccctccaattattggtatgaa

SEQ ID NO: 44831 - DNA, 595 bp, Heterodera glycines
aacttttgggtaatgaattattttttgaagtgagtctttttcctattggtgctttgctgtgccgagaaccggtatgcaatggatggctttcaatctgcaagaaattagattggcaatatgtggttgtaaaaaacttttgggtaatgaattattttttgaagtgagtcaaacaccgtattagtgctttgctgtgccgagaaccggcaggcaatggataggtttaaatctgcaagaaattagattggcaataagtggttgtaaaaaacttttgggtaatgaattattttttgaagtgagtcaaacaccctattagtgctttgctgtgccgagaaccggcaggcaatggatggctttcaatctgcaagaaattagattggcaatatgtggttgtaaaaaacttttgggtatggaattattttttgaagtgagtcaaacaccctattagtgctttactgtgccgagaaccggcaggcaatggatgtctttatatctgcaagaaattacattggcaataagtgggtgtaaaaacttgtggaaagaattatttttggagtgaatccacacccctattatgttttactgtgccaagaaccgg

SEQ ID NO: 44832 - DNA, 981 bp, Heterodera glycines
  unsure (1)..(981): unsure at all n locations
agaaaagagcacgaaaaactgggagaaaggacaaaaagaaatggcaaataattccaatggcatggcattgtttgctcccttcccatggtgccctcttcaccatcagtatggcattattttctcacctgcccctggcatgtcaatttgtgccgctccgaggccctcattggcccaaaattcggcccttcgctgttctgtgtcggcccaatggacacagcgaattgcccccgcggtatcttccgtttcttttcgcttcgatacgcaatcactgcccgaaatgcccctctgatgttggcgttgtgtttacaaatgaatatcacaccaaaaagtggggcaccccacaaagtgtccaagccacgaaatgtccaaaagagtaaaaacccacgaaatgtccaaaatttttcaaaatttataaaaacaaaataagtctaatttaggatttttagggttttcggggtcgctgaatacgaatatacccttaatattaccccttgcctaaccttaggcccatctgaataataaaaaactcaaattcgagacttggacatttcgtgggctggacattttgtgggtcagcgaaaagtggcacgcacttacgattattttcactccgccaaattgggctccctgcagcaaaatccattcgttgaacggcaaagtgaacaaagtgacgcccacggcgaccaatttgagcatggcggacaaagtcaaacaccaaaagctgagctgatcaatcggctgcactgagtcaatggacacaatgtcatccattccaacagaagaaagaaaaagaaagtaattggattcactgaaaaaagaattaattaaggtgagtcattaaattgaaaaatgaaattaatggagggaaacgagtgacaacgaacaacagcagcaacaataatcagcaacagtttgttgtatttgaaggngaagaagtcaagagataaggcaaacaagtgaatggagaagatcatcgattgg

SEQ ID NO: 44833 - DNA, 1216 bp, Heterodera glycines
gcctaagctgaagcctaggctgaagcctaagctgaagcctaggttgaagcctaagctgaagcctaggttgaagcctaagctgaagcctaggcctaagctgaagcctaagcctaggcctaagcaagctgaagcctaagcttaagcctaagcctaatgtgcgccgctcgcttcgctcagttcgccccactatttgtcctcctttctccgcgtgttggccattgcgaacgctccgcggcttttaaaaaaataatattaaatgccaaatgtggtcaaaattaacataaatgtggaagggaaggccccaatcgtcacttttattttgcttccaattttacctttatttcctaaacccaaaatggattattacaattatgaccgattaatggccgaatgtcccaatgaagttgcgacagttaaatttctccaaacaaaaggcctactacataaagaacgccattgcgattgtggttcgcaaatgcgcgagagtacacgcacacaacgggacactgtaattcccgtgtggcggtgtacttcaaaattctgcaagcaactaagggcttaagaccggctacttggttcgacagctccaccctttcgttccgctcaattcttaaatttatttattggtggtcgactgagcaaacgtctgttaatttttgtcgccatgaaattggaatggcacacgaagcagtagttgactggtaattagctatttgtaagtgccggaggcattttataatggctcaggtccatgtacatgcgcgaggcatgcgctgactccctgttaaagaacaatgggcgtgtgggaggcgtaggcttaactgtggaagtggatgaagcgcttttttctaagcgcaaaaacaacattggcagggttctccccgaacaatgggtgttgggggggggggggggggtatgcaaatgaaccggatagggcagatgggcataaacattcattgccacaagatcgaatttaattgcctatttttttaaataatttattttataattaactataacaggtggcgatattgtgcatccaaaatctcaggacggagtagtgcagagtaatttcttaactcatgatttataattataattaatagagctaattaagttatataatgaatatgaatctattaactcatattaatatttggaattgttgtatgtttaagttttaaaatgatatattctatcaaatattttttatata

SEQ ID NO: 44834 - DNA, 1039 bp, Heterodera glycines
  unsure (1)..(1039): unsure at all n locations
aggaagagagttcattatttatttgtttttgncataataattcataaatattttttcagaaagggttctgaaacgcaccaaatttattnacatgttagtttaggcactcagatgctttcactatcaaaaaagggagatgaataaaaaatctaaaaattttaattgcttttnaaacaggccaaaaagtttaggcttaacttttttttcagaaactgatcagaagcgaaccagattttgcgagagcatcaaaaagacaaggaaaagcactgctatgatgctaacaccagtaattctgaatttaaaattttttattaatttttaaagcttcactattttatttttttagcaaaattaattcataaatattttttcagaaactgctctgaaacgcatcaaattttaattacaagttattttaggcactcagatgctttcaatatcaaaaagggagatgaataaaaaatctaaaaatttttaattgctttttaaatatgcgaaaaattttaggcttaacttttttttataaacttatcagaagcgaaccagattttgcgagagcatcaaaaagacaaggaaaagcactgctatgatgctaactccagtaattctgaatttaaaattttttattaatttttaaagcttcactattttatttttttagcaaaattaattcataaatattttttcagaaactgctctgaaacgcatcaaattttatttacaagttattttaggcactcagatgctttcaatatcaaaaagggagatgaataaaaaatctaaaaatttttaatactttaattctgcgttggatttttgctccccataattgtttgagtacccccnnctnncccttnaaannatcnntttttttnttttcnaaacaatccccccnnnccnntncncccnnntttntnnnnnnnccnnntccttcnnnnntnncttccctttttagcaagatnttttcccnnntntcntcnnncctnncncacccaagtaaatatatctctcctaattttgcaggcattctcccattgta

SEQ ID NO: 44835 - DNA, 1077 bp, Heterodera glycines
  unsure (1)..(1077): unsure at all n locations
aacggcggcacttgcatccgatgcagctttccccgggctatcgaaccctactatttttttttttatctcttttctgaaaggagttataacaatttttcacaacagttttgcatttaacagacacattttaaaatttctaattagtatagtagtccaagcctattattattttttttgactagtctctgaatggggttatcccagttttagtatcctttttgaaaaacaaaaattttaataactgatacggtagcccaacatccattgccccaatgtacccttcggtttgtcaacgggagctaacaattgatgagtttgtttggtttcttttttaagcaattttccgtcattgctcaccaactgttaggcgtacagcaacggcggcacttgcatccgatgcagctgttcacgggctctctaaccctatttttattttttttctatctcttctctgaaaggagttataacaatttttcacaacagttttgcatttaacagacacattctaaaatttctaattagtatagtagtccaagcctattattattttttttgactagtctctgaatggggttatcccagttttagtatcctttttgaaaaacaaaaattttaataactgatacggtagcccaacatccattgccccaatgtacccttcggtttgccaacgggagctaacaattgatgagtttgtttggtttcttttttaagcaattttccgtcattgctcaccaactgttaggcgtacagcaacggcggcacttgcatccgatgcagctgttcacgggctctctaaccctatttttattttttttctatctcttctctgaaaggagttataacaatttttcacaacagttttgcatttaacagacacattctaaaatttctaattagtatagtagtccaagcctattattattttttttgactagtctctgaatggggttatcccagttttagtatcctttttgaaaaacaaaaattttaatagctgatacggtagcccaacatccattgccccaactcagaagggcggtttgccaancgggagctaacaattgatgagtttgt

SEQ ID NO: 44836 - DNA, 1096 bp, Heterodera glycines
taaatttaagaattatatatttatttttaataaataccccaccccaggctgataaaactctttttggcttttcgacaattcttaaaaaatatttaaatttattattttaataattcttaatttgcattcaaaaattgcatctaaattttagaattaaaacaataatataataataataataattcattaaattctaataccgtattggtcttgtccggcctccattcaattttctgtccaatgtgtggaatccacttctggatgaaccatatgatatctaatagagctcttttagcagggtcgggggcctggtacagaaatttttcggcccccggcaactataaccctatggttttcggggaaaacagggttgacaacggttaaaagcggtcgaccgggtctccggaaccaagactggacggaattacgggtcactcactggctacggattacgtaattacggcattttttgacccccccccccgtaattatggattgctggtgtccgtaattgaaaaatctctccttaattactgttacgactttccgaaattttctcttgttaataattgaacaatttttatgagagaatttttttattgccttataatatttttattaaagaaaaattttgcgtttaaattttcaagggaattttcttctctttttttcagctgagtcgtcctcagtttctcctcatagcagtacaaatccagcagaaaattaatgtttcaattattaatttaaataattagagttgctcccgattttcgtggaaaaaaaaatcgtggaggaattcccagaaaattttagttttatctgggatggctgggacaaatttatgggagcttcttttcacaattccccgaaccaggtcgggaagcaaccctaatattaattaaaacaaaatttcactaattagtcgattgatttttaaaattaaattaaaactaaactcacttccaaataataattttacacctaattcacgcgcgctttcattgaaaacatttctcttatgttttgctggtaaattgttgaccatttgcccaaactctgttaagcattgttgagcctgaaattcatttattaaatg

SEQ ID NO: 44837 - DNA, 601 bp, Heterodera glycines
catttcccccccccccccttctcccctctcctccgacttcgtttgtggcagctgtttccacaaatgtttctcttggcttttctgtctgtgtccttttttcgccctctttctgccaacttatgtgagcagcagacgaccacgaggtcttttacaacacattaattttgaatgacgatgaatgatgaaaataatggtggagggagagaagaaaagcattggagagaagggaggagagaaagttaggggaagagaaagaagggagcgataggagggggaggggaaaagaaaaaggaggagggagagaaggggaggagagaatgggggagaaaaaggagaacagcagggagaggaaggggaaggaaggccgtgtcggactgactttgactgccaaatggtgttaatttgcggaatgactctttgtgggtttgttgcattaaataccaaagacgacacacggaattagtcgatattttgaaaattagtgccaaaagtgaaagaaaattgaaaacaaaacgattgaaaagaaagtgcggaagagaatatttgaaattaatcatctgttatttgagtgcatgactttaatttcacttgtcaacttaaa

SEQ ID NO: 44838 - DNA, 854 bp, Heterodera glycines
  unsure (1)..(854): unsure at all n locations
gcctgcannggtctattggggagtaaaaaaaagtttttttgtgactatttaccatataaatttatgcagcatttctaaaaaggatttaaaaataatttcttgcgtaatattttttacattatgttgttgaagaatttgaggctgcttctgatgcgattgaaaatttttcagcttttcttgaaaagttttttcccagaaaacggatgggtcaaataaaaaactaaacatctcacatgaccaatttaaattcccttacattttgggtttactttattatgctggcccataaaaaaatggagtttttccggtgccaaatttttgtgaattttctttcggcccgtcataagcggattgtttgggggcaaatgaaaacaaattttgtgttattcgaatgcgctagccgagctctacattttcaaatgtatcaacaaagggtctatctccactctctggcgagttatgtccagccaaagcagagtgggccataaacacgaattttttaatctttggtatttcctctattttgagcctgctctacatttatgtattgtgccaatatgcctattgcaactgaaatttattcaactttcccgacaaattgttgagataattattctagacgatttttttatatctcaaagcttaactattgcctttttgtatgataactggtagatattgggagtaaaaaaaagtttttttgtgactatttacaataaaaatttatgcagcatttctaaaaaggatctaaaaataatttcttgcgtaatattttttacattatgttgttgaagaatttgaggctgcttctgatgcgattgaaaatttttcagctttttctgaaaagttttttc

SEQ ID NO: 44839 - DNA, 1113 bp, Heterodera glycines
agtgaaaattcgatcactcatattttttgctaattgagcagaagcgtaccaaactttgcagggatactccccggtaaaggactaacttacactgaaatgagcgccgagctagctggctcaaaaaaattttcgaaaatctgagtctttcattatttatttatttttttacaaaattaattcataagtatttttacagaaactgctctgaaacgcaccaaattttatttacatgctagtttaggcactctgatgctttttctatcaaaaagggagatgaataaaatttttaaaaatttttaattcctttttaaacaggccaaaaagtttaggcttaacttttttttcagaaacttatcagaagcgcaccaaactttgcagggatactgaaaggaagagaaataacctattttaaatattatctagtcagttcatttaaataatttattcaataaaaaatttttttttgggttttcggggcagtccccctgaaccgatgttaggcttaactttttttcagaaactgatcagaagcgcagcaaactttgcagggatactgaaaggaagagaaataacctattttaaatattatctagtcagttcatttaaataatttttattcaaaaaaatttttttttgggttttcggggcagtccccctgaaccgatgcgcccagatttatggggagaccgaatccttccggaatagcttccctatagcctgtactttaattctgcgttggatttttgctccccataattgtttgagtaccccaaacggacacttgaaaaaatcgatttatttttgttttcggggcagtccccccgaaccgatgcgcccagatttatggggagaccgaatccttcgggaatagcttccctatagcctgtactttaattctgcgttggatttttgctccccataattgtttgagtaccccaaacggacacttgaaaaaatcgatttttttgttttcggggcagtccccccgacccgatgcgcccagatttatggggagaccgaatccttccggagtatcttccctatagcctgtactttaattctgcgttggatttttgctccccataaatgtttgagtaccccaaacggacactt

SEQ ID NO: 44840 - DNA, 240 bp, Heterodera glycines
gtcatctatgttactagatcggggatcgatccccgtttttttcgctcgagcaggacctgcagaagctagcttgatggggatcagattgtcgtttcccgccttcagtttaaactatcaagagagggaggtaggtggcggaagaagaaaagggtggggggagtatgagtatgatggtcaatatggagaaaaagaaagagtaattaccaattttttttcaattcaaaaatgtagatgtccgca

SEQ ID NO: 44841 - DNA, 567 bp, Heterodera glycines
tttttttcgatttttaaatattttattattttaaactaagatatagaatgcttaacttgcaacatatgctttttatactaatatattacagtgcgattgctgatgacactattccgtcctcgtttcagattcaaattatatattaattatttcatttaaattgataaaaagtttaattttagaactgaaatttgtcattaattatttctattatctatttattttttactttttatttgtcactagattttgccatattaattttataattgacaaatttaaattctttcttgtcgataatccaagacttctaacgcattctttcattacagctttttatattaaatattgctttcagaaaaataatgaaaaaagttaaatattacatttatattttttaatctttaaaagcatagacaatagaataaatattcattgcctcattatgcctccatatttttttagatttacatagattttttaaatgttgacaaaagccaataaaagtggttgcttaatttcaaataaatgatgataaaaaatgcatttggtattgttaatcatttt

SEQ ID NO: 44842 - DNA, 817 bp, Heterodera glycines
aaaaaatgagaaaaagagatagctatttttggtcaagaatttttttgtttgcgtttcaaatatcgtaagattgtttgatagggccagacaagagaaggcaactgttggtaccaagtttgcggtaaaaaaatgagaaaaaagagatagccattttttggtcaagaattttttttgtttgcgtttcaaatatcgtaagattgtttgatagggccagacaagagaaggcaactgttggtaccaagtttgcggtaaaaaaatgagaaaaaagagatagccattttttggtcaagaattttttttgtttgcgtttcaaatatcgtaagattgtttgatagggccagacaagagaaggcaactgttggtaccaattttgcggtaaaaaaatgagaaaaaagagatagacattttttggtcaagaattttttttgtttgcgtttcaaatatcgtaagattgtttgatagggccagacaagagaaggcaactgttggtaccaagtttgcggtaaaaaaatgagaaaaaagagatagccattttttggtcaagaattttttttgtttgcgtttcaaatatcgtaagattgtttgatagggccagacaaaagaaggcaactgttggtaccaagtttgcggtaaaaaaatgagaaaaaagagatagctattttttggtcaagaattttttttgtttgcgtttcaaatatcgtaagattgtttgatagggccagacaagagaaggcaactgttggtaccaagtttgcggtaaaaaaatgagaaaaaagagatagccattttttggtcaagtaattttttttgtttgcgt

SEQ ID NO: 44843 - DNA, 1318 bp, Heterodera glycines
ttaaattaattatttaggaattttcacaaagaaataacaaatatttatcaaaaaaaaacttctttgggggtagtcaaacttacaaaatgccaaaattttatccaaaaattttggcggaaaatccaaatttattttttggtcgcaattttctttaccgcacaaatgaaaaaatatgaaaaattgtgttttttaggtgaaaatgataatttcatctatccaaattgcttggagtgggtaattttttgtttgggatatttttttttaccaaaacgacggagaagtaacggaaatgggtggcattccgtcccgtttgtccgtccgtccgttccgccaatttttgctgctccaacaaataataaagaaccaacagaacagtcagcagcagaaaatgtgaggggggggggggggacaagcaaatgacgatgaaaatgacatttttgtttataataaataaataagtgaatggtcttttgctgcaacgagagctattaaatttcttaaaattcttccccgatcacttttcagtttttaatttctgatcactattcatttgatacatttcttaactctaattaggatttctgttcgcttcaattgatcgtttaaagctctccccaaaattagctcttatcattttaatcagaaaacattgaatgtaaaaatgaacatctgctgttgatcacttaattactgaactttcatcaattgatctgccggatatggcaatttcgataattgagccatggctttaatcagttttactcccaaatcacatcagtctgttattatactaatcagcaaacagctgtagcaattaataaaataatgctgacatcaaatacaaaaatttttattgcttggattcctactatattatgcacttaaagtacttcactcactcactcaccatccttaaacgtatcaccccccaaacgtttcaatctcggcaaattgtccaattttcgaatattattgtcagtcaaatcaatgacatcaaattgatcctattaattaaactttatatataacaacagcatttctgtcttaccctgataactccgagattttcaatggtaggaatttgcagattccgaagggaaatttcacgctgcttacacggatttataaactgaaaatttaaattgccattttcagttctgcgccattttcgcaaaaaatagttaacaagatgcccacctggtacgcatcattgacaacatcaacggaaatacggaccatagtaactaagaaaacaagtcaaaaaaaattaattacataaaaacggatttattatagaaaaatatcactgtaaatgaat

SEQ ID NO: 44844 - DNA, 871 bp, Heterodera glycines
ttttgcctttttattccatatttcggctatttttggcaaattttcacaagaaaaatgcaaaaaaagaagcgatttttgacgtttttagtccatatttcgggcatttttagtccatgttttatgtccatatttgacgttttttagtccatataatttcgagccctattaatatgggacgggtccgggtttttgactttggtttttggcaaggcttaaattggatggagagatgaattaattatgccatttgagttccttcgtcccgacgaaaacccaaagtttgtcgccaactccgaatgggaaatggtgccgccaattccggcaaattgtcccattaacgtttcggatgagaaaggaaaattggtggtgaaaagtgccgagcaaatggaatatgaacgcgacgatcaaagacagagcggcggtcagccggcggtcaaagtcagcggcaaattattgcgcgtggcatttcgagtgaaccaaatgccaaaaaacattaccattcaattggaggacaaacagaaaaagcccattctcacactgttcatcggcgcaaaacatattatactcaactcggagcaggtcaatggtgcacgacggcacggcacgagaagggatgggaagggataagcaataaaatgccaaggtggtgccgagcagggataccattccgaggccccaaaagttgacggaaatcggaattccgaggcccacaaactgtcggaattccgatgcccaaaaattttcggcagttgtaaatcggattccgacccccaaaaatgtaggaaatcggaattctgtgccatccctggcgcctaggtttaaaattgagaaaaaatggatataaaggtgtggcataaaatacgctttcaaa

SEQ ID NO: 44845 - DNA, 1040 bp, Heterodera glycines
  unsure (1)..(1040): unsure at all n locations
aaatccntttttagaaatgctacataaatttttattgtactttttcacaaaaaaacttttttttactcccaatatctaccagttatcatacaaaaaggcaatagttaagctttgagatataaaaaaaatcgtctagaataattatctcaacaatttgtcgggaaagttgaataaatttcagttgcaataggcatattggcacaatacataaatgtagagcaggctcaaaatagaggaaataccaaagattaaaaaattcgtgtttatggcccactctgctttggctggacataactcgccagagagtggagatagaccctttgttgatacatttgaaaatgtagagctcggctagcgcattcgaataacacaaaatttgttttcatttgcccccaaacaatccgcttatgacgggccgaaagaaaattcacaaaaatttggcaccggaaaaactccatttttttatgggccagcataataaagtaaacccaaaatgtaagggaatttaaattggtcatgtgagatgtttagttttttatttgacccatccgttttctgggaaaaaacttttcgagaaaagctgaaaaattttccaattgcatcagaagcagactcaaattcttcaacaacataatgtaaaaaatattacgcaagaaattatttttagatcctttttagaaatgctgcataaatttttattgtaaatagtcacaaacaaactttttttcactcccaatatctaccagttatcatacaaaaaaggcaatagttaagcactgagatataaaaaaatcgtctagaataattttctaaacaatttgtcgggaaagctgtataaattctgggaaaaaacttttcaagaaaagctgaaaaattttcaatcgcatcagaagcagcctcaaattcttcaacaacataatgtaaaaaatattacgcaagaaattatttttagatcctttttagaaatgctgcataaatttttattgtnaatagtcacaaaaaaacttttttttactcccaatatctaccangtatcatac

SEQ ID NO: 44846 - DNA, 1233 bp, Heterodera glycines
  unsure (1)..(1233): unsure at all n locations
aggggtacatttcaaaaaaaaatttaattttaacaagaaatttttttaatcctcgaaaatcctctaaatatgttaaaaaatggaaatttgtacgaaaaaaatgcaaaattatatacgaagtccaaaatatgtataaaaatattacataaaaaggaagccctgctaattattattaattaagaaagttaaaaaaaagattttttgtaaatatgttataatttatttattcttataatttgatgctgaacggttctctttccggtaaatttaccttgtcttcgtgggcattatttccaaaatagccatccggattagcagtgggataaccagtgatcaccaatccacccggcggtggcggcgcgagtgccccttcagtcgccggcggtggcggcgcgagtgctccttcagtcgccggcggtgacggcaaaaacatcggaggcggcggtggtggtgaataaatcggaacagcaggaggcggattagtttcacaatcacacaacactgaggaatttgcttgacgattcatttgcattggccctggtggtggtgcctaaattgaaaaaagaattagagaattaacggattctattagtaatttataagaaaagccaggacacggtactgttcctgactctacagtacacaattaattctgttgattatttattgtaaaatactggaaccagtactgtttctgactctacagtaatcttaagaaacaggatacggttccttaatctacagtacacaactaattgtaattgcctttttaaaatgaaatattttcgaccatgatttataccattattgttccaagtggtcgtccagcttcaacacttggtactgctccaagtgtcaaagccgcaactccaagcgcactcattgtccgttttaaggtgggcccatcttaaaataaaaaatgttaaaaatgccgtacaaatatttttttttaaattgagttttgccacaaattattagaaaagcgaataaaattttcttgaaattgatcaaactaattaaaaaattaaccaccaccaccaccattggcgttgctgttcattatttggctttcgatgacgaactgttgtgtgtgccgtggttcttagggctcatttgaaaatcaactgtagaggaagaagaagaattgnnggtgtcatttttnngcacagtggctgctttaagaaaaatatttagaanactcatttagcaaattaattaattttcatatatttt

SEQ ID NO: 44847 - DNA, 713 bp, Heterodera glycines
ctatgggtacgcgccagtgtcagacaaaattgctcataacgccaaatagcgcatttggcgtaaatttttgcgcgttaattcaaaatttacactggaaaatgccttttttgtattttttattttgatctgccataactcgcttcattcccaactaagctgaacaaatttggtatctaaaaaaagattttgaaaaggagaatctttttctaagcgaatgctaagcaatttgacatcccagaaaaaagttgtgatactttcaaatttttatcacgttataactcaagtcctaaactgctgttttcagcaaaaatgctaaaactattaatttctttattgattctaaatgtccaaagtgattttgtatccttataaccaaaattgttagcatttacgaatttgatgttttttgtgtgctagagatgtgaaaatagtacgccaaaaagagagaaaaagaaattcacaaattttctcaccaaataacttttgagtgagccttatttttgtattaaatttccttattaatcgattcagaatttttttctctatcgatatgcaaaatttggtgtaggtttaacgtatagaaaaaaagttagacggagaaaaagtaatgttgttttctacattgttaaaaataaagagatagtgcgccaaagtgatagaaattataaagaaaaagagatacgacgatatagtactaagcttttctctgcaca

SEQ ID NO: 44848 - DNA, 736 bp, Heterodera glycines
acacaaatgaaattctcacgttcgaatggtgggaaaaaattcttaaaatttaagcaaatttattatattaaggccattgaaccctgataataataacgaaggagcgggaagatcaaacggcatttatataaaaataaaggtcatttgttaattggacttaagtatatatttgggaatacaatatttaattcttgagagattttattttaggaaatccttggccaagcaaaaagtgccgacgcaagtaagcgattggccggcatccgacgagcccaatcactgctgtccacaagcaatgggccaaatgagttgctaattgatgcgtttattttggccgggtgtttgcccatctttttggactgtttgaaagacaataacaggtgaaacaacaatcagaatgggctcgtgctgggacgtttgttttataaatccttcatccccgagaaatgtattttaaattatgtaattttttaagagaattcgaatttttcatatatatttttaatgttttatatgaaattcaaatttttcgtaaatattcttcctccaaatttccttaaaaatttctaaattttcgaattaaatttctccggggagatggatgtatttttaaattcatgagaaagttttgattaaatttacccatgcccttgtccttttagcaaaagaaatgaatccataaaaaaaagtttaggtcttagttcgaaaatatggtccaaaaaattcagaatgttag

SEQ ID NO: 44849 - DNA, 970 bp, Heterodera glycines
catgaatgttatttttattgaattctgaaccggtttgagtagattagactacaaaaaatttaaaatttcgaaatcatgtttcccactcccttctcccaggggtcatgtctttcactcccttctcacaggggtattattttgtaaagtctttttttccccaataaacttttcataccccatttttcgcaccgtgaatgttatttttattgaattctgaaccggtttgagtagattagacaacaaaaaattgaaaatttcgaaatcatgtttcccactcccttctcccaggggtattattttgtaaagtctttttttccccaataaacttttcataccccattttcgcaccgtgaatgttatttttattgaattctgaaccggtttgagtagcttagagtacaaaaaatttaaaatttcgaaatcatgtttcccactcccttctcccaggggtattattttgtaaagtctttttttccccaataaactttttataccccattttcgcaccgtgaatgttatttttattgaattctgaaccggtttgagtagattagagtacaaaaaattgaaaattttgaaatcatgtttcccactcccttctcccaggggtcatgtttcctcccgggtattattttgtaaaaagtctttttttccccaataaacttttcataccccatttttcgcaccgtgaatgttatttttattgaattctgaaccggtttgagtagattagactacaaaaaattgaaaatttcgaaatcatgtttcccactcccttctcccaggggtattattttgtaaagtctttttttccccaataaacttttcataccccattttcgcaccgtgaatgttatttttattgaattctgaaccggtttgagtagattagactacaaaaaattgaaaatttcgaaatcatgtttcccactcccttctcccaggggtcatgtttcccactcccttctcc

SEQ ID NO: 44850 - DNA, 919 bp, Heterodera glycines
aaagtggaattacagaattgcgacggcaaatcctatatctccacgacgctttcattataaagctttaagggaggaaaagcaatacgaatatttcaatttcttacttatccgaatagacaaagataggttacacacgaacatttttatagaaattccggctgaaactaaaatccctcttttggtcttaacctatgatttttggcccattatggatgaattaagtatagaaggcgtcgcagaaatacattcatattttctaaattcgggtttcagaaaattaagatttaaaagaggctaaattacagatgcttttcaaattttgggtgtatacgaatagaaagaagttggaaatcagtacttttcacgcctataaaattcgggccgaaaaatattggtgtttgtgactagaaaaatagcagatgcatatcaaatgactacagaaaattacagcctccaagaaaataattgctttgcacaagcaatattttgtagagcccatcaaacacattgtgcttataggaaaggcagaattaaacaataggggcctttttattatgattacaacaaatcagcatggcgtctcgctgatatggtatgtttcagttaaggtttagccgatctacaaatttcggcactgtctattttgtaaaagcgaatcaaattcctttggattccaaagtggaattacagaattgcgacggcaaatcctaaatagacacgacgctttcattataaagctttaagggaggaaaagtaatacgaatatttcaatttcttacttatccgaatagacaaagataggttacacacgaacatttttatagaaattccggctgaaactaaaatccctcttttggtcttaacctatgatttttggacacattatggatgaattaagtatagaaggcgtcgcagaaat

SEQ ID NO: 44851 - DNA, 441 bp, Heterodera glycines
tactaatttttagcgaaaaatcgacctaaaaagcgaaattttcgctttttgcttatttttgacataaatttaaggttaaaatttattcattattatcgggaaattttaatcattcataatctgatttcgttaacatgaaaaatattcgtaatctaatcgggaaaaagcaatggatttgggcagtagggaattggcattaattggaattattagccaaattttccaattagcttaaaataaaaagcagcgaaatcgaattaaggaaacaccggccgatgcatgggcaatttacggtaagaataacttcccgccagactatggtgcggaccaaaaggggtgcagctgttggccaaagatgggccgcgatttggccaaaatttggaaggtgccgccccgttcagagcaaccggcgactgtcacgcttggccaaatgccggtaaa

SEQ ID NO: 44852 - DNA, 888 bp, Heterodera glycines
gagtccttttcctcttcatcctccgacctttctttcttcctactttttttcctcaccgcacgccgcccacacagcggggggtcccctcttctttctcttccctcccattcttcttccggtcttcctcctcccactcttcttccactttcctcttctttctcttcccaccccattcttcttccgctcttcctcctcccactcttcttccgctttcctcttctttctcttcccaccccattcttcttccgctcttcctcctcccactcttcttccgctttcctcttctttctcttcccaccccattcttcttccgctcttcctcctcccactcttcttccgctttcctcttctttctcttccctcccattcttcttccgttcttcctcctcccactcttcttccgctttcctcttctttctcttcccaccccattcttcttccgctcttcctcctcccactcttcttccgctttcctcttctttctcttcccaccccattcttcttccgctcttcctcctcccactcttcttccactttcctcttctttctctttccaccccattcttcttccgctcttcctcctcccactcttcttccgctttcctcttctttctcttcccaccccattcttcttccgctcttcctcctcccaccttcctttcttcctactcttcttcctctcctctctgctcccactcttcttcctctttcctcttctttctcttccctcccattcttcttcctctcttccttcctcctcctccatctctaatcatcccggtccgtctctgcgtctgcgtccacattttgctgctcgttgtcctctgtgtcgtcccatccttcaaacactttcatgcgccggtcgatgatcggatacaaagtccgatc

SEQ ID NO: 44853 - DNA, 1140 bp, Heterodera glycines
  unsure (1)..(1140): unsure at all n locations
ttatataaaattgtgaaataaaaattttatataattaagatttgctggatttttcttttttttttnaaaaggttaattaatgcaaaaatctaaaaaagcgcttaaaaaattttaagctaaaaaagaaaatatctaaataaactttcagaacaaataaatgttgaaagtttatttgatagacgacaagaataaattcttagcattcgtcgtttttcaaggtctgtctgttctaaattttttaagtgcaattttctcattattttttttgattattttttttttttgcaacaaattaaataactcgccaaatttttcaccaattagcggcttgctttatgctgctgctgctcccacctataattaaattatgtaattaatttcgtttggtcaaaacatttctgcccaataaaaatgatggaaggcgagtggaaatggtacgaaagtgcgccaaggttacccgcgctctgctgttggcggtgtgtggcgccaattcaaaatttattttgtgtatccgtttaaccgtaaattttcgcttcattttcacccaaggtcatttttgatcggaaattaaacgatttttgaagagtttggcggcccaaaacctgtgtctatttaaatggtcattaatttgttgttaatacaaactacatcagcagtccatttattttttatgctcacattttgattattttgtcataaataaaattatttttatttttaaattttaaatgaaaaatataaattttctaaaaattatttttaataatatttacatttgaaacttgaaatttggcaggaataaacacaaatttctccaaaaagaatatatttttttaattcttagcaaattcattttattaaatttttaatcaaaaatttttaggtaaaaatgaaaatcgttgtatttttgatttttctcgcaaattcgctaattgatggccgctgtttactggactcaaaagacatttttgaatataagctaaggcaagagaattttctgacaaacgaagctgttaacaacaatgcacaaccactgcctatttattacgatggcattccaatagtnaattaattcgagaaacttncatttaattggattaattagctaattaggcacccgaattttgatgatgacgtacg

SEQ ID NO: 44854 - DNA, 1490 bp, Heterodera glycines
ttttaaatcattgccatcctttacgaatgcttttgcatttttcctcagcttaatgaacaacgataaatcccttatcatcgtcgcttatatcagtgcgaatcttggccaatttgttacacacgttttcttgaaatgaaaatttgtctttaatatcattccaaatttccaacagatcattttcaataataagagtattgaaatcggtgtgtatttcttcaatccatttttgaatgtgatgacttttattggcaccttccccaatatttccaaaaaaaatattggcattatccaatgaattgaaaaatgtcatataatttgaattttctcctgctttttgaaacaactgctttatttcatttgctacatttaataaagcattgaagtttgctgtcaatttgtctttcgaatcttaaaaaattcatcaattccgacaaaaatttctatgaaattcctgtttttttttgttgttgttagaaatgaatacaaaaacgaaattaatttttttcttttcatataaattaaaaaaatatatatttaaatatttttaaacacccaaaaaataatagaagtttcatcataaaatttatacaaattatttaggtaaaaagacaatgaaaatggttggcaattgatgaaaaggcccccgtttcccggttttcgtaacgggtgttggacttgacttttcaaaagccggtaaccaataccggagtcatttcgaaaatcggaattccgaggcccaaaaaagcaaaaagaaatcgtaaatccgatgctaatgatacattgatgaaattttggaaaaattcgaacgaagattctattaaaaaattattttgattcattatagttgaaaaagtcaaatattagaaaatgaatagattttttaaattcatatcttagtttgacgatgaattgtttcactttgtgaagtgaattttcttgaagtgttttcgggcttaaataccaatcattcacaaaaaatttcaatctgtgccttgtatttcgtactggtcattaggcaatttcataatactgcacaaactatggaaattattcttttttaatatttttatgaatttccattcttctgatctttgtgatttgacattttgtactttgtattttaaatttttattaaatatttttatgattttgattcttctgatcagtattttttgcctgatttttatagttactgatctgtagttagtttgctcgtactggtgaattaattatatttatggcacacttcataaaaaaaactgaaacaattccctgccaaacccaaatcttactcaccaaaaaatgattgtctcaccgattatcctttttctaagcgacattctgtgcttaccgtatattgtggaaacggtaaaaaataatcaagagaaaacaataaataaaatttaaaaaattctgtagtatggaaacgatcctaaggctgtgttcgaagcgtacatcgtcaaagctgtatttttgaaaaaatccgcaaa

SEQ ID NO: 44855 - DNA, 664 bp, Heterodera glycines
  unsure (1)..(664): unsure at all n locations
cagccaaaatgacacttgcgccgccgacatttgcgccgccctctccccccaattttaattatttaaagcataattttctcaatttattttaatgtttaaacacaccgtttcaattttggcctcccagttcaaaaaagatttgcatgtgtggctcagtggtttttgtaagatagtaaagggacaaagggtggtggttcgagcccgttgtgcaacatgaatattttcatttatttttgtccaaaatattaaaaaatcacgatatttggtaattatttttgaaggtttttaccaaccaaattggataatcttggtatcattcgaaagctcttgatgaggagaagcgttttctaagcaaatgctaagcaatttgacatctcagaaaagagtagtgagagtttcaaattttcataatggtttcatgcaaaaacgggatgtttaactcaaaaaagtatttgatacgttctatgcagaatttttttctctatcgatatacaaaatttgaagcggatttaacgtcagggaaaaaagttaaacgtcacgaagtgaattcagtttttctctattaacagagataaagaaatagtacgccaaaaagagagatgtttttttctctgcgctctctctttattggttcatcggaggttttttgaaacggntgtgtaaa

SEQ ID NO: 44856 - DNA, 1233 bp, Heterodera glycines
agactttttttcaacatttttgacctgtccattgtcagtccaacagcagctccaaacttcactgatgttctaagaaaatgtaaagctaaagggcgattatctgtttattgttgctgattttaccgttattccaccgaattgagatgaatgggcacgccattgaaaatcgggtggatgaaaaccatccaaagcaaaacggaggacaaaaagctaaaaagacagaaataataaatgtataatatttacaatattttataaaaacctttttttcataggaaaatttctcaaatttttttggatctttagaaaggattcaggcatcaaaagtttaaagataaataaataattttatacattgcccaaattgtcagaacatagcagtcgcccatccgaattcactgcacaatctaacatcattccaccggataaagtcgtggaaaaaggcagaaatgtagccgaatcatcggcaatctagaataaaaaatcataaaaaaatagtggtccactcaccgaatcaaagtggtcagtcgtaaaaagagcaagtcgtccatcggtaagtgtagcaactgctgctgaattatctaaatatttttttcacattaaattgtataccatactgtacataaacgttaacggttaccattaacttcactcgtaagaagaggagtaattgcatttgttggcacttttacaagccgaaaaacgccactgggaaggcgaatgtaccgctcaatgggtaacaaatccgttgggtcgataatgcaaatgccaccacacctaacataacgaacaaaggccgacaataaatttagacactcaaggtcatcaaccccacaaaaacccgagtttaagaaatttttattgtactttggattatgcacctttcacttccactcttcttatcgccaattggcgcttcatccgtcgccaattcgtaagtaccaattactaatcgttgtctttgttctcttttgctgttttgtctaaggcaacagctaaggacagaagccgctttcatgggcaacttttttgtataagtttgccttacacaatatttcattgttggtgaaaaagagagtgaatatctatatatttttgtttgtttatttagattttttcaaaaatattctttatgaattatttgaagtgttttttggcacttccaaaagattttttcgactttaattttgctattttttcctatttttctcgtcgcatacgaactaaaaatga

SEQ ID NO: 44857 - DNA, 1562 bp, Heterodera glycines
ttggtcaaattggcacttatttcgacgaacgcgatataaacttggccatagtgaaggaaaaattgcactttttgagggatccgctcaaacagctcactgccattctcatcggagtggtcggtcacttttcagtcttttttttatcggtgttatgttcttcacttttagattgattttaccgaatcaataagtgaaaatcgtttggtcatctgcagaggtgtcgatcccgagctggacaaaagtattaccatttttgtatattcttaagaccgtgacgccccaaaaaatgcacaaattattccattcgattttaataagcctggtacagtggaaatggtctttcattttacacagaaaaacaattgtacgaaaaattgccggaagatttaacatcggtggcacttttggaggcggaggacatttccatcgaaagttgttccgttgcttacgttccgatcatcggatatttgcttatggtggcggaaagtacgcaaattccaacggacacaaaagcgctcgtggaaattgtaaaaaagcgcaaataaaaatgtttggagtatagaaatttaaaatccatcccttcacagattttttcttccgagggaatgtcctattacaaaacgaatcgaatgcgtttgttggatgagaacattggtgacattaaaatgcaaattgtggacgcggaaacgaacattgtgcttaagtgggtcaattaaaatgcaaaattgtctaaattcttcttcgttttcagtttacaaaaacgtattttggacagcaaagaggcggtgctcagtgccgtcgaattggccgccactttggactgtctaatctcactgttcgttttctcgcatttcttttttaaatttcaatttcagttccgttgttgcccggaaatacaattggacacggcccaaatttgtggaggagtcaattgtggccattgagcaggcccggcatccaattgctgaacacatttgcaaggatggaaaatatgtgcccaacccagtgcagtgagtgatgcactttttcaccaattcgcttcaattttttatttcttcagtagttccaccgaagtcggcaaagtcaaagtgctttcggggccaaatgcatcgggcaaaagcatttacttgaaaatggtgccatttcgtctgcttttgtctccactttttttgttttgcttaggtcggctccatcgtctatttggcttgttgcggttcctttgtacccgcccaacgtgccaccattggtccgatcagccgcattttgtcccgtctttacaccattgactcggtgttggacggaatgtcttcgtttgccaacgatcttaaacaagtactgtaaactgtttcattttctcgcaccttttgctatcgcttttttgctcttttttcgatgtcacgtgccatcgccaaaagtgacgaagattcgttgctgatcatcgacgagttcggcaaggtgacaatgacggtatttttacatccattcaaatgccgtttgactacatgcccttttcctcttttgtaggaggttggtctcgctctgttggcctcctgtttgaacta

SEQ ID NO: 44858 - DNA, 1727 bp, Heterodera glycines
taggaagtgaaagcagttcaaaattttaaacaatgatgactatagggagggaacccacttgcaaaacagaacccccaactaaagatattctgctgaattcaagaaacaacgtacccaaatgcaattgcagccaaactggctatctgaaggccagcgatacacatccatttagagccaatcacatgcatctgaattttgttttcaattagtaaaatggcaaaaaaatcaaaaaaaaatgtttacgtatttgccaagaagaggtgcagaaatgaacatcaccaattggaacaaaccgaagaccaacccgatttgagcctctgacattctgaagccccgtaattgttagctttttgcatgtgaattcaaaagtgaccctcttcgtttagcttcgcccgggtaaattggtcctatgcaactgaccaccacagtgctgcacagattcgaaattgccaacataacaatggcgaccaattgtcggttggtcagttccttgaacatggtcattttaatgctttatgaaaatattaattggaaaattaggatggcttttcattttgtattaattggaaaattaggatggcttttcattttgtattaattggaaaattaggatggcttttcattttgtctgttttgcttttctggtgttgtatattttaaactaatttaagctatgtaactggggttggggtaatattattaaccgcaaatgtgatttatttctaatggttttcggagtcgctgaacataaatctgatattttttgtaccaatttcgaatcccgggacatgaatttaggtattttcttgttttttctaaaataaaaaaccgacccgaccaacgtaaatcaaacaaatgctgaaacaatttattcacttatgttcaattcatattttgattaataccataaattggcaacacatgatgaacaatgattaagatgaggcacacaatgggaaaagtagaaaaatacataatttgtgggacagatgggggaaaagaacgaaaagtgtttgtttgacccactgacgacggacagaacgtaaatattaaaggcacaaccatcaaaaaataatcgaaaattgtagagaaaattgggaacactaagaaatggcacaaccgtttgttgaatttggctaaatttgtaagaaaggatttgctataattcgtgcccaatttgcatccaccaaaaatgcccaatttttacaattccgtcctttcaattgcttttcctatataatcttattgcttttttcccgttattctaactcttccgattttgagctgataagcttcagaatggctgccattcgttctgagggtgacaaatcctttctgctggagaatttctgcgccaatttggacgcttccgtttgtccacaattttccatttcattttcactttcactcgtcgaaaggtattcgaacggcgccggaggcaaatgttttttcgtcatcggtaaaaatctgaaaaaaatgttggaaattttgctttgaaaataacaatttcttggtccgttatattgagtgccaaaaatttaaatttggttgcattttttcaaaaatctttccaaatttattggcctgcccccccccccctcggtccctgtgggactgtgccgtccgttggtctcgacattggtcaaacaaaatcccgatttgcttttccttttcaaactcacattagaaggcttcgctcggtttgctccgtttcccctccctttcgg

SEQ ID NO: 44859 - DNA, 895 bp, Heterodera glycines
cgaatccttcgggagtagcttccctatagcctgtacttttttctgcgttggatttttgctccccataattgtttgagtaccccaaacggacacttgaaaaaatcgatttttttgttttcggggcagtccccctgaaccgatgcgcccagatttatggggagaccgaatccttcgggagtagcttccctatagcctgtacttaattctgcgttggatttttgctccccataattgtttgagtaccccaaacggacacttgaaaaaatcgatttttttgttttcggggcagtccccccgaaccgatgcgcccagatttatggggagaccgaatccttcgggagtagcttccctatagcctgtactttaattctgcgttggatttttgctccccataattgtttgagtaccccaaacggacacttgaaaaaatcgatttttttgttttcggggcagtccccccgaaccgatgcgcccagatttatggggagaccgaatccttccggaatagcttccctatagcctgtactttaattctgcgttggatttttgctccccataattgtttgagtaccccaaacggacacttgaaaaaatcgatttttttgttttcggggcagtccccccgaaccgatgcgcccagatttatggggagaccgaatccttccggaatagcttccctatagcctgtactttaattctgcgttggatttttgctccccataattgtttgagtaccccaaacggacacttgaaaaaatcgattttttttgttttcggggaggtcccccccgaaaccgatgcgcccagatttatggggagaccgaatcctttcgggaatagctttccctatagtctgtactttaattctggggtgggatttttgctccccctaaat

SEQ ID NO: 44860 - DNA, 1354 bp, Heterodera glycines
aacattttacataaaagcattttacccaaattctctcgtcaaatgtccgccgctttgaacatcgctttattgtccgatcgtttggactgcgttagcatcgaaagggacgcctttgaaggcgccgctgccgctgcaagcgactcggacgtggagaaaagtgacgagggcattgaggaggagcggtgcacgaagcagcagcgacgcacactcgtgttggacggaaactcactgcaggcgcaagacttggtggactgcatgcatgacaaatgcaagctgcaggtcagaagcaggacaaaaaagaaataattaggcaattaaagtttcaaatggcaattaaaataggaaaataaaataaataaagataattattagaaacaaatgaatattaattaaataaattaaaggaactaaagaaaaaatggtttaatgaaaataggtaagtgtagaatttaattaattcaattttcttatttaattagttggctgagtcttcgcgccagcgtatccgtgaagcgcgtatatttctcgagaaagttgctgccgagcaccgaggtcagctgattaactcgttaatgtttaccaattacctttttccttttaaagttgtctatggcataaccaccggtttcggcacattttcaaacgttgtaattccgccagaagagttaaagtaaaagcggagaaagaatgaatgtatttttgttaaaagaaattcatttttattattatgtgttcaaaattcaaatgtaaatgaatgccatttatccgtctccccctaaggcaattgcaactgaatctgatccgatcccacgccactggccatggctcgccgttggagccggccaaagctcgaatgcttctcgcgttgcgcataaatgtgttggccaaagggtacagcggaatttcgctgggaaatgtggacaaattggtgaacgcatttaatggtaatgagagaaaacaattggaaaaatgtttaagcgactcttttttaattatctttttcagaattttcctcacacaaaaaaaaacctttttttaattgctttaattatttttttgaaatgcctctgtctgtctgtccatttgctcaattgcccccattagccttctgtgtgtcctatgtgcccgagcagggcaccgtcggctgcagcggcgatttgtgtccgttggcccatttggcgctgggtctgatcggcgagggccaaatgtggtcaccgcgtaccggctggaccgatgccagcgatgtgttggcagtgaacgggttggaaccgatggcactcggctacaaggagggattggcactgatcaacggcactcagttggtctccgccttgggggcattgggtaattataa

SEQ ID NO: 44861 - DNA, 842 bp, Heterodera glycines
aacaccgtattagtgctttgctgtgccgagaccctccccaagggatagctttaaatctgcaagaaattagattgccttaagtggttgtaaaaaacttttgggtaatgaattattttttgaagtgagtcaaacaccctattagtgctttgctgtgccgagaaccggtaggcaatggatggctttcaatctgcaagaaattagattggcaatatgtggttgtaaaaaacttttgggtaatgaattattttttgaagtgagtcaaacaccgtattagtgctttgctgtgccgagaaccggcaggcaatggatagctttaaatctgcaagaaattagattggcaataagtggttgtaaaaaacttttgggtaatgaattattttttgaagtgagtcaaacaccctattagtgctttgctgtgccgagaaccggcaggcaatggatggctttcaatctgcaagaaattagattggcaatatgtggttgtaaaaaacttttgggtaatgaattattttttgaagtgagtcaaacaccgtattagtgctttgctgtgccgagaaccggcaggcaatggatagctttaaatctgcaagaaattagattggcaataagtggttgtaaaaaacttttgggtaatgaattattttttgaagtgagtcaaacaccctattagtgctttgctgtgccgagaaccggcaggcaatggctttatatctgccagaaattaaatagacaataagtgggtgtaaaaaacttgtgtatggaattattttttgtagtgagtcagacaccctattagtgctttgctgtgccgagaaccggcaggcaatggatagctttaaatc

SEQ ID NO: 44862 - DNA, 963 bp, Heterodera glycines
caccccaccaaaagcaaaacgatataaccaaaatataagggaaaaattttttctccatcttcctttttgatactaaagcatcagagtgctaaaattaagttgtaaataaaattttggtgcactttagagcactttctgaaaaaaatatttatgaaacaaaaaaatcgattttttcaagtgtccgtttggggtactcaaacatttatggggagcaaaaatccaacgcagaattaaagtacaggctatagggaagctattcccgagggattcggtctccccataaatctgggcgcatcggttcggggggaatgccccgaaaacaaaaaatcgattttttcaagtgtccgtttggggtactcaaacaattatggggagcaaaaatccaacgcagaattaaagtacaggctatagggaagctattcccgaaggattcggtctccccataaatctgggcgcatcggttcggggggactgccccgaaaacaaaaaaatcgattttttcaagtgtccgtttggggtactcaaacaattatggggagcaaaaatccaaagcagaattaaagtacaggctatagggaagctattcccgaaggattcggcctccccataaatctgggcgcatcggttcggggggactgccccgaaaacaaaaaaatcgattttttcaagtgtccgtttggggtactcaaacaattattaaaaatttttagatttttattcatctccctttttgatagtgaaagcatctgagtgcctaaaataacttgtaaataaaatttggtgcgtttcagagcagtttgtgaaaaaatatttatgaattaattttgctaaaaaataaaatagtgaagctttaaaattaataaaaattttaattcagaatactggagtagcatcatagcagtgctttccctgtcttttgatgcctcgcaaaatctgttcgcttctgatcagttataaaaaaaa

SEQ ID NO: 44863 - DNA, 592 bp, Heterodera glycines
  unsure (1)..(592): unsure at all n locations
tttttgagctttttagtcatatttcgtgcttttttcgtccatattttatgttctatttgacgctttttagtccatataatttacaaccctagttatcataaattctctaacaattttgaatattcaatgactaattaaatagctcatcttgagtattattaataaagcattaaattactattttcgcttttagagattattttaatttcataaatttgttttatttttttttgttataaatgccttaaaaatcatttttatagtgatttgctgacttttttaaataaaaaataatcgcaaaaatatgaaaaaaaaatttgtacgttgatttgtacaacaattaaaattttattctatagctaattgtcggaattaaaaattcttttaattatttccttttcagttgctcgcccgtcgtcggcatttgatggatcggatggcacagcgccgggagcgtctcaaggagtcctaccgcctgcacagctttgaccgcgactgtgacgaaatgctaggatggatccaggtgaagctgaagacagctaaagaccaggtcaaaaaatttattanaaaatgatcaaaattttctggtcac

SEQ ID NO: 44864 - DNA, 1144 bp, Heterodera glycines
  unsure (1)..(1144): unsure at all n locations
ctgcannggtcatccgcaaaaaaataataaattttaaaaaaattgctataaaaaaaatttatttntggaagtaaacttgggacacantttttgttgcctaaaacaagtattcggtagagaattatttgaaaatatttaaatcctagcctaaataaaataaatagaaaattctcttttttctcaccctccaaacgggaatttttttcagcttatgttcccccgttttatgcgcaacagtgttttgaagaacagttggagtagaatttgttgcagacgcttcaaaatgaataatttccattaattaatagttaattacaataattaattaattgccttttttcgctggtgtcgacatttttcctgtatgcaaattggccattttgttgcttgaacgctgaagttcactttgaattttcgctatttccttgtcaagttcagcaacatgtttcacgcagctgaaaaatttaaacaaaccaattaaaatagcgaaaaatttaaataaattttaattttttgggcctttcatacgattcaatgattcaaattaatgaaaatatttatcgctaaaaattttttaatttagagaggggtcaatttcaaatttcgcacggggcctaatttcgtaaaaattttcgtgaaaaaactgaaaaagcactggtaaagagagggaaaattttttaattaaaaaaacataacgtcatttaaaaaaaaattataaaattgaattgcattcggaaaaaatttacgaaatgataattaaaaattgaaaaaaacccactcatttactgccatctgtttctgcttcttctttttgttcctctcctcctcctcctctttctccttcttcttcttttccatttcttccaattcttctttttgcttttggtgcttccgtttctcatcgaccaatgctttgattacggtattacgtttttccttctgtaatgaggggaaaaacaaaaaattgatcaaaattgcaaaaattggtcatttttaatgaaaatctgtaataaatcagaacgaatttcaaaaaaagaaaaattctcagcgacttttggaaaatttttttttgaaaaaaatactgaaaaaagtttcagggaggaacgacgggagcgatgtgctccgccgattctttgcatagaat

SEQ ID NO: 44865 - DNA, 929 bp, Heterodera glycines
  unsure (1)..(929): unsure at all n locations
tttttattagattttatctttaatgctttaaaatgcgcactacggaggtacgccacagaaatttaacaaattttgaaatgttcagttccattcggtgtgctaacaatggaagaagagtacggcatttaccaatacaattctcagccacatttgtatcttcgtgtgcccgacgagctgttgtactcgttgaaattcccgagccatggacgaatttttgattggaacacggccaagggcaaccgaagggggacacttgcgttggaaattgaaaaattgtcggaatttgccggggaaaaagtggggagtcgccgattaagtgatgcagtgcatataaatggagtttcatggcaaattgaagcacaaataaaacagaacagtgaaggcagtacaaactatttgggcttttacctttggtatgatgcttcaaacgaaggtacaaaagttaaatgctcattaatagggcttcttctcaaatatatgcactttttcctggatgggaacagcctaaaacgctgaaaagcatctttttagcttgttttgaagtcgctgtatcatatttcatattgatatatttgtgcatataaaattttaccctcagtttggaaaatttatgcgcatattttgcgaaattttgatgcatatttttagaagccctccctattcattaaaatagagttgtacgggaccggggcgggaattcccgtcttctgaggtcccggattttcaaaatctatttcatggtcccgatcccgatagggcaaacgggaaccgggaaaacaagcataaaacttccagttctgcaaatgtcctagtggctaattatttaatattttcacttngaataaattattttttaaattttttgtttttttttgaaatttcccgtttggtactggttccccggtcccggacaaaaaccgaggtcccgg

SEQ ID NO: 44866 - DNA, 943 bp, Heterodera glycines
cagattatttaatgttatttttagttattaagtggaaaactgttaacaaattagccaaaaaaaaagatttgatttgtgaacaattattttgacaaaaaagtataagtttccaaggtgtgaaagggttcgacttccaattcccaatttctttgcaatatttcgtcgctaattggtggatttttttttcgttactaaatttttcttcgtttgtcctagttggaattttatttgtgctaaaaatttaaaaattgcgcatttcagaattttcattttgttgaattttcatattcatcaaaacgatcgtattttgccgaattcattttataagcagtcaaaattaaatattaaaattcatttttgcaattttataaaaaaaagattaaaataaaaacatttttttccaaattggccatggccataaaaatgttttgcggtctcttattaattcacctgctgaccattcaatgatcggagcgctgaaaatggagtttaactaaaatcgaaatatgactaggcttttgatcagaccaacatccaaaatcccgctcatttgattgaaaatttccgagaatcgagaagcaacatagccataaattttcccaatctgagtctggagactttcgcaaattcctattgagattcaggaaaaccctgaaagtaattactagatgaaagtatcaaggatgctttaatttcaaaaaaaaaatcatgacaaaaattgcgcgaaattaaagtctataacaattacataaactgcgttaaaattttttatttaaaattataatttaaaaaaattctaaatttgctaaaatatttagaaaatattgaaaactattaaaatattaaaacaaatatttcatcaaaaattcaaaaaaaaattttttaattgacaaatactgacgaaaaaaattctcttttttgtaagtgtatttttaaaaattgc

SEQ ID NO: 44867 - DNA, 1157 bp, Heterodera glycines
ggggggggggggggggaaaaatgttttcaaaatttttttttttttttttttttttttttttttttccaaacccgtttccaaaatcaaaaaaaaaaaaccttcccgggggaaaaaaatggggtttgaaagtttttttgggaaaaaaaacctttaaaaaaaaatcccccgggggagaggggaggggggacccatgttttaaaattttcatttttttttattttattttcctcaaacgggttcagaatcaaataaaatacctttccggggggaaaaaggggttagaaaagttatggggaaaaaaagctttacaaaataaccccctgggagaggggaggggaaacatgatttcaaaatttcaattttttttagtttattctactcaaaacggctcagaatcaaataaaaataccattcacggtggaaaaaaggggtttggaaaattttttggggaaaaaaaactttacaaaataatacccctgggagaagggagtgggaaacatgatttcaaaattttcaattttttttagttttattttctcaaaacggttcagaattcaataaaaattacattcccggtgcgaaaaatggggtttgacaagtttattggggaaaaaagactttacaaaataatacccctgggagaagggagtgggaaacatgatttcaaaattttcaattttttctagtctaatctactcaaaccggttcagaattcaataaaaataacattcacggtgcgaaaaatggggtttgacaagtttattggggaaaaaagactttacaaaataatacccctgggagaagggagtgggaaacatgatttcaaaattttcaattttttatagtctaatctactcaaaacggttcagaattcaataaaaataacattcacggtgcgaaaaatggggtttgacaagtttattggggaaaaaaagactttacaaaataatacccctgggagaagggagtgggaaacatgatttcaaaattttcaattttttctagtctaatctactcaaaccggttcagaattcaataaaaataacattcacggtgcgaaaaatggggtttgaaaagtttattgggaaaaaaagactttacaaaataatacccctgggagaagggagtgggaaacatgatttaaaaattttcaattt

SEQ ID NO: 44868 - DNA, 1405 bp, Heterodera glycines
  unsure (1)..(1405): unsure at all n locations
tgtccgtgtttntatgtccatattttgggtttcccataaacctctattagaatggcccccatcagttaaattgcgcttctgactactcctgatgatcagaaattttccgaaaaatcattttgaaaatttttagtttaaaataaacttacttaaaaataggtaaatttgtttgaaaaatatgcaaaaaaaaaagagaggaaaatttcggctttttgatccttttcagagctttttttccttataaacgacttttatacggtattcagccattttacatgaatttgaaggaattttggaaaatttacctctcaattcggaaaatttatgttcaatttttgcaatattatgtctatatttcgcgatttttggtcctaaccaacataattcccaaccctaaatagcatacttaaaaacgcataaaaatacttaatattgatattaaaattaataatttaattttcagtaatgcgaaatttgcgtgttccaattttacttgtgctattgagcccagtgattattttcatattaaaatttttattgcatgaaaatatgccgacaaaaataacaattaaccctgttgcgggaaattttatgcaacgaaggattttgttttttgatagtgacgtaaacaccccaaagttgctgcttggaatgaacacccaagtaaaaatctgaatatttgagtcgaatcataacacatatttcttggcacaaaaaattataaaattaagccattgccaacaaaaagtcactttggcatatttaatgaggattgggacagaatttgtggaagtgatggccagcagcaatgtgtgagaaagtttgatggcaaattccagcgcaatgttgtgtgtttttgttataaaaaataattatgcattgttaaattataacttaaattaaattaattaaatatattttatattcacttttagtttattccgtcgcttaaattggccggctgtttaattgcaaaaaattcaaatgttttcttggagtcgttgttttgctacttaacaaacatgaacaaaattaacacgacaaatatcgattacgaacttttcaatttgtttgtttttaactatttataattaaacgtgacttagagagaatggcattatttttttttaattttagaccgagaattagaatgatgttttgttatgttgagtcaccgtattatgctgaattgccaatggaagaggtattttgatttgaatttgttcttttggcgttgtgtctgtctctgtcgtttccccttcagattgtgaacaatgtttcaatgacaaaagacctgaccaatgaattacagctttggaaaatggtcgcattagtgcgtgaccccaattgagcgatttatttctggttttcttaaaagagtttccagtaatcttttggaccattt

SEQ ID NO: 44869 - DNA, 973 bp, Heterodera glycines
agcacgccgtgattcagcgaagcccaactcggacaagaggcaccgcaatcggcgcaaacagtgccagaaaattccatgggaaaggcactttaagaagagggatggaaaacatcagtacaatttttacgaataaaatcccgggtctcttcaatgtcacgaacgatatttatattttgaacgctgaacccacatcaaaaaattaaagcgagaaaagacgggaccagagaccgacactttgggtggtccattcatttgtttagtttgaccattcataacgacaagataaattgatattttttccgcgttaattcaaaaaaaaaaaatcgcttctttccaaccaaactgaacgtaactcgtgaaattgctaaataatttgacctataggaaacaaaagccttgtaaagggaaagatgaaatgtgttcagttttgcactttaattcataaatacagtacataagtttggttgcttttccaatacaccaaaatgtgttaactattatgcctccgcctcgggtgggcatcgaacccacgcctttcacaaacagagcaaaaatgttataatatgcgtataaaatggcaaatggctcttatcactaacgaatttgggtgataatctgttcgataactttctttttgctgtctcttccgccgctgattactttcgcttgcttttcttttgtcatttgctttattaattcacaatgtactcattccatgcttattttcccattttattatttctgctggtttttcttgccacttttgcgctgccaattggcgcgtacaaagtgctgatattcagccaaactttcaccagaagtcacgtgatgctcaatgcgcgagtggcacagactttggcggtggatgggcacaacgtggtaaaagagaagcgcaccacggcacagagccactggcagaagcggaaacgttcagaccatcgtcgaggtgtagttcattgagccgttggccaac

SEQ ID NO: 44870 - DNA, 1130 bp, Heterodera glycines
  unsure (1)..(1130): unsure at all n locations
tgattttatttaccatttttcaaatttttctatcaccacatcctaatccaaaattattttataaaaaattagaaaatgaaaaatagaatattctttttttatttcttggtacctttttcttcactagcctctgtgttctattgaaatcataaaactttaaatatataaattatatatttcgtgccaatttaagattatcaggcttatgtccttgaaaccgcgttcatctgtccttggagagaatacatttatttctctaatccgtggcccttggccactaaattatgtcccatccaatccgatcatttgtccggtggacatttgctaatcagctcaatttcactttgcttggcccacccgccttgtccactaaaccaactcctgctgatcactgcgtttgttgttcagtacttcagtgagatccgtcgacagctgtctcgatcagtgatcggccaatgggtggccaattggccagcaggcggactgatcaaaaattggccatcattgcctcgggcacacaaactctgtccgcccgtcaattcccctggggggtcatcggtgcttttggggggatttttccggcgactcttttgagaagccaaaaaagcaattcaatttgttcaatttcgttaacaaagtatagcctgctgctgtggccatatcattaatcttttactaaaataatattttttataataaatgaattaaaatttcgaaattatttccgtaaaatattcaggggattttctttcgttgctagcagatgccaattgcaatgtaccagcctttttggattaattttggctcaatttattttatatgtgccgctcgggctgcgaccgaataaatgcatactaatcctatcccaatgaaattgatccccggccaaatcctcgccggtcccattaaaattgattctcttccctgtgaagactaaatcatttggccaatggctaagtgattccaacaaaacatttaaccaaataaaatgggttaatatgtggccaatgttctgtccgtcttagacaaaaccatttgaagcgtcaaaaggaactcagcaaaattcaattctctcctggtactgacaggttttagagcccgntttgctttttccctgaccccatgatgtt

SEQ ID NO: 44871 - DNA, 989 bp, Heterodera glycines
tttggagcgtaattacgattttacttacaccattttttctaggcttagatcacatgcgattttcggcactctgataattttagcgctcataatgggatgtataaaggcgattgtagaaggaattggaagcgctaaaattgtttgagaagctttttgagcgtaattacgatttttacttagaccattttttctaggcttagatcacatgcgattttcggcactctgataattttagcgctcataatgggatgtataaaggcgattgtagaaggaattggaagcgctaaaattgtttgagaagctttttgagcgtaattacgatttttacttagaccattttttctaggcttagatcacatgcgattttcggcactctgataattttagcgctcataatgggatgtataaaggcgattgtagaaggaattggaagcgctaaaattgtttgagaagctttttgagcgtaattacgatttttacttacaccattttttctaggcttagatcacatgcgattttcggcactctgataattttagcgttcataatgggatgtataaaggcgattgtagaaggaattggaagcgctaaaattgtttgagaagctttttgagcgtaattacgatttttacttagaccatttttttctaggcttagatcacatgcgattttcggcactctgataattttagcgttcataatgggatgtataaaggcgattgtagaaggaattggaagcgctaaaattgtttgaggagctttttgagcgtaattacgattttacttacaccattttttgctaggcttagatcacatgcgattttcggcactctgataattttagcgttcataatgggatgtataaaggcgattgtagaaggaattggaagcgctaaaattgtttgagaagctttttgagcgtaattacgatttttacttagaccattttttctaggcttagatcacatgcgattttcggcactctgata

SEQ ID NO: 44872 - DNA, 903 bp, Heterodera glycines
tttcctaaatctgccattaaaaaatataggactaatttattatttattccaatcatgtgcataatatggtttttaactttcaaaaaagttaaattgtaaattataataatctattattttaaaagattacagttgatcgttgcacctagaagaacagtgaaggaattaaacatttgctttttaaatataatttcataaaattggaattaataaataaattagtcccatatttacatctcataagcatacctacctgctgatggcagatttaggaaacggtcataggtggcgcactttaggaaatgtcctaacacccataatatataatagtggtaacagaagtattttgaaaaaatgcatcagctaaaaggcacaaaatggacttaaaaattgaaaatcattttttaaagttctccgcgaacattgtcttgaacttgtgccaactgcaaccgaacaaagcatggaaaatggacaccacaaaaattcagcggccattttgaagagaggcggccaacagaaaaacaaacgcatcccatgggaattggtcgcggctgccgaagtgccgcctcattctgagcaacgatcggcaggtgggagccataattaggcccaggtccttgggggaagcgtcaacggacgaaacgcctgttttttggttttccctctgccaaaaatgctttttttcatccagtttattttcaaaatttaagtgaggtgaaataaaaataacattttttagcagattttcattaaaaaaatcatttttattaaaaattttaatattcaaaggttaagacaattgaaaaatttttttaaattgcactattccgcggggttagaagggttgttggtgtacgggtgcaaaacattatttgacctatccattttgtttatacatcaaaa

SEQ ID NO: 44873 - DNA, 1351 bp, Heterodera glycines
tgcggaattggccgccgcgggcgttgtgttcgacggaagcattcccgctggagtggcgccaatgccatcggaggcggcgtcgccgatggaatcggcgactgctcgccgccgacgcactcttttgggaatggcgggtagcagacgcgggaaaggttcactggccagcaacggcagcagaggcggcgcgggggacgcggcggtgtttagcatcggcgaaggacaaacaacggagggtggcggaagcgtacaacaatttgtgcaacagcactacccgaagacggcaccgaaagttgcccattctgtggcattgctgtgcagcagcactgacaaggccgagttgggcacggcactgcaggaactgatggacaaaacaccgttggcatcttatttgatcgtccgggaggtgatcaaaaagaggagaagaagtgccgatggggaatgttaagaaagtgattagtgataaaagaatacaaaatatgtaacgggtaattagtaatgtaattagggaatttcagggaaaaagcaattaaaattgcccgattcatttcgtcaatttcttttttttttgcagattttgttccgtttgaaaaatctttgctttgaagggcctaaaaatgacccactgaatcagcagttgctgcgcaatatgcgagcttatgaaattctgctcgagtttctctcaattccttttgataaggtcacatttctttctgctcattttctttgaataatttttttcgtttttttacagaaaaatgattttgaaatgccccgactgatcagagtatgccacaaataaatcattcaaatgatcatttcattttttcatgtttttttttctaaattagttaagccacgaatttctgcgcagtttttgtcgtaacaaccgggaaaatcaggcgcgactggcggcgcgaattgcgacggcggagggcggcgcaacggacgccgcgggggcggtgaaagagggcggcaaaatgttgggcatagacacggtgagaagcaacaaatgtgtaggaaatggggcatttatgtaccaaatttgaggcggaagactgtgccacaattgtggcaatttaccgaaacaatgccgaactgtgcgaaaatgtgccggaacagctgatcgcgcacattgtcagtctgattgagcagaagcagcgtaatgcggttttcctggaactgctgcaagtgatcgtcagctcgtgcgagaagggactgaacgagtgccaagtcaaagtggtggaagaggtgggccgaccgagagaaaagccgactgatcagcccatactgatcagcagaccattcgagactgatcaactatagttcgaaaccgatagttgatcattcgaga

SEQ ID NO: 44874 - DNA, 1087 bp, Heterodera glycines
tttcaaaatttttgttgaaatatttgtcgtgctctgaagggcgtgggagggggggggggggcgaaggcccaccacgaggccgcgaagaggccgagtgagtaccttcggtgcaggaaaattattaaattttaaaaattttttaattgctttttaaatatgccaaaaaatgtaggcttaacttttttagtgaaaattcgatcactcatattttttgctaattgagcagaagcgtaccaaactttgcagggatactccccggtaaaggactaacttacactgaaatgagcgccgagctagctggctcaaaaaaattttcgaaaatctgagtctttcgtttttatttgttttttgcataattaattcataaatatttttttcacaaaatgctctgaaacgcaccaaattttatttacatgctagtttaggcactctgatgctttttctattctttgctatcatgatatttttgatattcattatctagtcctatttaagaccaactgttggcccgaggatagatatttaatcaaaatttagatggacaacacggaaaatttatttaatttaaagaattatttttggttttttcggccattgatcacaaaaaaattgaaaaaacactgcgatgcctctcccagctctgatcagtgttgatcagcttaatccgacacaaataaatcagcaaaaggagcagccaagtccaccatcatcaaccggcactgttacaacactgtgcagccaccggcaagattacggaataaaattttcaagaattagacttttcgactttttggtatggctctcgaacttggataatagcctaatttggatgtccctcctccctttgccctgtgggattttagatcgagaattgagtcgggagaaccgagaactggctccggtaggacagacggagacaacaaaaaatacgagaatttgccggctcgagaatttaagttgagaattgggccccggcaaccgatacatattttccctaacccccgagaaatttctcgagtttaaaacttcggccggtataatttgatcccgtgacaggatatattctctcaaaacccccccgaacttt

SEQ ID NO: 44875 - DNA, 679 bp, Heterodera glycines
aatgtttctttgatcattttttcaacttctcagcaagcggttccctggtcatgccaagccaaatgagcagcacttccatgaggcttttattgccgaatcgctaaattcattcaaaaaagtggaaaaattggcttcttctgtctctttctccctctctctccctccccctctctctctttccctttctctctctcgctccttttcactctttttgtctccctctttcctccccactctctctctttcctttctctctctaactccccccccccccccatcctcctcctcctctctctctctcctttctctctttcactcccttctctccctccccctctctcctcatttattattacttacatttgatggttttttgccataaaagggtgtttccaacattccggccaattttcggtaaagcctcgtgaagaaaaagcatgccattgcatagttttctgattttttctgttcttgaaatttgactttgttttctgtttggtcatgttgttgctgttgttgttgttgttcaccagcagcatgagaaatgttgtcggtgctgaaaaatgaaattttaggggaaattactgtggaatctccaaaagtttcagaatttacgtcttttgttaaggcctcttgagaaaagttgaaatatttttcttgggaagagaataatttaaaa

SEQ ID NO: 44876 - DNA, 1253 bp, Heterodera glycines
  unsure (1)..(1253): unsure at all n locations
ttcaaatttttttttttttttaaaaaattttcgggttgaggttgttcaacaaacgttggggtaatggcaccagaaatcttttaatttttaccacaaaaaaaacttgatttttcccaaaaaaccaatcaattttaaccaaaaatgtcaaaatttacaaaaaagttttttcaaaattccgaaatggtgtttatttctaaaggttcccctaaaaaattggaccattttaaaaaaaagctcgattttttcaaaatttttttttataaaaattccggttgatgttgttcaactaaatcttggataatgggtccagcaaaaccttattattagcaaaaaactattttttaaaaattttgaattaatttgcttaaattaggcacaggtggtcgactggtaccagtcccacccggctacggctgctggctgagcggcattgacgtgaacacgtagtccatcaaccagcaattccaggttaggagttcacacacaaaaagacgcgtcgaccagcagcactttgtaggtttcctcaatttcggaaaccaaaaatttttttaaaaatttctattatatttttgaattattaaaaattctgtattacgttttcgggttatttattgtgcaaaagtatattttgtgggcgttttcaaaccaaaaatacaactttgggtgttttcaaaaatgcttagttggattatgagcctctaaaaccaaaaaaaaaaaagaaatttttttcttttaaaatatgactaattattggaacgttaaacacaaaataactttttaacatcgggattttccaaaaattatagtcaaaactgtgaaaagataaaaaaaaattttggtacaactctggtccccataaaattgaatttttttttttaaattatgaaaaaatttttgttattgtgaccaaaatgtcaaaaaaaactaaaaatgctttttggtccaattctgggccccaaaaaccgaagacattttctttacatctgatcaaaatggacatattcagtagaagggcctggcttgaaaaatttaaaacctatttttanatgtttaatgacaaattggcttaatttcttctntaaaaattttaaaaaataactgaaaatttttcagcaaatattcaaaaaacagtttaaatggctatgatttttttcatttttagtcacaactttttcttacttgaattattttttttgttccaaatttaaaattggctttttttagccggaacagatgggacagaaagcgtccct

SEQ ID NO: 44877 - DNA, 1173 bp, Heterodera glycines
attaatgactttttgatcagcatcaaaattagcacaaaggaagtttcggatttttctttctttactaaaattaagattttggttgattgaaccttttgggccattacttttgcataattaaaaatctggttaataatttgggtagccccagtaatctttttttaagtgaggggtaattaagcctctttttattatttattgtcaaatcttatttttacttgataaacatatttagcagaaagttcctttaaaattatttgtctgctaacgttcatccaaatcatttgtgcttctcggtgggaaatttcttgctgaaccaataatttagaattacttaataaaaataacgtgaaaattaatgaattattttttatatataaatgaataaccattttttagggccagggtttttactaattaataaaagttaaaattttcgttagcgattaaaccatttttattcattttccttaagaaaaattattaaaattttggtcactattttcatcatttttgccatttttcgtcactggttaatatcttaggatttttcataattattaatataagcctaattaataagttaatgattttttctataaaccttgtttgagatttgaaataaagtattgcgaccaataaacggtgcctctaataaggaagataattttgtgaaaagtcgtgaataaaagaacagcaaagcgccacgcttttttgcattgtaatgttcgggtgttatgccaaacacgcacaaatcattgttgtcagttttccttaatatttcatttgttttaaaggtgtgaatattattcataattatttgaaaagatgtttgcaatttttcaaaaattttaaaagaaaataaaaattatttaaaccataaattggttaaaatttgttgtaaaaatcgacctgaatgggtccaagccccacacatttgtcatttgagtctcaatttgaccaagaaaataggcaaaaattggactttcttttgtgattttgtctccaaacaatcggtcatttaattgttttaacactttattaacgtcaatttgttcttagaacttttccaattttgccgtgttgagttcttttgaattttggaaaatattttcattaattcgagatcaaatgaattcaagtgctaacaaactccactcaagcatttgaaaa

SEQ ID NO: 44878 - DNA, 455 bp, Heterodera glycines
gcagctgaagattttgcagttggttcatattggtaaagtgggggacaatcaactgattttgctgtcaatcacaaaacaaattttgaggaaagcgactaaacattattaaagttggggctcacagaagtgctgctttctcagaattttgttgttttgcaaaggatcaatgtttaatttttcgtttttttgaaaccttgttttactgagttttctgtgaaatttgctttttttttttggaattaagcggattttttgaggcttttcgaaaatttttttaaaagcttttagcaaagaaaacgtttttaaatttatgacgaaatgttgttgttcatcactagggatcggattcttagttttttaactattttttctgcggctttaactcgacgagaaatgcacgaaaaacacattctttttcgaaaatttttcgtttttagtgccactattcatcacta

SEQ ID NO: 44879 - DNA, 981 bp, Heterodera glycines
  unsure (1)..(981): unsure at all n locations
aaattaaatataattttttatttattaactcaacaaaatattttaaattaattaaaatcattgaaaataacgtaaaaatgcacaaaaaaataatgttacaccgtccggattcgaacctgcccccccccctcaaaatgatgcctcagaatccccaatcacacagggattctgaggtcttgacgatgtcaaaagtaaaatctgatcacgtattcgtgatcagcggcccaaataacccctaaagacatatttttggaagatttttgtgagaaaaatttttccactcaaaaaccatgtgcacccccctttggtcccgaatcccaaaatcacttttatttttgtatctttttttaaaaatgtgatagaaatgccaaataaaatttatataatagagcaaaaaattgcggatttttgtagtattttacttttctcaaatagcttttcagaagcgagttctgaatttttttctgaaaaatctaaaatttccagaatttctggaataacttttttcatattgatgttagaaaacctaaataaatcccataaaattctcctgatttttctctatttttaaagctttatttgctcaaaattggtaagcccttaggctagatatgaattttccaatattcgcccaaattgccgagggccaaaaaattgccaaaaaataaagaatttttaaaaaattccaaaaattatgaaacttaaaatagacatcatattcgtgctcagcacctcaaaatagcccagaaaaatatttttcacaccctttttcgaccccaaaaaaattttttgaaatttctagggggcctagctcgaaaatttttgaaaatttacatcatgtagtaaaccattcgatagcatttaaaatgctctacaaaaatggtctaagacanatttttcgctaaaatcaaaccccctgacgagttatgggcccaggactcaaatgtcccgctcaagccaaaatttttttctatttccggg

SEQ ID NO: 44880 - DNA, 1240 bp, Heterodera glycines
ttaattattttttcttgtgaagatttttggtttaaaattgtccttattcgaaaaaactttaaaacaattgaaatataagcaaaattatgttttttgattaagttttacgtgttttgtttcctaaaagctttaataaaaaattttatttgcctatttttgtgcctattcgaggatttttgcgcatatttaatgcctatcatttaaatttccatggaaattcaaaaattaaagtcgtaaatggcaattcaatccaacaaaacataggcgaagtgaccccgaccggtgacccgcccccccccccgtcatggtcatccttaaacagtgtaaaaatttctcggtttccgagactacaaatccgagaccgagaagcgaaaaacccaagaaatttctcgagtccagtaccgagactctcgcacatccctagtccgtaatggctttttatattattaaatttgaaaatttccctgccactggaatttttatgtaaagttcaattaaaatgggaattggtcctttttacccagtgtttgttgagcacattttcagcgcgaacacaaattttggtacatatttttctcgaaattcttgtccatcaattagaaggcacaaacggattgccaatgagaaaagcaacttggacaatttcacattgaccccagccgaaattgacttttgccgcttttcagccactaattcttcgttattcgaggcaactgctcgaattgtttgcacaaaatccatgtcatcactgactttgaaattctctttgaaatttctaaaataaaaaatttaggcggcttatattcgagggggggggggcttctaatcgagggaacacggtaggccaagaaaactcaaatttacaaaccgttcgacaaattcaaacagccgcccaagcaaatgtttggcaaatgatagcgtaaaagttaacaattgtttgttttcatcatattccatattttttgccaaattttttttcattgtttcgtataaaatttgtccaaatcgtaacatttcttttctgtaatttgtcaacagaattcctccatttttgcttgcttctctttggctggcttttgtgtaatccgtgtggatgttcttcaatatttccaacagatgtccacttaatgactcttttaactcttttaacttttccaagtattttttgtcaagtttttcaaaaaaaattttcaatttattcattggtctttcgttaaaatcgtcaaaatttttgtacaaa

SEQ ID NO: 44881 - DNA, 1330 bp, Heterodera glycines
  unsure (1)..(1330): unsure at all n locations
ttttcgaaaatctgagtctttcgtttttatttattttttgcaaaattaattcttaaatattttttcagaaagggttctgaaacgcaccaaattttatttacatgttagtttaggcactctgatgctttttctatcaaaaagggagatgaataaaatttttaaaaatttttaattcctttttaaacaggccaaaaagtttaggcttaacttttttttcagaaactgatcagaagcgcaccaaactttgcagggatactgaaaggaagagaaataacctattttaaatattatctagtcagttcatttaaataatttttatccaaaaaattttttttgggttttcggggcagtccccctgaaccgatgcgcccagatttatggggagaccgaatccttccggaatagcttccctatagcctgtactttaattctgcgttggatttttgctccccataattgtttgagtaccccaaacggacacttgaaaaaatcgatttttttgttttcggggcagtccccccgaaccgatgcgcccagatttatggggagaccgaatccttccggaatagcttccctatagcctgtactttaattctgcgttggatttttgctccccataattgtttgagtaccccaaacggacacttgaaaaaatcgatttatttttgttttcggggcagtccccccgaaccgatgcgcccagatttatggggagaccgaatccttcgggaatagcttccctatagcctgtactttaattctgcgttggatttttgctccccataattgtttgagtaccccaaacggacacttgaaaaaatcgatttttttgttttcggggcagtccccccgaaccgatgcgcccagatttatggggagaccgaatccttcgggaatagcttccctatagtctgtactttaattctgcgttggatttttgctccccataattgtttgagtaccccaaacggacacttgaaaaaatcgatttttttatttcataaatattttttcagaaaatgctctgaaacgcaccaaattttatttacatgttagtttaggcactctgatgctttttctatcgaaaagggagatgaataaaatttttaaaaatttttaattcctttttaaacaggccaaaaagtttaggcttaacttttttttcagaaactgatcagaagcgccccaaactttccagggatactgaaaggaaaagaattaacctgttttatcacattagcttgtcatcagtttttataaaaaattttcaaaattctgcgtctcctnattattttatttttttttcaagaccnntgcaggcccatgcaag

SEQ ID NO: 44882 - DNA, 807 bp, Heterodera glycines
tatttgttgacacatggtatcgagtcttggcaagaggaatgtgttcgagagtctcgactcggcagaaatctcagccttcttgggtctcggctgaaatctcggcgttttttgggtctcgagtctcgggtcatgaataatatgaacttgtagctgttttttcgtcaaaaagtgactaatttttttttgccattttggggtcaaaatagctaaaatatgggaccggcgattcctttttgaaatcttaatccattgtgtcaagaaaattgattaaaatggccagccatccttatctatctcggctgacacattttgtgcttcttctttggtttcagccgcccctaaatacttttttttcattgaattacggtcccgaccctccgggccaatttttcttcggcagaaataaaccaaaagcataattcgcacgggaattcctattttcagttaactaattttaatttaattattttattcatttgtgatttgtgcatttgttcagtacttcttggatcgtttctacttgaatcggatttccatacgaatgttgcaaaaccaacactgtaataatattattaccaaattattaaattttaattgttttaaaaaacatttaatttcctccctttgtaagtggcaattttcgccgccgcctgcgacaccaatggcactaacaatcagtcgcgcaagacagtcgtggtggacccggccggccatgttggacacattgacccgcagtgcaatgtgcgcgacattctgctggacgcctacgaaaacgcgagataattaatttattatttatctaattaa

SEQ ID NO: 44883 - DNA, 1243 bp, Heterodera glycines
attgagctggatcatcggaagcgctattttcggacacattaacacacaatagcaaccagtctgccggattgagtctgccatacagcgccaattaaatacatatattttgttaaatattaaattcgaatttggaattaaatttttaaagtttaataatttaaatgaatcgacaacagttctgctaaactctaatgggaatacaaattctcgaagtatttaattagaaattataagaaattaatttatttgctcaagagtgagaaattctgaaaatttttggataggtttaataaatatattttattaaaaatttaaaaatattattacccgatttcttggatttgattttaatgtcctgtaaatgcggaatttttttccattttttgaaatttcttgattcagccgatcctactattttgactatttatcagttcaacaatttcacaaattttgtttgatcgatgaatgaaagcaataagcagaacatttgcttgccatctactggagatttaatgaaagcagcagctgttgaaaaaatacgtataaagtcaaaggaacatttattttcagtttcatctgtttattaattattttaattttgaacaatggataaatatacatattatttttatatgtttttccacatatttttgtatgagaatgcacaaaattcatttttgaccgaaatattttgtgtaaaaacaattttaaattaaaaaaaaattgtactccgtggtaaataaatattaattcacaatatttattattattatttgtttccctgttttgtattctaatacaggaatcattaattttcgattacagataatattttaaggtatttttattaaaaaaaacaattaattttttgtgtaaaatgcgtctttgggccgcttcacttggcttttacgtttccattgtcatattttgtgaaattttgcgcggatttgcatacagattcgagctgcacacacagattggtggtgaacatcatcaacagtttacatctttgatttatgaggtgggtaagttgaaattaaaacttttttttaaagcctttgttaaattgagaattgaaaaagctcaagttttagccgcttcaaacacttctgatcaacttctttcattctctagatcgatttgtctcatttgagagaattgtccttgatcggggcctcaaagaaaaatctcccttactttacaatagccgccgggaattcgcgcgaatccctaccgggaccga

SEQ ID NO: 44884 - DNA, 1190 bp, Heterodera glycines
  unsure (1)..(1190): unsure at all n locations
ggattttttttgaaaatttatgattaattaagtaagtttttttggaaaaattttccaaaaaatcccttaaaaaattttttcaaaaaatttttcattggaatttccatataaaaaaaattctaaggaatttttttctttgaaaaatttccaaaatttattaaaaaaaattttttggcgaaattatgtcccggcgaaatttcgaccggcgaaattccgtccggcgaaatttcggcggcgtaatttcggcggcgaaatttcggcggcgaaattttggggtgcaccctgttttttcgcctcatttcctcccgtttttcagtgacactccgttggattccctgctgaagacccatctcttctgcaactctctgaacattgctcaaattcccctcgtttctgatttgaatatgctcaacgaatgcttttccaattccgtcgcttttgatgagaatggctgcaaagacaataagaaagtggagttaccacaacggtttttggcatttaactttgactgtttctttaggactctgatgatcagtccagcacaacttcagcagctactccgtccatttcctcaacgttttcttcaaattcagagagtatttcctcctcaaacggactgaaacggaagggaaatgggacggcatatttcattggcaaaatgcgaaaattggaaaggataagaaaagtacattttgcaatatttgaacttaatttcacaattattgttcatacgttaggtcaattattctgcagaacggataacaccacattatttggagaggttaaaatgctatttcgacaaattgaagtcggaggaacaacgaatgggtcatttcaaccgaattttcccaaggaaatggacttggcacttatacaggtgaacggatgggtctatctttttcattatttagttttaatatagagcgattctcgaggactgcggccaggagaaatgggacgaagcattgcacaaccgaatggacgctgaatattactcgaaatatgagtacgaattgacactgaaggacgttgacttggtccatgagcagctaatggacgcaaaaatagtgatttttgtccttttttgcaaaaaatggtccaattttggtttagttcaggcgaagggaacaattggcaccgatggctcgcgacgtccttttggctgaagctttttgcgngaccgaacgttt

SEQ ID NO: 44885 - DNA, 281 bp, Heterodera glycines
tgcggacatctacatttttgaattgaaaaaaattggtaattactctttctttttctccatattgaccatcatactcatactccccccacccttttcttcttccgccaccctttctcctccttcatttttttttttcctttccttctccaaccctctcctccctctcttgatagtttaaactgaaggcgggaaacgacaatctgatccccatcaagctagcttctgcaggtcctgctcgagcggccgcccggggatcgatccccgatctagtacatagatga

SEQ ID NO: 44886 - DNA, 906 bp, Heterodera glycines
  unsure (1)..(906): unsure at all n locations
acttatttccaatctaatttcttgcagatttacatctatccattgcctgccggttctcggcacagcaaagcactaatagggtgtttgactcacttcaaaaaataattccatacccaaaagttttttacaaccacatattgccaatctaatttcttgcagattgaaagccatccattgcctgccggttctcggcacagcaaatcactaatagggtgtttgactcacttcaaaaaataattcattacccaaaagttttttacaaccacttattgccaatctaatttcttgcagatttaaagctatccattgcctgccggttctcggcacagcaaagcactaatagggtgtttgactcacttcaaaaaataattccatacccaaaagttttttacaaccacatattgccaatctaatttcttgcagattgaaagccatccattgcctgccggttctcggcacagcaaagaactaatacggtgtttgactcacttcaaaaaataattcattacccaaaaattttttacaaccacttattgccaatctaatttcttgcagatttaaagacatccattgcctgccggttctcggcacagcaaagcactaatagggtgtttgactcacttcaaaaaataattccttacacaaaagttttttacaaccacttatttccaatctaatttcttgcagatttaaagctatccattgcctgccggttctcggcacagcaaagcactaaatagggtgtttgactcacttcaaaaaataattccatacccaaaagttttttacaaccacatattgccaatctaatttcttgcagattgaaagccatctattgccntgccggttctcggcacagcaatcactaataagggtgtttgactcacttcaaaaaataattcatta

SEQ ID NO: 44887 - DNA, 1129 bp, Heterodera glycines
cttcttttttacgctttatgtacaatttattttctgtatgttttgctttactttttttgattggacatttgttttcattatttttttactttctatggataaagcattattcattaatcgtctcaaaaattaaaaattatccaccgccacctatcggcaccgtcggactctcagtttgttatgtttatcattgttgaacgcctaaaactagagctcagtatattaaaaaagcctggacctagagaactgaattctatgtttgatctgggcatggatttcctggacaaaagtccatgaaaatccaggcttgaaaaaaccaaaaaagtcccaaaaatcattttatagtcatttttaaatttatttaatcatttttaataaattggaataaaattgatcactttaaaaaatcagatatatatccaagaaatccatggtcttttttcatgtcaaatctgtcctagattttcttcatatttgacttattcctggcttttctggaattaatccaggaaaatccaggtccatgctgagctccaattaaaatctaaatttgtttatctttttttaaaataaattttgaatatgctaaaattattattgaaaaatttaaattatttaaatcttccaattttaaaaatccaaatccgcgcccgatcatgtttcaaagctagtttttcggtttggtaccagatatttttggctgtcctgttgggcacagaaacatgggttgtacgtatgtgtgtgtatgtcagtggccttattgtttgctcagctttttctcccgccgcttttgcgcggctaatcactcgcggctttatccctccatttatccgtccagcgcctctttgactgtgtcacagtgggctcccaccagcaccaagcaaaagcaaacatccgctccgtccagtccggtgagcagagggataaatgggaccgacaatggtggtgagggttggctgatccggtgatccagaaatgcgcaagagcggcttcatctccctctccctctcgcgcccctctccaattcccccctttgtttgcgtacacaaatgaatccccccaaattcttcccgccctcttattcagcagcatatccccggcttttccctccccctccacctcccccctt

SEQ ID NO: 44888 - DNA, 1656 bp, Heterodera glycines
ccatttataccgagggttaggtaaaaaattattggattatgaagaattattgacttatcttatccaaatagaaaggatagtcaatgaaaggccaattacatacattgagaatgatgaaattatggagcccttgtgcccaatacatattatcaatgcatcagaaggggaaccatttgagtatcagagtggcactaatgaaacagaggatacagacgatctagatgctcaaatcaaccaaacaaaacgggatgaactcctcgaagttcacaagaaaacaatgtataagagtaccaaattttgggaagtctttagggatgactatttattggcattaagggaaaaggaaaaggccaaaaatgtggatgaacaaaggtttccaaaaataggacaagtggtactaatcaatgatcaaaaaccgtgtcctcggaataaatggaaattaggtaaaatagaaagtataatcaataacagaactgccaaattaaaaatgcccgacggaaaaataatggaaagggcgacgattttattatacccactggaaatagagaccctcgagtctgaccctaatcccattaatgaaatttcagcgttaacaatggaagacacagttagtttggcaagcatggaggaagagtggtacgaaattttggtttctcaaaaccttcagaaagaattggaaaaagaatggagcggatttttggacatgcaatttaatacccgcccgtatcccgaatttggatgctaaagtttcaactcaaaggggatctctcaagatccaggttggagttggaaacattttgaatggttccggttatttaaacacattcggttggtctctcatggctatgcattatgttgagggaagaattaaattaaaggggattttagagcagaagcaaaatcagttcctcgaggctgaattaagtcaacttggtaaacccgttaaagatcaagtttctgtttttcggggagtgtccgaaacacaccccttttcggaccaatttactcaccatttcccaaaccaggagaagtcggacatcggaacaagtctcaacttggcggagcgaagcgagcaacgaatttgcgacaaggcggtcaacgagagcggcacaattggacgggacggcgcaattgaacgagtgaagaaaggaacgaaggaggatggcgcaaatggagagaaaggagacaacgacgaaattggtgaacggcggacaaatttgacaatttttcaaaatgctcaatatctttaatttttacttttttatttattttgtcataatcactttattgtttttcactaatttcactttgtcactttgccccgcattttctcatctctttatctccgacgaacatctcttgtaaattgcagcggtctcatccgccatatttaagccatgcatccttgctcattctctctcttcacttcacttcgacaaacacaatttaaaatgccttaaaacatttttattgctcttcgcatttccatcaaattgctcaataaaaattcctcgaattttgagaacaacggaaggcaagggattggaggttttaagtgattttccgcctcaaaactaaatcacaaactttttgaaaagaggcggaaaaccatttaccaatttattggcatttggattttcactcatttcgtcaaat

SEQ ID NO: 44889 - DNA, 1005 bp, Heterodera glycines
  unsure (1)..(1005): unsure at all n locations
aaaaaaaaatttaaaatcatttttagtacgtaaatgaaaaatgtaaataaaatgagaagtagacatntatcattattaaatgatgggacaatttttttgagaatgaaggaattttaaagtgcatttgctcagccaatgtttgccgagcgcctttgaaaatgacgggagaattttaacagacattttgttactaactaaacaataaaacaaaaatcataaaaaaaatttttgttaaaaatttggaaaaacgtaatgcaaattttggttcaattggaaatttttttaaataaataaaaaattattttaaaaatggaaaattatttaaataaaatttgagaaagcgtgaaatttgttttacctgccagtattttcaaaagcctaagcatcaatattaatagcttattacatatatttttaaaaaataggcttttcaaaaaaaaattctgaaaagtaaaacgaaatttttttgaaaatttacaaatagttttagaatgtgttggagtgtttatcttaagccttctaaaatttcatagtgccaaaattattattttttttctgatgacatcactcggtgtttgaccattaaaaagtcacaaaaattccttttttgatttccatatttaaagaaacatttctttggaatgttcaatttatgggatagaatcacaaatgaaaattctgcggaagctcaacaaaattgtatggaatttcaaaaattattaaatttaaggggaaaaatagctttgcttaatttaatgcatttgatttctatattaatcaaaataaaattgtaaaaattgaaatttcttaaatcatataaattcaaggattttaaggatttatcccaaaaaactttttaatatttaatccttcaagaattttttaaaaggataaatgtcataagattttggcttgagcaacactttccccccccccccccccccctcgccgtgtgaatgccatgcgattttcttttattgggtaagaagaaaatgttcattggtg

SEQ ID NO: 44890 - DNA, 823 bp, Heterodera glycines
aaatggggtatgaaaagtttattggggaaaaaaagactttacaaaataatacccctgggagaagggagtgggaaacatgatttcaaaattttcaatgttttctagtctaatctactcaaaacggttcagaattcaataaaaataacattcacggtgcgaaaaatggggtttgaaaagtttattttgaaaaaaagactttacaaaataatacccctaggagaagggagtgggaaacatgatttcaaaattttcaattttttctagtctaatctactcaaaacggttcagaattcaataaaaataacattcacggtgcgaaaaatggggtttgacaagtttattggggaaaaaagactttacaaaataatacccctgggagaagggagtgggaaacatgatttcaaaattttcaattttttatagtctaatctactcaaaacggttcagaattcaataaaaataacattcacggtgcgaaaaatggggtttgacaagtttattggggaaaaaaagactttacaaaataatacccctgggagaagggagtgggaaacatgatttcaaaactttaaattttttgtagtctaatctactcaaaccggttcagaattcaataaaaataacattcacggtgcgaaaaatggggtatgaaaagtttattggggaaaaaagactttacaaaataatacccctgggagaagggagtgggaaacatgatttcaaaattttcaattttttatagtctaatctactcaaaacggttcagaattcaataaaaataacattcacggtgcgaaaaatggggtttgacaagtttattggg

SEQ ID NO: 44891 - DNA, 1388 bp, Heterodera glycines
aacattacaccatactttaaaaaaaaataaattttaatacatattcactgtttttgtaactgggagaaggccaaaatggaaacgctatgtaaaaacgcaaagttctcatcatttgagcagtttgaattttcatcattttcgcatccgttccgtcggcaaaaagcaaattagcagtcataattctccatttgtcaaattatggtggctgtgtttctactagccctatttcttttggcctgcgctttaactcatcctatagaatggcaaggctttatcattgacaaattcggacacagaatttggttagttcggaaagacattgttggtctgcgaacgtaccgcgcccctcacctccccccctccccctccctccacctccactcgatcccttccactcctcatctacattcattttcaagaccttattttcaattcaaccaatttgtttttgcgataaaagcaaaaagtggttttgattaaattataatggcggccgaaattgacaacgaatccgacgcagaacaggatcatggtttgtaggggaatttgaaatgattgggaaatgaaaatatcagcaatttgaagaaagcgtttacattttaaatggtttaaaatgcaaaaaatgggtttttccttaaaatgaacaaaaatgcaaattgttctttttcagtgggtaccaatgccttccagcgaacagtttggcagcaccggtaaccaattcatttacttttcaagtcggatttccatttaagtcttctgccgtatttcactgagcttgaggaagaagcgaactcgcatttctgccaaatcaaaaggttttggatgcgtttggttgggcaattgtttctcattatctccacaaaaaaatgaaaagatcacttgaaaccaaggggcactttggtaagatgattgtatattcgaactcttcatgggttttatttaaaaattaatgtcaaaaattttgctttaaaaatatttttaaataattataatttttacatacatatgaccacgtggtgagtcgttccacaaaaaagctcggtgtgggcgatccacaaaaaagctcagtgattgattggtcattttccggaagcctatcgcaccactttcgggcaccaaaagtgcctgatccggaacccggaccggcccggttaagaacaattttttgttcagtatttcaagggctgtctcccaggccgggtccggttcttgatccattcacttggagcccgtcatgggtcggggtaaaagtgtctcaattatggtgcttttcctttccagtggcattgcccattccgtgctttgccgtgaccttcgctattctttggcggtgtggggccaggaactgacggggttcctcaattacaactcacttagattttccgtaa

SEQ ID NO: 44892 - DNA, 1073 bp, Heterodera glycines
ccgtcgttttcctttcgttcgttttttcatccaaatctaaaaatgggccattttctcaatctttctaaaattaattaaataaatttaattttttttgctcttttgcctcggcttccgcaaattgtccatcgctttaagccattgactttcctccccgaaacttcgttctgccagtgcccttcgctcttttgatccaattagcacagtcgcctccgccgttgtttctccgttaagcgttcgtttgttcccatccagcaaatcggacaaacgaatgccccggggcggtagagcggcatcttaaaaggaaacggacgaatggtactattgggaaatgaacgaaaaatgaaaaacgggggaaagggggccaaacgtaccgaaaaagtcggggtcggcaaagatctgtcgagtcgcgggcagaaacatataactgagggaatgagtggtgagcaaagcgagcgaaaggacgaacagcaaaagcagagaagaggacgagcagagggaaagggggggacgacgagagacggggaaaagcatttgggagacggagaaacgaagcggaagaagatgaagcggaaagggacgaggcggaaaagcggaggagagaatgccaacggaagagggcaaacacagacgggcaacaactctgaatggcactttcagtcaaagtacgaccagaaattttgaatggctgtaatgggcgaataaatatgcaaaaatgcggttttgatgtgaaaaatgtaaattctattttaaaattgagaaaatttgaagaatgagaaaagaacatgggaaaaacccaaaaaagaagagaataaatgtaaaataataaaataaatgaaaaaggaagggcacggcaaattatacaaaaagaggggggggggggggactcatttgccaatgccttttcaaagtcaatacggtaattgcaccggaaaggatcccgaacctaaacattttcagggacaatgcgaatttacgtgaccttggcagtaaattaatctaatttttcacgattttatgaatttttctcttttgccatttcgacgaaaaagatgtaaaaattgtgagagggg

SEQ ID NO: 44893 - DNA, 1131 bp, Heterodera glycines
ccctcacggttcggccctcacggttcgcccctcacggttcggccctcacggttcggccgtcacggttcggccctcacggttcggccctcacggttcgccctcacggttcggccgtcacggttcggccctcacggttcggccgtcacggttcggccctcacggttcggccctcacgtttcggccgtcacggttcggccctcacggttcggccgtcacggttcggccctcacggttcggcctcacggttgggcctcacggttcggccctcacggttcggccctcacggttcggcccccacggttcggccctcacggttcggccctccggttcggccctcacggttcggcccccacggttcagccctcacggttcggccctcacggttcggccgtcacggttcggccctcacggttcggccctcacggttcggcccccacggttcggccgtcacggtttggccctcacgattcggccgtcacggtttggccctcacggttcggccctcacgattcggccgtcgcggttcggccctcacggttcggccctcacggttcggccctcacggttcggccccacggttcggccctcacggttcggccctccggttcggccctcacgagtcaggccgcacgggtgggaccaaagtggtcgacgaggacgaggagcgctgcctgtactgtcaccgctcgtttaaggaggtgtcaaggtacaaggaccacgtgcagtactgcagcaaagcgagccgtaaacaaatgaaaacggcataacgcatgaaacattctggtggatcgttggaggacggattgaacagctcgactggaatggttggcgacgagtcgagaagcggataagccatgactaattccaggatttttgtggaattgttgtctgggatttggggattgccacattgtaaattctcaaatcagccaattttcaatttccattaaatagtgccccaaattcagagttgtttcggcgacaccgacccatcgtcgttccgatccgtcgtcctccagtgactcatttgggcaacagcaacaatcgacttgccacttaccagcccgctgggttcggcgttttcgcaatgcaacccaaatgttgagcaaacgttcgtttgccggtggacca

SEQ ID NO: 44894 - DNA, 1572 bp, Heterodera glycines
  unsure (1)..(1572): unsure at all n locations
aaattggggcagctacatttaacatttgaataaagtaaaacctggacaaattttatttttagtacctaagaaaacctagaaattttttatgcaatttcgagtctggatctcagaatgatattttcccattatccttccgaatgctgactatatttattcatcttaaaaaaaatcacaacccccaaaatacactaaaaaacggaaaattttcaaaaaaaaatcgtatggggtagcacctcagattacccctatattttcctgaaattaaaaaaaggattcatcgggattaatcctagaatctcgcaaatcccgcagcggaatctttgaaacttcgaataaatttaaaaatttgaaaaaaaccttcaaaaatatagcagattttataaagatttttgatgaaataatgtaaaaaggagaaaatgtaagagaagttaaaatttctcctgggataaaattcttttctttttcacttaatgtttgcaatacgtacatttgttcatgttacattatttctttccaatttttcgttttttagtattattattgttacatattgcacttgattgattcttcatatggaattggacacagtgcctcaacatcattcggtaaaattgactttttaattttacgcgtcccatggcaaaaaataaagggaaaaaattgaaatagaaaacttaaaaaaacaagctagaatcttctttttataatttttcttaatgatgtcaacagaaagttactaatataaaaaaattttacaaaaaaagcctaagcctaggtttaagccaaaagcttaggcctagtctaagccattgttcgagttgcctgtgtatgagttgttattatactttatgtttaacaatgaaattttagttaaaaaattactgaataccggacaaaaaaaaggtttcatcatagtattaggacggctaaaataccatagaccagggatagcacttaattccggtttccaaaaaaaatcatttgacttaaattccaagccccattaaattttaagggcaattgtgaaaatggaaattgagtgcgatgaaagcgaatgttccattgacatttgggtctttgatcagagctaacttttccatttttaatcgttggagaataatttattcgtctttacgatattccgataaatgaacaaatttcatcaattgatcatcggttgatgtgaaaaagaacagacgaaatatttaagaaagcgttcaaatttcgaatagagtggaaggcacaatgggaaaacggagagtggacagacagacagacagacaatggaaaaagaattgtgacttgngaatgagcatcaagacaatgagtggaaagtgccgcaggcgaaagtggtctcatttcccaatgtcgcgactcacgtcacgagaaataaaatggaaatgataaattttataagcatgatgcaatttcatttaaaatgggaaaaccttaatttaattgnaaatgttccccctcttcgtcgntctattcaaaaaatatttgtttgtttacatttcatttctattcatttctcacacaaaaatgtattaatcagcgaatgacacccta

SEQ ID NO: 44895 - DNA, 1552 bp, Heterodera glycines
  unsure (1)..(1552): unsure at all n locations
caaatcgaaatttccagagtttatggaaaaacttttttcatctttatgttagaaaacaaataaaatacataaaatactcccggtttaattggataatggggggggattaatggatatgggggataaaaagagcaaatacggtaactttatatttgttgttaatggccgttttacgaaacgcactagcagcaccttttatatgttgaaaaactcaatttttcaataaaatataaaaaaaattcgcgtaattttcaattttggattaaaaaatcgatatttttaatatttttgaaaacattttaaataattaattcagttaaatgaaaatattcggacgggccgacaattggcaccaaattttttgtgccattttattgccgtttttctttcatttattgtgtcaatgaatcttcaattcggaattataacaaatgttgaaaatatattgttattttaccaagctttgtttcttgtacatgctttcaatgactttgttcttcccattgcaatgctttggtcagtttccatttttaatggttcctaattactctatctgtgataattaattaggcgtgaatttgataagtttgtcattaataaataatatatactttttaagaaaaatttttatgatttttttaaaataaaatgaaaatttttacgattcttttaattcattaagttatcatccattgctgaacagaaaagccatagcgtcattagcgatcattaaaaaattgtttcgaaattcgtccgccgttttgccatttgtagaaacggcacaaccattggacaccgacggacggccaattagtgaaagaattcagcaagaaaaccgggacaaagaagcgtactttaagcaattggcctcagcttggggggacaaaacagatcatgaaaaggaaatttgaactttattgaaaaaaatccgagaaaatttcataaaattttattgaaaaaataattagcggtgataattacacagaaaatctcgcgcatgaaacttgaattataaagaaaatcagtaaaattttaaataggataaaattttcaagaatgaaatcttgatttttgaaaataatattcgttagaaactgtgaaaaattataatgacgcaaataatttatatcgttttcaaattatgaaattatcggattaataaaatttatagaaagctttcaatctttttgatttttcgatagaagagaataaaagttaattctaattttttaagatttttttgaaaatttttaattaaaattttctaagatttttttttgttttttctaaatatgagcgaaaatccatgctaaaaattgggaaaatccaatatctttatgcataaaaatccaaagaaatattttattctttattatttttttttcgcccacaaanatttagggggtgttttttcaattttcttgtatttttctacatgtttttctcaaaaatgccaaaatatctgccaaaccccgaaatatgtggttttatgtgccaaaacgccaaaatatgntgttgtttatgtttttataagtcgctctaaatcgaaaat

SEQ ID NO: 44896 - DNA, 1193 bp, Heterodera glycines
gtttttgagccagttaaaacttgaaaaattgagtgaaaaggggggccactgaccctttaaaacggtcaaattcggacaaatttggttatcattcgaaaggtcttgaccaaaacaaggtataaactcgaaccgatgtcatctaggcactgggacaactgagtcccagtgaaaatggacactttagtaccaaaagaaataaccatttaaaagcaaaaatttcgcaaaagggagcatgcgaagacggagaaactagtggggcgagacggagggcgtacgaaggcagtctgacgagcgccacaggcggttgactgcggggggcccccgccaaccagtcaaccgcatgcggatcatgcgcggactttttctgtagcccgtgtcttgccccacctactggccaccgtccgtagtcgaaatgggtcggcattccgaactctttggtaaaaggtaaaattttcggaattttttttttttttttgcctgctgatgtatttcattttaatatttttgtgaatatgttcgtatttcatataatctcttaaaacagcagttcatctcttctttccgcctcgcgtctctgctgctcccttcgctcgatcatttcagcccatctttccgagtctctagccgcactagaagcaatacaagcaatgaaaatcataaacggaactccaaaaatgacggtgatggcacttatagcaatggctgcataaatcattgcatcgaatacgggacgccaaaagggatcagtgggcagccaaaagggcggcttagtgacagcaaaagaattgttggaagaaatctgttgaaaaataaataaaccccaaaaaaccgccccaaaaaaccaaacgaacagtgtctgttgttgtgctggtttgagtttggttggaggcacagcagcacaacaccaaaaatgaaaggagcaagaaaaccaagcaaaaggacagcttaaaaaaaagaatttacctccttttagttacggaaatgataatggaataataatatgtccggccaatcatttgtgaaagactaattgaaagtgtctttgtttttatttgtaaaatgacacaaaaatcgtttctttttgcttaaaatgccgttgcgtacaagtaaaagttgtttaatttgagtgagcaaaaaaaacaacaacagctaaaatgatgaataatttagagggcacatacctgaacccatgg

SEQ ID NO: 44897 - DNA, 1327 bp, Heterodera glycines
  unsure (1)..(1327): unsure at all n locations
ataataaataataaaagttgcagagaaataaaaaataaatttttatttattctaagaataacatcgatctcattggtaattatataaaataacatattctaaatatttgaaataatgcgaacagataaattattaatatgcaaatattctcgttgaatccaaaaattaaaataacaaatgaagatgactgtgataccgaaaggaaatatccttgaatgcagtttcatgtggttcccgagaaaaagctataaaatgaacttcatgaaaaataaccaaaaaaagagaaattaaaatatattaaataattaaaactctaaaatttgaaataatgcgaacagataaatttttgtatgcaaatatatcgatgaatccataaaattaaaataacaatttaaaaaaatattataagaaaatatcactcatattttattttcaaaaaacccatttgtttaaaaataaattaaatattaattattagtttttattcgtcattctaaaaaataatttcattttaagcttttaatctctaatcaaccaagtaccatacctaagacttgtcttcagggcaaagagaaaaaaacataaaaaattaattgctaattattagacaactacaaaaacagaaagaagtgtcaaccaagtcatgaagcttgtattaaactaaattgctttgtattttttgctgatgccattccaaattttttttcagatcttgctctgcatatcatgaagcattttgatcaggcattaaatagaaaatgtttgctttattacctcactaaatttaaattttactctcaaaactttttctacatgttacgtacataattaaaaacaaaaatttatggagcaattcccacagcatttaattattagtttatttaaatttatttgattaaatatagtaagtaaattagttttatatcaggagtagtataggggcaaaaatctggcccccccctgggcagagagatgcgcattcactataggagagaggagagagttagagaaaaagagtaattgcaaaagcaaagaaaagcaattaaaatgtaaagaaaccccggccactattttaatggcaaaaaccccagcctaatggtattcccgggtacatttcacaccgatgcgcgcgtcgcttctttttttgcgtgtcccaaaatagtgataataaaaagttaaaattttgattcatctaaattttattattcgtttttggcgcacaaaaggccatganagaaatttctttcacaaatcgcatataatttcctggtttcttgagaatctttcgtganaaggaatgtatttatttttaaattacttttctgac

SEQ ID NO: 44898 - DNA, 901 bp, Heterodera glycines
tcctttctgtccacaaccaaagcattgaacatccacaggataacggcagttcttaagcaaatgagcacgcccgcagcctctacatttctgctgctcaacttttttatcctgtggtttaacaaatttattttgaaaaccattatttcttccataattgttgttgcccgaaaatttttgaaattgaattggttttgatggccaatttttggctctgtcactcaaatctttggcttactcggaatagcatgaacttgaccaggatttgcgagggccgcagctgagtgttgcaatgattgaattgaacggcattcctccaacaatagctccaatttgatgtcacgtggtggtgtcgtcttccgcgcattctccatttgccgaaggcattcggggcggaggtcccgatgcatttcacccaaacctgtgacaaagatgaggcatttgatttccgcctttgacaaattcatgtcggcacgctcgcatttggcattcagtgttgctccaaagtcgagaatgtcctgtcctggtgaacacgtccgctggaaacacacaaaacgtcgaacaaacactgactttgtgtctgaaaacagagccttaagattggtgattatttcctgaaaacttaattcggcagtttttttggggagcacttgttgctcattacgaatgaattcagtcgccggaagtttacccaaaactaaccggatcttcatatcgtcggaaggggcttgaccatccttttccacaaactgaccgtatcgttcataccacaatgaaaatgttgagtcattttccggatcatactgaaaatatggaatttgcgaattcaatttagaaaataagtcagaatgggctggggcctcgtttttggacatgagttatcattagctccataaaattgttt

SEQ ID NO: 44899 - DNA, 1130 bp, Heterodera glycines
aggtcaaatcgggcgagcgcaatttgcgtcgtgcggtcgcttcaaacagtgccaagtacccagtggccgccgctgcagttggcggtgcggtgatgggcggaccggtgggaatcgcggccggctcattggtggcagggattgcggcagccgtagggggcgcttttgcaggttttttggaatttcctcaattttattactatttaataaattcactatcaataataataataataatcgaatttgtgccggactgacaatttgaaaaaccctttttttcaggcctttacggagggcgtgtgctgcaacggaaagtgaagcaaagtacagcagtcgactcgcagcaatcagttgttgtcggcaacggcgcagcacagaatgccaacggtcgctaaaaatggacttgcgcaggatttgggtaaacaaacagaacggggaaaagattcgtcaagccgatgactctgtcgatgtttgtctgactcgcttttcactcatttcgccgggtttttcttattttggcttatttctatttcttacgacccttcaaaatgtataaatttatcagacataaaggacttatcataaattttctttaatactagtaaaaacaagtttaaaattgtttgctgttcacacctttcgaaagagagagatgaaccaataaatagagagcgcagagaaaaaacatcccttatttaggcgtactattttcctatctctgctaatagagaaaattcggtacttttctgttttgtgaccccccctgaaattttcaaataaaaagtcatttctagggtaatttggggcgctgatcacgaatatggcatttatttttcaaaattccgaatcccgaacccgaattcgaacataaatttgaaattcataaattacaaggaaaacatatttttatgggttttcgaggtcgctgaatacgtactgggcctatgcctaagcctaagctgaagcctaagcctaggcctaagctgaaccctaagcctaagctgaagcctaagcctaagctgaagcctaaggctaggcctaggcaagctgaagcctaagcctagatacatgccaccaaattagcgcaagttttattacgcatttctcggcagcttgggcaacatgttgatgat

SEQ ID NO: 44900 - DNA, 930 bp, Heterodera glycines
cagcgggacatgcttctgtacaaccttggtgcgaagttgaagtggtaaatcctgggacgtttcagcatcaaaaaaacaaagcctgactgccttttttgactcgtttgcgtcatcatcatcttcctgctcctcctcctccacttcattaccatcatcatcatcatggcctctatcgttaacactattatcagcatcatcattattattattatcaatatgatgatttggttgtcgcattcttctctcacttcttcttccgctcgaagtttcatctttcagaggttgtataaaacatgggtatccaatcggatgtggcccagaacatcgtggacaacgcatccatcccgtttgactaattagggctggacacttatgcggatagttcgcataagtaatggatccacattgactgcatggtgaatgaagatgcagccgactaacgcataaattaccaactaattattgtctgtcatgctgtgaagattaggccgcctttctggaaacaatagttaatctgacagaacatgtcaagtctgcctggatgtcattgggtgaggattttgcctaggaagcgcttgcacatttgaaacgccttgtcatcccgcattgattcaacaaattaatgaactccgaataatgtgccaccaattattaaacaatttaaaaaattgacatggctttttgactgtaatggattattatttggtgaatcaaacaccacaaaaattaatactatcagaatatccaagaacaaaaaaaaaattattgttaaaataagtaatacttatttattcataaaaatcatctattacatatgctgttattcaaaatattaagagataaaatctacgataaattgcttatactcactttttccgtaatcagtagaaattttttattataatctaattagcattcatgcttaatgtt

SEQ ID NO: 44901 - DNA, 1141 bp, Heterodera glycines
ttatataaattaattaattcaaattatattacttaacttcaattactataaattccattttttgcataatttcctgattaacatatgatatgacgtcagaaatagttgcaaaatcaaatagaaatttgaaaaatatgacgtcagatcagtgatatgacggaaattgaaattggttccggacaatctattaaatttattaaattggtttaattacccaagtttgaggtccatattcactaaattttctctataaatcgattatcgacaatgaaacgaagcaacacgacaaaagacactcctcctcaaccaaaacgctcaatggcatctgcaccggactcgggcccaaacactgcggcactcgctgagcaagaacgccaacgcacattggtgctcattggcctcccggaaagcaatgctgttcgcccatcgcagcgtgttaaagaagacagggaagccgtgactaaaatcttggaccatcttgatgttgaggctgaaccaaccgccgtctttcgactcggccggttcaacccacagcgaacaacacctcgcccgctcaaggttgtcatgccaacacccacacatcaacacatggcacttggaggatggaagcgcgagcgtgctcaactccgttctcaacaaaacctggcccgcttgttcgtccgcccagcactgaccaaagaacaactcaaggaggaaaacgaagcgcgcgtccgaaaacgtcaacaaatcccagctcccatggcgccggcagcgcagctcccacagacaaatgttccgactcccgtcaatgaaaatgggtcagaacagaaggaggcggcaaatggatacatttccaaaccgcagaaccccgttgaagaagaaatcctcttagacaaagcaatcagccaaatgcaatccttccgaaaacaattccctcaattatttaataaatagttctgctatgacctccaacaatttctataaaaacttcaaatcttctcaacaaaactctccacaaaaattttttctctccaattccaaaaaaaacgatttacctttgttggaggtctgacctccacttcaactcaaattcaattatcgtttgttacaacttttataatatcccgatttcttatttccaagatgacatttaacttcttca

SEQ ID NO: 44902 - DNA, 1161 bp, Heterodera glycines
  unsure (1)..(1161): unsure at all n locations
tgaaagtgaattttcgtccaattntgtcaaccaacactcacccggtgggccgccgaccaagaaaaagtcaccacatgcgtagccaccaaatttccatttccgtcaaaacgtggaatcttacgaattgacccaattgcaccaatgaccaactgtgaggggcagtaacaaaggactcatgtaagtaccaccgatctgtggggaaaaaggggaggaaagtacagcaaagtaaagaaaaagaggggaggagggagcagagaaagaaagagggcgaaagacggaccgatccaacattggacagggcaaatgttccgccggaaaggtcttccagcgaaagtcgtccctcccgagcccgcgagcacaacttctcgaaatcggatgcaatttcccaaatggtcttcttttgacagtttttgatgttcggaaccgcgagaccgtcgggcgtatcaatggccagcgaaatgttgtggaaacgcttaaattggatttggcaatattttagcaatttcccataatatttactttcaaaatgagttgctcgtgtgacgggtcaaaggacgcattaagacgggggaatttggtcaatgccagcgaagtggccttgacaaagatgggcataaaactgagtttagaaaggcccttttgagcagcgatcggcgacaaatgtttctttaattccaccaaatgatcagcaacgatctgaaattaaacagagacttcggatagttaataatagagatcggaccggttcggtttttttcggtttcggtttttgaccgaaaaaacccgaatcaaattggagcgatataacctgttaataataataaatttattgcttttttgtgctctttttcattttgaagaattttttgtaaaatattttctgctgttttgaaaaaaattattaacaaaaatgcaataaaaacgaaaaatacacccctgagaaatggaaaattttatcaaaaattcatattcaaaatttatttacttgactacatttttgatttttaaaatattttatctcatttccatttttagcacctattttgggggtttataatagggttgctccccgaccccaagccccctacctccgattttttatcccccgaccccacgacaatagctcggggaattggggactcttgaaaatttttaaatttg

SEQ ID NO: 44903 - DNA, 1171 bp, Heterodera glycines
tttttaaaaaacatttgactcagggccccatgaatttcctttaatccaatggaaaaaattgggataaggggcaaacttttaattgggataaagggctttttgagtaataggccttttcgtgttaaaattggggatgatttatcctccagtaaaaaagttggctctggcgtcccccagggctctgtccttggacctttattatttttgatttatattaacgatcttcctgatgctttgccatcaggagtaagaattaaattatatgctgatgatgttaaattgtatatttgttataaagcaagaaccgaaacagaaattatgcataaagcattgcataatttatcggaatgggcaaataaatggcagatcagaatctcaattaaaaacacttttgtacttcatttggggaataaaaaccccaaagaaatatataaaattggtggaaatataataaatgtcgtggatacaattagggatttgggcataaatattgataataaattgcaattttccaatcatgtcacacaaataataaagaatgcatattacgaatgcgttctttatttcggattattaagtcaaagtcttctaggatttggattattttgtacaaaacttatgttagaccgttattggaatatgctcctgaggtttggaatctatctattcaaaaaaatattaaaaaaattgaaaaatgtcaaaaatatttcaccaaaaaaatcatacaactttgaaccctagttataatcatttttatgagattttattttttcgacttaattattttattccttttaaattcacaaaaattctaagattcaatttttctcattttattttttctgaatttccagtggaggggggggggggggggggtggccccgggcgttgccgatagagcgcagtcgggaaaaaaaactttcattgcaatttttaacagaatttgttaaaaattgctaatttttgaaaaattcaaaaaaatcgactctttatcaaaaattttggaaatcggaattccgacgtccaaaaacgtctgaaattggaattccgtaccatcccctggtaagcatactataataaagttctttatgtttctttccatgccaaatcagggggttttaaatactgatgatcgatcattaattacctaattgcatgaaataaaattact

SEQ ID NO: 44904 - DNA, 954 bp, Heterodera glycines
  unsure (1)..(954): unsure at all n locations
gaaattagccaaattttttagaaatttcccttttttagatgaaaataaggtactaccccaaaaccagaacatttcttagaaataacaacatagaaaaaccctgtattatttggaaaaataaataaaatcaaaagaaaacgtcaaccggtgtcgaactcataacaaaaggtattgttaatgttgaagcactaagcactaaaccacaaatattctataaaactgcaagcaaatttactttatttcataaaaatttgtaaaaggttaaaaaattcaaaattgtataaatttctgcctttaatttcacgaatatgccattcttaggggtgtgtttttcacccccgtgcccccgcggggcgaaggtcgcgggggcgggggttgcgggggtctgagtcgcgggggcggnggtgaggccaaaaaacctgtcccgtccccgggggcgggggcgggggcggggtgggtccgaaccctatttaaataatatctattctattaaataaaaataaaaataattattttgcttttaattttatcatttgcatttttcttatttcgtctcagcatgagataattattagtataaaattttcctttttacaaaaatatatttttttaattattcgctttaattcatttaattttaaaacacttgcttttaaactattttgtgttaatttgtaaacaagagactgttattgataatgactgactttttatgcctcgagagttaaatatttatttttctttcttttccttgcctggggcacgcagcgcaacgtgtacgcgtcctgcaccttgccgcagtgccggtgcgattcggcaatctcggatcggttcaagtccgagtggagcaaagctcgcagccgaccggcaaccaaattttgcccatggtggggccgaacgcgatgaacatctttggggaatgatcaattccagaaaatatctaattttattttt

SEQ ID NO: 44905 - DNA, 1625 bp, Heterodera glycines
tcggcgaacaaaaaccagaggaaaatggcaccccaatgaaaaaaagagaaatcaattcaaatgggcgcaatttttttttcctaaataggcagaggggagcgaaaagcgacggaggaaagccaacgaaggcggggcgcagaaaaagggacaaaggacggacaaattagcaaaaaggtaggacaaaagaacgaaaatgacggacaaatgagctaaaaggtataggacaaaagagagaaaaggacggacaaaagagcgaaaagaacggacaaattagcaaaaaggtaggataaaagagggaaaagtacggaaaagaacacaaaacaaaaagcaaaagaacacttagtcaaactcagtttaaaaagggtgcacttttacggaacagaaactattttggtgctttttggtctcgggttgacccacgcttaaaactcaaaatttttaggtcatctgaaagtttgaacttgaccaaagcttttgaacttgtcgaattttgagacaaaaatgctaatttttacaaacatgcagaatttaaaaaatacaaaatttcaacgggaagtcaaacattttgctaaatatttctgtgcaaatttccaaaatgatggaactcttgctggtcctcattccccgccggggtgttcaacaaccgcagagagtttaaactttaaaatttgcaaaataaacggagcgaactcagacggacggacaaataaatgacagagcaaatcgaccggcggcggtcggtgtaaaatacgcaatttgaaaaaagaaaataaaattaaaacaaataacatgcaaaatgagtgatcagatcatcagatatcaggcctcactgatcaaaagaaaattcaattgttaaattatgggagacattttaaaattggataaaataaaataaaaatgccataacattctaaacgaaagtgccgattatttttgtgaatttgcaacaaacattcgtatgtatgtacttaaaaagagatgttcgaatttttcccctttattagcactgacgacattcgctcgctttgaggaagaagcatttcgcttgaggggatttctgaaattgggccattcatttgcatattttgcccaaaggcgccgattgtctgtgccgtggcaatgtttttccggtaaaacaattccgcgttgattatcaacagcgaatattcaggacaaaaaaaagaaaaaaatgacgaatttaagcatccaaaaaaatggcaacgcattttaacttcctaatttctaatttaatattttgttttgtcctacgaaaaaatgtgaaaatttaattaaattaatctatgggaataacgcttggtaaattgttcgtttgatcttttagattttaattgtctttttattgatattttaaagttgaaaatcgtaaaattaattcccacgagggcaaattcaatgcatttgtgcagcttacaaagccttaaaattatcattcaatacttttaaaaaaatgcgaatctttaaaattaatacaattcaaaaaagctgtaggaaatgtcagttttgtaatatgataccatgccaatcatttagccaaaattaattattgatttgcacccaatcaatctctctctctctcagtcctcctctaatctctcccccccccc

SEQ ID NO: 44906 - DNA, 1469 bp, Heterodera glycines
  unsure (1)..(1469): unsure at all n locations
agggcggagtttggcatttggtaacaattagcatgcaattaattaattgttcccaaattacatagtgaagttaaattacacacctttttaattgacacagatcactgcgacaaatttcctgttgccatatgccagataaacatcgagtttgttttttacgcaaaaaatatttggcaaaaaattcgtgaagttcatgatttttttggcaccctgactttttactgtgactggatttacctgaatttttgtatacaaaattcgggtgcaggctttaaaattagaagtcaacgagggtcattgatcccgtcctgggttttacggaccatagttcaggaatttttttcatcctgggtattcctgggccttggttttcctgagtttttgtttacgaaatacgggtagagcctttttaaaatacatgttttctattaaaaccaatataaattattttacttattggattcttaatataaaattatttatacattccaaattggcacattaaaatattaattctaattatcatttatacctaattaaaataatgtagattaaaaaataaaaataaaaatggcacaattcagaaagccaaaaggaatgaaaatgtagtttttggaaacattttttgcaaataattataaataaatagttaacaaattgtggtacgttaagcacgtcattagcagttttgggtaattaaaacggattgtttactagaaatggaaaatccatttctgcgaattcatttggttattttttgtaataatatttccattattttacaagatattaattatttttgtcattcatttaaattattaattctcatttaacggagcattcatttccttttacccacgaattaattaaagtgcttcagcgttggcaccaaaattgaaaaaaaaatgggaaacacgcaatgggatatgccgtgccataaaacaaaaaacggattaattcacttgaatcattagtggaaagtgaaatttaattgaaattgagtaaaattcaaaaactaaataacattctccaataagtggaatttatacttttatagcaattaattatttaaatttatttatattatgaagccaatgatttcataaatcgaccaataaataaaactaatagcgaaaatttttcatcttggtttcatctagggttgaaggggaggggcccatgtggttgggcaaaaaccgagtccagcaggtattttggctcgatactttagggattctcgaccgcaattagtgctcacatttatcttttccccaaaaattgactggctgtcccgtgtccgtttcaccaccaatcgcagcagcctgcacaaaagtgccgcgaaatttggcacgtcaaatttgcattgatttcagctgccggatcaccaatgatcagancgcactgatgacgaaatatttttattcgattaaattttgtaaaaaaataacatattaaaaagatactaattt

SEQ ID NO: 44907 - DNA, 945 bp, Heterodera glycines
ttcggtggcgggagaaggcaaaagggcatatcgacaacagcagcagaaaaacatcaaacttttggaggcattcaccacagcggtgctgacaaacacaaaacaaatgaaaagcgattccaattttgcttaaggtaatgccattttatttggttgccgattacaaagacaacgaattactcgtcaaatggcaaaaaggtggtggaatgttggaaatgtttttatgtttctatttttaagcggcggttgaactgttcgaacggccacagtactcgcgacttttaaaggtactgtagtttgtggatttgtcagtgcacattttgtgaatgaatatgcaatttcaaatagactgggatgacaggcgacaatatggtcacggcagaagtgcgtcggatgggcctcgaaacggcgccgcttctgctcgggtcggtggtggcaatgattgtgagtgaaatgccaagtcaaatcaaatgccgaccaatcggccgttgtgccatccaaccaatgcttctttcctctcaaggtgttcgtcctttgcactctggtccgcgtccgaaaagccgagaatcgattctgggaagcgtttgtcggctgtttggtccctctgatggcaatggcaattttcggcattttctgctggttcatttgccttccctcttcagtcctcctccatcggtctgatgtctttggccgggtggcgtttccaatccataattgtcgcagcgctttttctcgtgctgtccgttggtgttgatgacatctttattttggttggtcatgaacatttttgtgtgttttttgtgcttttccttttcagatgcgtgcttggcaacggagcaacgaattgtttaccatttctgaacggatggctcagtgcctggaggacgcggggccctccatcacaattaggttgatcagctgattgattcggttgattgattgacagct

SEQ ID NO: 44908 - DNA, 803 bp, Heterodera glycines
agcttgtgagttgtggatcatacggggattaacaggcggcttaaaaaaccccaaaaaataattttaaaaattttttacaggcaagtggatttgaacccacgcgcccaaaaccatttttaaccatccgagcaattcgtctcccttccttacgttaagtcgagaatgggcccgcagcaccaaaatttccgatttttgaggccctgtaacttttgaactaggcgcttgacaccgctaaaattaaaatttacaatagaagtcgatcctgctctatccaatgggatataacacatgtgcattttcagacttacagctcggaatgttcccttgtgaagtgaaagacgagtggactgttcggtggtctatcgctttgaaaaaatgttcgtagccaccaaaaattgaccaccttttacccatagaagctaactaattgaccgtattttttttgcttttaaatcgcttttgttttaacaatcaaagaaaaataatttttaaagatagaaagaaggcgtaaccactaggccagatatacacaccgtttcaaaaaacgagacatgaaccaataaatagagagtgcagagaaaaaaacatctctcattttggcatactatttttttatctctgttaatagagaaaaactgaattcatctgtttaactttttttctgcttattaaatccacttcaaattttgcatattgaaagagaaaaattttctgcaccagtgaattcattattgtctatagtctaatacaaaaattataagaaaatccaaatttcaaacgctcatattgtttttctaaatcat

SEQ ID NO: 44909 - DNA, 1666 bp, Heterodera glycines
ttttcaaaattttttcgagctaggccccctagaaattttcggaaatttttttttcggacgaaaatgggggtgaaaaatatttttctggggtaaaataaggtgctgagtacgaatatgatgtctattttaagtttcataatttttggaattttttaaaaattctttattttttggcaattttttggccctcggcaatttgggcgaatattggaaaattcatatctagcctaagggcttaccaattttgagcaaataaagcattaaaaatagagaaaaatcaggagaattttatgggatttatttgggatttctatcttaaaaagaaaacaagttattccagaatttctgaaaactttcgatttttcagaaaaaaattcataacccccttctgaaaagaaatttttgaaaattaaaatactacaaaaatccgcaatttttttctttataatataaattttattttacatttttatcactttcttacgaattgttacaaaaataaaaccgattttgggattagggaccaaaggggtgagcataggatttttgagttgaaaaattttttcaccaaaatattccaaaaatatgattttaggggttatttgggccgctgatcacgaatacgtgatcagattttacttttgacatcgttaaggcctcagaatccctgtgtgattggggattctgaggcatcattttgagggggggggggggggcgaagttcgaagccgggcggtgtacattatttttctaccatttttttcgtgtttttcaatttttattcatttaaaatattttttgagttaataaataaaaaattatatttaaattaatttttttttaatgaataaattttataagtttaaatgaattatttttttaattgatagaatttcatgtattttttaaattaaatttgttaaaaaatattttcattttaatttaatgaatttactaatcactgttgtacctcttctaatcattgttgtacctcttctaatcactgttgtacctcttccaatcacagttgtacctcttctgatctctggtgtacctcttctaatcattgttgtacctcttctaatcacagttgtacctcttctatcactgttgtacctctttttatcactattgtacctcttctaatcattgttgtacctcttctaatcactgttgtacctcttccaatcacagttgtacctcttctgatctctggtgtacctcttctaatcactgttgtacctcttctgatctctgttgtacctcttctaatcactgttgtacctcttctaatcactattgtacctcttctaatcacagttatacctcttctatcactgttgtacctcttctaatcactgttgaatctcttctaatcactgttttacctttcttaatctctgttgtacctcttctaatcactgttgtatctcttctaatcactgttttacctttcttaatctctgttgtacctctttttatcactattgtacctcttctaatcattgttgtacctcttctaatcactgttgtacctcttctaatcattattgtacctcttctaatcacagttatacctcttctatcactgttgtacctcttctaatcactgttgtatctcttctaatcactgttttacctttcttaatcaagttgcacctcttct

SEQ ID NO: 44910 - DNA, 928 bp, Heterodera glycines
  unsure (1)..(928): unsure at all n locations
taaattaaattntggatatattcaaattataatgaaaataaaatcataacttaatgaaaactttgttttcaagacattaatgaaaaaggttaaaaaaacgcctattattttgttgtatttctctgtggtgcggaagtgtaaaaaagctcaacccatggtggactcgaactcacgacacctcccataacgcgggatgttagttttaaaaatttttatggcatagttaaattgtatgatgaaagaaattgaatgctagtcgtattttctatttcaattatttagagtggaatcaattgacatagttaaaataattttgctttcttgtatttacttagagaagaattatttgtattaaaacgtataattaaatacatttcttaatttttatatttttgtaagtcttgtaaataaattatatttaaatatgaagtatgaaatattcctagccaatctacgtaaataatttggcgatgctgtcctttatttcggtacgttgtcgccaaccaaaattgctcgattttatagcttcttgtttaatattttttcttcgatttttttgaattattatttttatcatgattccatttattagaatattcctcaaagaatctaattttagatgtatgtaaacatcaacaatcattaatagaaaaaagataaaaattatttaagcgtgcacctacattaacagtattgtcttgaaaatagtccagcaccaggcgacgggtttcgtagttgatccggttgaaataaagccatcaataaataatttattatacaaattttttaatgcttttataaggttttatttttctaagtatgtatttgacttaattcggtttaattaatagcatgttgtaattaaattaatttgatattccttttttattcaaatacgtatgatataccatattaacaattaagtgct

SEQ ID NO: 44911 - DNA, 871 bp, Heterodera glycines
tatgtattatagttgcaactttttcattattaggagcttctcgtcagaccccagcatgattaccttggtagaaatcacatttatttatatttttactaatttgagcgtaagaaattataacttagttcttcgaaaatcagtatatttgtttattttatttttactttgagtttgtagcttttgtttaattcggtgaaatttttgaatcagatttgtagttttggattcatgttagaaaaataaccgaccaattttcactcaggatcgttttttacaattttaaaatttttgtactcgatcggttatctcaaggattgttcagtctcatacattttccttatctaaaatttcttatccgcttccgtcaacagagctgaatttaaatacaattttttttcccagcatttgtttttcacttctcaaattattcacttgtacatctttttgccttttgccgttggaaaaaatcctatcaaaattgtgcacaggagagagtcaaggccagtgataaactgtaattaattattatatatggccttaatgtaaaaattaataaaaatgcataaatgaaaaaatatttgttttaaagaggagaaagttcgtaagaaaaattattaaatccttgatgtctttcgcttcaagaagctaaaaataaatctaatgggatttatgaaattttaactaattaataataaattgtatcctttttttataagcctttttccttataaactatgttaaaattttatcaagattgaattttattttgctcagtgataatttacttttgattatattggaaatttgaaaagtaagaaaaggatctaaacaaatttttataaaatattaatttgttgacttgttaaaaagg

SEQ ID NO: 44912 - DNA, 1404 bp, Heterodera glycines
ttcctttaattatttttttgtatatttttgatttcgaataaattttggtcaattccaaacagccaaaataattctgatcatggccaattttgctgatcaatagaagctttttcttgtataaattgaacatcttttgttaaatgcgataataaggcacatataaaaatataacaaatttaaaattaaaattaaaaaacaaaaaaaatgatgggcacatttaaaaattgggattttggtgatgtggtgaaggggggggggggataaattggagacaatgctaatcggcacttaaaagctgaatagacttttgtgtgggtgggtgttctgtttatgcttttcaaaaaaaaatgggcttccaattgatcagccgatgtgtgcgagtgccaaaattgcttttttggcaaaaggtttaaaatttggcacataaaaattcaaatttaaaatcttcccattccctggcttaaacccaagcatcatcagctgatttgtggtggtgaaatatcaattaattaaatcaaacaaaacattatatatttccccaaaatttgcgcgctgttttcatcaattctgtggtgcctttttcttatcattattatcatcaatcaataattcggatcaatcaataatcgcgcggtgttccaccactgatcaattgatcattgctcgtcctccagcacgtacaccttcggcgagttggacttgttggtcacaacggacgaacggtgcttggcacggatcaggtggagactgaaaagcaagcaaataaaataatttttcccggggatcagataagtcttgaaattgattagatttgtctgtgattgctttgattaaaggtaatcagttcaatgatcggactctgataagatctcgatcatagtcctggtcaaaattacaatagcgatttgtgccttaatcaggtaatggaaaatctgatcagttctttgagatcagttcaaagaaagtttttatcaagctaaataatcattgaccgtccgattagtgatcatggattaaattccaatgtatgttctaatcaagcccaattatacattctgatcaattgatcagccaaaatcagtgaatgccccgtgacgtgttcattgttcatcacctgctctccgcttggtcagcgcgtccttccgcgtcctccaactcgcgctggtatcggcgcacgcgttgcaagttttgcatggtgacagcctcctgaaaatttatgcaaaattaaaaaaaaatcatttatcatcataccgcttcgcccaattgtctcttttggatgttcagcttctccaacaatcggtccgctgtgtcttgggccatgatgaagttctacaaaatgtttcccccaaattaattaattaataaagcatatttaattgattgattgatcagtgtctgccttgt

SEQ ID NO: 44913 - DNA, 1236 bp, Heterodera glycines
atttaaagttacgcttatgattcatacaaattagtcaatgattgacccaaaatatgattggaatataaaaattttctactgttacaatttaattttttatccatttttaccaggattgcatttcccatttgggcattcgccggtcaccacgttacatgcagacccatcagcacaatggcactggcgtgaactttaaaaaaagaatttatatttaaattaattgaatttgcaaccaatccaagtgccattgggttggcaaacacgaatcaacacattcttaaattggaagaaagcgaaaataacttcttccaaagtcgaaccaattcctcgaaagccggcaccacataagaaaatttgctcctcgtcaatcctcattagccattcgcctaattatttttttacaagaaatacgcaacaaaaaatttagaattttaagtttttttaattaagaaaaattgaaattcgaattttttaggaccttaatggaaaaggaaaaaaactaaattttaatttggatattttccacctggaatgcccatattgcttttttcagtcagctgtgatgaatcagatgtgcctgacccgggcagcatcaaaaattttggcatttttgctacagtttcggcacttgatgaagcaaatgttggcccattgaagccactcttgatatgtagtaattggatgtttattcgtaattttataaaaaattaaaattttttgaattcttttttcatagaaataaattctgttattttgggttgttttgggtttcgaatttggatttttattacatcacatcaattaattaccattgcctttacgctcttcggcaatttgctgaaaatattgtgcgcaaaacatgcattgttcccaacaattacggcaagttggaataacacatctgcatcggaaagctgtaaacatcggaaatatgatgtttttcaaaaaattttgagacaaaataagggggaatttacggccgttgtcaccagattccaagcgataaaaaacgcttacaaattttttttatttttaataaatagaaatttttttgaaaatattttaacactttaataaattgtattttctccatgacttaatcaattgtatttaaattagagctcggcctgaacctggtggatccatgcctggattttcctgggtctaggtccaagtcaaatagaaaaaaaccggtgatggagaggttcctaaaactgccaaaagcagaaaaactaa

SEQ ID NO: 44914 - DNA, 1210 bp, Heterodera glycines
ctcctttgcttgccattttttctcctttttatttaaatcatcattttcaatttcatttctcattatccgatttgtccaccatttcacatctgcattttctccatctttcgtcgccccatttgcattttcacattcattcacattttcaaattccttttgtccggcccgattggacatccttttctcaaaatgttttaatcatgggaggagaaaaatataatatttgatacatttttgatcgaataaattgtaaaaatatctgatttgacgcaattttgcgaaatgttcttatttttaaccataaaatcttattttttggcctcaatgttcttattttgaaaaattttcgatccgaaccctggaaaattttacacccataaaaatgaagctttttagtgcctattttccatttttagttattttttcttcatcatccatacattaattactctcttttcttttgatatgaaattttccaaaaaatttaaaaaaatgatgccgacttttcttaatacaaccgatggagtcaacccaacagaccaaggcaatgtttctaaacaaatagcgattcaaaaacctattaggattgtattgagattttttgtggttttcataaccaacgaagcctaattcattctcaaacgactaaacttgtcataaaattgtgattttacaaaaaaatttcaaatgaaaatgaattaattaaatttatttttttcccattaaagtgccgcccccttttgacggctcgccgaattcgccgacgccaagtgaaagcggctttgagttggtggatgaggagggcaagcagaagcagcaacagatggacggagaagcggacaatcagcagaaaaatgacaaaatgtgggcattgtttgcctttaattcggaatgatttctatttctgaccattggcgacaaaaggacaaaaaatcttacatttgttgtctgaaattgttgaaataatccctaaaacttgggatatccttttttatctccattcatttttggcttagaatccaaagtgtcgaaaatctgcgagttgccaatgggaaagaagcgcaacagcaaatggccgaacttgagcaggaagtggccgatgatcagaaaaatgcgcagcaaaaggacccatcccgcgcttctgctcccaaacggatggaattggccaaaaagttaaagtcaaagggtaattacctaattaggcattaag

SEQ ID NO: 44915 - DNA, 1112 bp, Heterodera glycines
cggtctccccataaatctgggcgcatcggtcggggggactgccccgaaaacaaaaaaatcgattttttcaagtgtccgtttggggtactcaaacaattatggggagcaaaaatccaacgcagaattaaagtacaggctatagggaagctattcccgaaggattcggtctccccataaatctgggcgcatcggttcggggggactgccccgaaaacaaaaaaatcgattttttcaagtgtccgtttggggtactcaaacaattatggggagcaaaaatccaacgcagaattaaagtacaggctatagggaagctattcccgaaggattcggtctccccataaatctgggcgcatcggttcggggggactgccccgaaaacaaaaataaatcgattttttcaagtgtccgtttggggtactcaaacaattatggggagcaaaaatccaacgcagaattaaagtacaggctatagtgaagctattccggaaggattcggtctccccataaatctgggcgcatcggttcagggggactgccccgaaaacccaaaaaaaaattttttggataaaaattatttaaatgaactgactagataatatttaaaataggttatttctcttcctttcagtatccctgcaaagtttggtgcgcttctgatcagtttctgaaaaaaagttaagcctaaactttttggcctgtttaaaaaggaattaaaaatttttaaaaattttattcatctccctttttgatagaaaaagcatcagagtgcctaaactaacatgtaaataaaatttggtgcgtttcagaaccctttctgaaaaaatatttaagaattaattttgcaaaaaataaataaaaacgaaagactcagattttcgaaaatttttttgagccagctagctcggcgctcatttcagtgtaagttagtcctttaccggggagtatccctgcaaagtttggtacgcttctgctcaattagcaaaaaatatgagtgatcgaattttcactaaaaaagttaagcctacattttttggcatatttaaaaagcaattaaaaaatttttaaaatttaataattttcctgcaccgaaggtactcactcggcctcttcgc

SEQ ID NO: 44916 - DNA, 1193 bp, Heterodera glycines
  unsure (1)..(1193): unsure at all n locations
tttcctgtcccagattttgagtccggccatcttgacccgctaaataatgtccccccagttgttacatcctgccattctgtcccgnctggtgctgaccccggccattctgcacccgacagtgatgtcgcccactgtgctctccccgttcgtgctaacgccgcaaatttctctcccaaatttctgggcggtcttttcctctcccctnacgcactgtcccccgtttttaagtcgccccttttcgtttattcgatcgttttgtcgccgagttggctgagctgatcaaaaattgccttcataaatatttgttgttttccaaaaattttatacagaaatttaattttatttttcgtattattttattttttttcttcttaccatcttttttttgtacatatttttttcatacatatttattaaaaaatttaataaagaataaaattgcaagggaaatacccaaaaattttacaatgtaattttttgtattttacgagtgaatgttacaaaaataaccgtttctacaatattttacatgactcttaaatatcggctatgtttaattaataatttgcattttttctttttattatatttttattacttttcgttcgaattcgactcaaatgactgtggtttaaaaaaataatatttttgatttgtaatattttagtgaacagttcatttctcgttttccattttcggtataaaaatcatttcacgcatatccaccaaaatcggtaatttgtggatttacggaaaattttgcggtcgagatttccgagacttcgttaataaaatttcaataggtaaaatgtttaatgatgaagaatanaatanaaagctggacacttttaattttgcggggaattacaaataattaaggggaaagataacgaacgagggaaatgacagncaatttatggaagaaatgacaacaaaaaacgggaaattttatagacacatcgccaagaacattncaatcggcataactaanatttctctgggcgtatntgcnanngcaaaagtactgggattgaataagcttannacacactanaaagcattttatttggggctattggtnccnatttagcactatntggtaaattatcataattggacaccgtttaagaagtcttaattattaaagactccataagataagcataaaacattcaatgggtttcaataataca

SEQ ID NO: 44917 - DNA, 465 bp, Heterodera glycines
gggtactcaatcaattatggggatgcaaaagtccaacgcagaataaaagtggctatagggaagctattccggaaggattcggtctccccaaaaatctggacgcatcgattcggggggactggcccgaaaacaaaaaaatcgatgttttcaagtgtccgtttggtgtattcaaacaattatggggaacaaaaatccaaggtaataagtaagttgaggtatatagaagctattcccgaaggattcggtctccccataaatttgggcgcatcggttcggggggcctgggccgaaaacaaaagattagattttttcaagtgtccttttggggtactcaaacaattatggggagcaaaaatccaaagcagaattaaagtacagtctatagggaagctattcccgaagcgcccccccccgcccttcagaatttgaaaaaaaaataaaataataggagactcagaatttgaa

SEQ ID NO: 44918 - DNA, 1169 bp, Heterodera glycines
  unsure (1)..(1169): unsure at all n locations
tagaaaattttaaagtttaataatttaaattacatataatttcattatcactttcatttacatacactaagaggttaattttcgttaaattttataaattttaatataatatttgaaattttgagagagagaattttaacatttacttagctgtaatccttctgagattttacgaaaattttctgaactttaaaattcgccagctcatcaatattaaatttcgtcaatttttttaatttaaaggtgtacaaacaaatttcattatgcaactaaaagcctttcatttttatataaaattgcttaagctcattaaattaaacaaattttcagaatgtcaaaaagtttcataaatattattattcaatttttatttctgctatgcttattttataattttgctaaatcttttggcgaaaaatccgcaccaaaccctcagcaaagtcctaatgtatatttgaatataatttcaaatttaatgggtataatcacgtgattccgttgtcaaaaatgtttttaactaaaatttcattttgggatgccaataattagggactgttaattaggtgtatttccaaatattatatttttcagtccatcataaacagttcctcagggaattatgaaagtaaagcacggattaatgcagaacacgatttgaaaaatttgccaccgtaaataggaaaaatttgaacacatcaaaaataacataaattttaaattcatacaatttttctgaaattttcctcttaattgccaaaatgtgcactaaaaaaacgtaaaatggcaaattatggatttattctacataatatgaattttttataaattataaaatatttaatgaaaaaaaactgccgtttttgcattttagttccaacaaattccatccgatgtcttgtcagttttgtcaaaagatgttgcggcacaactggaagcaatacaaaacaatggcacattgactgtgcacgaaaaggcggaacaaattgaccaaattatgactgagcagcccagcgaagtgttggacaaaattccggacccgcccaattttggcactcttccaatgaatgtgagtgattttattcatttatttgtngtaattatgntgttttatgtccattggctaaaaattatttatttttatgggaaggatcccgcagaaatcccaaaaa

SEQ ID NO: 44919 - DNA, 1190 bp, Heterodera glycines
ataaattttcaatatattttttaattaataaaattgatgtccttaatttggtgcattaaaaaatatttttgtgagttttaattaaaattttcgattactcccgctcccgcccgggactcccgttaaaaatggacgggattttaacgggagcggggattttttacgggaatcccgttcgggactcccgtcccggaaaattttgaacttccgatcccgctcccgctcccggaaatttttttttaccggactctaatttcgacattgagtaaattcgagactatagagcatttttagaaagtaatattaaaaatttgaaaatttgttagtatttgtgataaattttcctattcattttctaattcgtaatttttaaaattattcaaatgccctcgcaacgtccccaattaaacagaacaaacttgtagagatcgagccgggccgggcccggtacgatttttgccaggcccggaaactggttgcttctgaaaatgttagcccggcccggccctgcagattcggaaatctcgatctctaaaaaattgttatctaattttttgaaaagaagcgagtgctaaacaattttacaatcagaaaaaagttgttagaatttcaatctattttgtagccatcatcagtcatttacgtcaacacctgaaaaattataatgtttaaactttttggttgcatactgaattaatcaagaactaaaaaatttggtatttaaactgtagctcttcttgacaatacggcggatgtttagaatattcttttagtgtaaattcaatggaattagttcaaccgtttagaatgagatggagtttaatttaaaattagaaaatgaaaacggccacgcgaaaacggccacgcgatgactgaatcaaacaatcttgatatcattcgaaagctcttcacaggctctattagcctactaaaaattacagaaaatttagaactataaaaaaagatagaaataaaaaacttcgaaaattctgccttttttgcggttttcaactgacaacttttttgagagctgatcaatcactgagaaatagcttataaatatcttctaaacatctagggctttcgaatgataccatgattgtgaagtttggccaacaaagaaaaagttatagctttttgaacattgctgagacggagaaggccagacggagttgacccctaccgaaaat

SEQ ID NO: 44920 - DNA, 1615 bp, Heterodera glycines
atatttttaatattttatgaattatccatatcacaatccattgtttgtgctttgtattgctccttttttacccccaataattcattgcttttctgtgctttttcacttctttaaatttaaattttaaatgctttcccaccactttccgtctcgtcaacaaattttatgcaatttttttttcaaaatttaaattgttttttcacttttcaattgctgctgatgcttttttgtcctcctccggatctcttccacaacaatcacacacatgacacacagtgttatcatttttccggttccaatacactttgttcacatcatgaatttcttcttactaactgtttcttggacactctctcttaatacgaatttttcttggtgccactcgaacgctgtcaaatgaatgtctcgagattgtgacagtaaaaacaagaaacagatgaagaaagttattctttcaaaatccaatttaaaatgataacaataattatgccaactacatggtatggggactgatacactacagacatatgtgccttaattttaagaaaaaggcatgaccagaaaaatcattggataacattaataatggagaccgagcgggaccggaatcccaccgggatcttgccaggactcccaatcccggttttttggactaaacaccgggactgggatcgctccccggtccattttccaagtcccgccaattaggaccgcgactgagtttacgctattaatctcgggcttgagaatggtgataaaaagaaaatagctcgggtttgattcctcttccggaaattatttcttcttttttttgtatgacaaataaaattctaatctttattaaataaagtgcatgcaaatgctgtctgtgcgtacaattataaagtaaaccgaaattttcaaaaaaaaaaaatcaacagtttaaacaaataataatctcgactgaatgtgtttgttcccctgacattttgattattgaaagactgaaaattttctaacatgcgttggaatatgaactgcttgattttatttaaaattgctcataatcacaacattttttggcaaaggtgcgcctcaaaaagcagttttgcaaataattttttatttaaatgaatagaggaattgcaaatttttggtttccagcccccttggtttctttgaaaaatcttttggatatttttctagtgattaagttaaaatttaaataaaaaatcattcaattttttataatcacggatcacggggttttgggttgccgtgatcacgggtcacggatttttttggaagtcccgtgatcacggatttccgtgattggaaattcactcacggccagccctgattggtaatcatgatcaaatgggactgataaaccttgaaatatatacatatgtgccttgattaatcaagaaaaaaaatgatcagaaaagggttaatacattaaaaaatagagaatggacgagaccggcggggccccgtcgaaattttgcagggactccagcaggtctgggtttttgaactaaacgccggcgggtccattcttttgtcctacaattagttggttgagtggtagtttcacggattgagagtgctcgggttcgaaccctcttccgggaat

SEQ ID NO: 44921 - DNA, 922 bp, Heterodera glycines
aaaatcaaacaattgtttaattattccttcggaattggggacccacggaaaaagaaaaaaaaaggtttttttttcattcattttttctaaggaaaaaaatgggccccgttttttttgtcatgaacaaagttcaaagaaaaattttttccatcgggccaaaaattccgagaacgattaaaagaatggcccaaactacggaaggaggcggccggtgacgcgggggagggtgcacagttcctccccgcgcgcatcaatcgcgataattttaaatttgtattcttcgttggaaggcgctccgacttgaaacgtcaaactgtaaggctccatggagctgcgctaaacaaaattgtgtttattccgatggcataagggaaggagggagggggggaggggtcggagcagtgaaaaaactacgaattgtcagccgaaagtgttgtagaatgggttcaatttgctaatgatttttaattttacattgctaagtgaaaatcagcgaggttcagaacattgaaaatcggaatttcaagtattacttcaatcgggtaatagtaactagagttcgacctggacctggatccaggcctggatttttcctggatccaggtccaggtcatttttcggcaacctggatttttcctggacctggatttttctggatttttgtccaggaaatcaaggtccaggtcaaatgtgaaaaaaaatccaggtccaggtccaggcaaaacaggaaaaaacctggattttcctggacaaaattttagaatttattatttcaagtgaccgatgttttttcaagttttcaaaaacagattaaataaatttaaaaacacattattattatttattagatatttttagatgcttctacgcaaataattaattttttcaaaccatttttttgatttttaaaataaatttcaaa

SEQ ID NO: 44922 - DNA, 1107 bp, Heterodera glycines
tttcccggtcccgctcaactctagtttttaggaattttttaaaaaaatttcaatttatcaacgggggggggggggacattgaactgctcgcttcctttgtcctcacctccacatcctgctgtcttccggtggaaaattcgtaatggtgtcttcccgcaactcgtcggaattgtgccggtcgaatggcaccggcgccgccgccatttgtcgtggtgccgccgccttgttcgcgcgaatagtgcccggatttcatggcgacaaaaagctttgccaattgtgagccgaaatcctcgctgatttcgaacggatgcttttggcgcagcaattcgtccgcaaacacacggacaaagtccggcacaacgcacaaaacttggagggcctcaaagaaaaataatggaaaatagtaaaactatttgacgaaatgggcaatgccaaacctttccaagcagaaattagttttcggtaaaagaaaatcgcaaaaaatatttacaaaaactgccgaaaaatgtaaaaaacaaaaaaaaatgattttttaaacaataattttttagaaaagcgtaaaaagggcacaaaatgccacaaaaagacccaccaaggcgaagattagcattttcttaagtgtttttaatgtccctttttataatgatttttaagggcaacttttttcaaaaaataaaaaacaacatttcaaaacttgctacaaatttgtaccaaatctttagggttaaacaaaatgctaaaaaataaccacaaacattacaaagtttccattttttttaaatatcacgcactgaattgatgtaacaagatgagccaagattggcgagcccagtgaggccaggcccaccggcactgaccaagccaaggccctcctcttgaattgccgagaattcgtacctataaacggaaaattgtgtaaaagtgacgaaaaattgcaaaaaaataaaacaaaataataatttggacatctttcactcaaaacaaactgttcgagaccagcttgtttcgaaccctcgaaacgatcattttttttaattcaaagattgaaattttggtacttgttaagtttacagggccaattctacatacatttttagacgccaataa

SEQ ID NO: 44923 - DNA, 637 bp, Heterodera glycines
gtagaaaaactttcatggcaaaattgctgatagaacaataatgagcgaaatgttaggcctcgggtgggaattgaacccactcgtgaaaaactgaactaaaaactttatattttgtgaaaatcgaactttaaaaaatgtcacaaatcgacacagagccaaaaaatggctcgaatgagatctccgttctttctggaaattctttaaataaaattcaaaaaaagaaaaaaattcgcgggggccaattaattttttcatttggacccggtcggtatccacgcttataataaatctatatacatatatggtttatgttttacttagattttgtttccgtcctatttaaaatattccacaatttcaacaactttcagttttagcaatgaattttttatttttgtttgcgatttgcttcgttttccttacgccgttagcagaaggcacaaaaaatttggaggacattccttcgggtagcacaaacaatgaagcgggtgatttgtgttaatttattcgaaaaatagttaaaaatttattttcgtaaattggacacgaaaaaattatgagaatatttaacatgaaatatttgttaaattgataaaagcatgaaaattattagaagaggacgcccagcaaagtgatg

SEQ ID NO: 44924 - DNA, 967 bp, Heterodera glycines
tttttatttcttttatcataattatttttgtatagaattaattaaaaaggcatttttaaaatggccaattttcagtgaaaatctgtaagaatagtcaaaattttcatcctgcgcctggcccccaaataaaaatagagggattttatccaaaaaaatgcccaaaaatttctgatcaccttatctttttttgtttttcaaatcatctttttttcgcggcgctctttttctaaagacttttaggagaaaggggtccggcggtgccgataggcgccgccgggaaaaattctgaaaatttggatggatctgttgaattttgcgaattttgaactaatttttttaataagatttacgaatttttgggctcggcggtgccgataggcgctgccgggacagattttcaccaaaaaatttatgaatttctgataaatttttggttttttttcttggttttttgtcaaaattattttgaaatatattaaatttttatgatttgtcaaaaaattgaatttttaatttcaacgaaaggcaaactgggttcaatacgtcaataaattatgccaatgatgaccaatttttatgggtatttttgtttaaaaaaccctattaattacaaaaaaaattaattaaaaaagaagtcaaccaggatagagctcatgaaaaaagtaatgcattgtgctaacgcttttccactacaccactattacatatgaatagacaaaagcaaattactttatttaataaaaatttagcaaaatggttaaaaaaattcaaatttgtataattttttttctctcacgaaaataccattcttaggggtgtatattaaccccgaccccgaggcggggttaagggtcggggtcgtcggggttggaagcgtcggagttcgggtcggggttaaccccgaaaatggccaaaaatatcggggttcggggtcgaggcggggtcggggttgcaaccctaatttaga

SEQ ID NO: 44925 - DNA, 209 bp, Heterodera glycines
tagagtcacttctgcatttaatattatattatttagctggaatctttttcttgaaaatcggataaaagatgattttttcttttttattaattaatagttttatttttaataatcagggacggatttatatgttctaaaaacttgaattttgctcaagttgttttttgtaactcggttgatagttatcagaatagcttgaaatttggcat

SEQ ID NO: 44926 - DNA, 1286 bp, Heterodera glycines
ccctcagcctcgcccccgacccctgtcgatggccaacccaagctaagcttgcggtacccagcggcttttttgtacagctcgatgagctctacaaaacggtatcaatggtgtcaggctatatctactagaaattgagaaaattggcgagaagtgatgtcaaaaattaaaaaatttgaaaatgacttgcgtcccgccgtacattagtataaaccggacggcaccgtgttttgtgaattgaataataaatttatatatttaattttgtcgatcactgagctttttgtggaacgacctagcaccaccatatgaccacctttcttataattaactcatttaattttttgaatttgataatattatggtcaagctctcattgtagtcaaacattaataatttcagtaaattataatttcaaatgatttattcttagaaataaaaaatattttttcttaattttttgatttattttataaaaataaaagaagtaaaaataaatgagaatttttggcacgtcatttctcggcacataggctaattccgctgctagaaaaaactttttgtaatacaacccagggatggtctacacatttataaagtttcattaaaaaaattccaccatcgcttcaaatctctcttttgtaaatgtaaaagtgtctcaattatggtgcttttcctttccagtggcattgcccattccgtgctttgccgtgaccttcgctattctttggcggtgtggggccaggaactgacggggttcctcaattacaactcacttagattttccgtaagaatttttaattaactgacactcattttttttatttgccttttataagatttggcacggaaaaacgaccactttaattaaatacgcccttttcagaaagtcgaccacatcgctttggtgaagctgttttacggcttgttgaacaaggatctcgaataccgaacagtgcaagcagtcggcagtgtgctgatgcaacttttttcgtctgttaatttttaataatataatttttaaatttaattatataattaatatttctgtttgggaatggcttacaaattgtggcttaattttcattcgttttcagccggaaatcattgctggtccgcgaggatttggtcttggattggcggcctgttaatgaagctctacactgaggcgaggtgcccgaaataataaaattctatttttataataatttccagatggcgttaaaaaatctccaaaaagaaggggttatggttgtggcccaaggacttcaaaaaagggccttggccag

SEQ ID NO: 44927 - DNA, 918 bp, Heterodera glycines
tgaaaaaatcgatttttttgttttcggggcagtccccccgaaccgatgcgcccagatttatggggagaccgaatccttcgggaatagcttccctatagcctgtactttaattctgcgttggatttttgctccccataaatgtttgagtaccccaaacggacacttgaaaaaatcgatttttttgtttcataaatatttttttcagaaagtgctctaaagcgcaccaaattttatttacaacttaattttagcactctgatgctttagtatcaaaaaggaagatggagaaaaaaatttttaaaaaatttttccttatattttggttatatcgttttgcttttggtggggtgcttggaacagtggaatcatgcgcacccgtccgatctggcaagttaagcaacgattgctgactagccaaaaggttcggtgccgtgatgaaacgaaccagcactgcttaccccgcggcacccggcacggtcccccgaaggaatggatttaattaaattctctccttcggggatttttttccattaggtcgtccgttagcgttcaattgctctagtcaatttttaaaaatttttgttgaaatatttgtcgtgctctgaagggcgggggggggggggcgccccgatgctaatccgttccgcagagcctcttcaaaatttttcccattaccgcaagagctgcggaaattgtgaattaattctcagaaaaatggctatctctttttaggacaattttctatctcgtaaccccgatgctaatccgttccacagagactcttcaaaatttttccattaccgcaagagctgcggaaattgtgaattcattcccccaaaaatggctatctctttttaggacaattttccactccgtaaccccgatgctaatccgttccgcacagcctcttcaaaatct

SEQ ID NO: 44928 - DNA, 966 bp, Heterodera glycines
  unsure (1)..(966): unsure at all n locations
ttcattcgtgctttgcttcggattagtctaaaaatttctggacgccaattntacatattagccattttttattttatttgtgaccgcaaatttttacatactagccattttttattttattgtgaccaagcatatctttcctcgtatttctgggatttttttcagaatgtggtcatagaataggtggattgaattatttgtattttttatgagtattatgtaaggatattttcgacaaaacataatcaattccgagtttcatgaggcatcaacttcattcttttcttgtcctgcccaattgtctcaaatgtatacctaaaaatgcgctaaaaatgatcaaacccgtttttagccgaatatcctgtcaatatttccctattagaaacgatactgtgaattctttcgcctctttaattcattcgtgctttgcttcggattaggctaaaaatttctggacgccaatttacatattagccattttttattttatttgtgaccgcaaatttttacatactagccattttttattttattgtgaccaagcatatctttcctcgtatttctgggatttttttcagaatgtggtcatagaataggtgggttgaattatttgtattttttatgagtattatgtaaggatattttcgacaaaacataaccaattccgagtttcatgaggcatcaacttcattcttttcttgtcctgcccaattgtctcaaatgtatacctaaaaatgcgctaaaaatgatcaaacccgtttttagccgaatatcctgtcaatatttccctattagaaacgatactgtgaattctttcgcctctttaattcattcgtgctttgcttcggattagtctaaaaatttctggacgccaatttacatattagccattttttattttatttgtgaccgccaaatttttacatactagccattttttattttattgtgacccaagccatatct

SEQ ID NO: 44929 - DNA, 1164 bp, Heterodera glycines
  unsure (1)..(1164): unsure at all n locations
ttttagtgaaaattcgatcactcatattttttgctaattgagcagaagcgtaccaaactttgcagggatactccccggtaaaggactaacttacactgaaatgagcgccgagctagctggctcaaaaaaattttcgaaaatctgagtctttcgtttttatttgttttttgcataattaattcataaatatttttttcagaaaatgctctgaaacgcaccaaattttatttacatgctagtttaggcactctgatgctttttctatcaaaaagggagatgaataaatttttaaaaatttttaattcctttttaaacaggccaaaaagtttaggcttatctttttttttcagaaacttatcagaagcgccccaaactttgcagggatactgaaaggaaaagaattaacctgttttatcacattagcttgtcatcagtttttataaaaaattttcaaaattctgagtctcctattattttatttatttttcaaaattttgaagggcggagggggggcgaaggcccaccacgagagccgcgaagcggccgagtgagtacctcggtgcatgaaaattattaaggaagagagttcattatttgtttattttttgcataattaattcataaatattttttccagaaaatgctctgaaacgcaccaaattttatttacatgttagtttaggcactctgatgctttttctatcaaaaagggagatgaataaaatttttaaaaatttttaattcctttttaaacaggccaaaaagtttaggcttaacttttttttcagaaactgatcagaagcgcaccaaactttgcagggatactgaaaggaagagaaataacctattttaaatattatctagtcagttcatttaaataatttttatccaaaaaatttttttttgggttttcggggcagtccccctgaaccgatgcgcccagatttatggggagaccgaatccttcgggaatagcttccctatagtctgtactttaattctgcgttggatttttgctccccataattgtttgagtaccccaaacggacacttgaaaaaattgatttttttgttttcggggcagtccccccgaaccgatgcgcccagatttatggggagaaggaatccttcgggaatagcttccctnatagcctngtactttaa

SEQ ID NO: 44930 - DNA, 783 bp, Heterodera glycines
ctgccgaatggatgcgcgtggtttccaggggactcgtccgctcatgggtcgccgtttcggtcggcggcgacggctgtggttgggcggagcgcaacagcggttcagccgctattctagcgctcaattgtcgctcaatgtcggagaaaagtttggacggaggtggcaagagggagctgggcgagtagaaggcgctcaggggaggggggctggcggcctcggctggacaaagcgggtcttgacggccccaggcgagcagtctcctcatggagaacagcgactgtcaacagacgaccgacggagcgagaagtgccaacggcgcagaaggacaaatgccgaagggttgggcaacggcgcagtcgttttggaaaagacacgggaataataatcggcaaaggaaaggcaattgaacgggggggggggggttgattttggtattttcgcaaaatcccttaaatcgtaaatcaaaatttaaaaaagcaagaagtaaaattttatggaaattccgctgatcagatggatcagcagccagcagactaattaatctgtctatttctccaatcaattaattagactaattggtgtgataatgttctcgaaattggtaaaaaaaaagtgcattaaacaagcggtgaagcttatgagaatttattttctgttaccgcccttttcttctgttttattcactgtcgataaacaacaaaacgtgggatgaaaaagagaggcgaaaggaggatggatgtaggaagtgaactgacgaatgagaaggtggaggggggggggaag

SEQ ID NO: 44931 - DNA, 1293 bp, Heterodera glycines
cccccccctttttctccccggggggtattttttttttaaaattttttttttttcccccaaaaaatttttcaaaacccccttttttgcccccgggaaattttttttttttagatttttgaccctttttaggtaattagacataaaaaaaattaaaaattttgaaaatcatttttccccttcctttctccccaggggtattttttttaaaagttttttttcaaaaataaacttttccaaaccccatttttcgccccgggaaatggtttttttatgaaattctgacccggttggagtagattagaatagaaaaattgaaaattttgaaatcatgtttcccactcccttctcacaggggtattatttgtaaagtcttttttccccaataaacttgtcaaaccacatttttcgcaccgtgaatgttatttttattgaaattctgaaccgttttgagtagattagactataaaaaattgaaaattttgaaatcatgtttcccactcccttctcccaggggtattattttgtaaagtcttttttccccaataaacttgtcaaccccatttttcgcaccgtgaatgttatttttattgaattctgaaccgttttgagtagattagactagaaaaaattgaaaattttgaaatcatgtttcccactcccttctcccaggggtattattttgtaaagtctttttttccccaataaacttttcaaaccccatttttcgcaccgtgaatgttatttttatcgaattctgaaccgttttgagtagattagactagaaaaaattgaaaattttgaaatcatgtttcccactcccttctcccaggggtattattttgtaaagtctttttttccccaataaacttttcaaaccccatttttcgcaccgtgaatgttatttttatcgaattctgaaccgttttgagtagattagactagaaaaaattgaaaattttgaaatcatgtttcccactcccttctcccaggggtattattttgtaaagtctttttttcaaaataaacttttcaaaccccatttttcgcaccgtgaatgttatttttattgaattctgaaccggtttgagtagattagactagaaaaaattgaaaattttgaaatcatgtttcccactcccttctcccaggggtattattttgtaaagtctttttttcccccaataaacttgtcaaaccccatttttcgcaccgtgaatgttatttttattgaatttttagtccttctgagttgattatgctagataataattgaaaattttggaatcatgtttc

SEQ ID NO: 44932 - DNA, 1007 bp, Heterodera glycines
tttaacagattttctctgaaatttgcgttcctatcttacactcaagaaaatgaaaaatttctaatttttcaaaatcgaattcattcatatattcgcttcaataaaaacagcctggtctcaaacaatcatataaattttgtattttttttaattttcaaacaaaaaataagcacgtaatgctgaaataagcacaaatcctagaaataagcgcacttggaagccctgttcattagtattctaaaaacctcaaaatggctattatcgggaaaatttttgcagaattcctaaggggctaagcaaattttaatttcgaacagcaaaaaagtactgtaattcttaagaaaacagtgcattttacagtagctttgatcacttcgatattaatcgtacggaatctgagcgtacagaagtgtagcgacatgcggttttttgcatcttgtttaagccattttgaggttttcagatcaccccgaaggaatggtctgatcactgtggagcaaaggacttttttgatcagcatatgctaacattattttttttcagattttttcttaccctatagaaaaagttacatgtcttcaaagtagtgttgttataattgtttaacacccaaatttttcgaaaaatttttggaaatttttttacgttagccgatttttgtaatttttttgtgtatgatgtttttccccatcaacaaactgctggtaaaaatttcagcgcgatcggatgatgggaagtgggcgaaccacaaagaaacaaataaacaaattaatcaaaagtaaaagaagcagtatcctctgcatctcccaatgtcctcagaattcaacatataaaaacatcttacagtatacctaataaggtaatactggagaattggtgtcccgacgaaaaataacgttaagaattttctttacattttttctagggtaaaaaatacactgatcacgaatcagagctcggattttacaaaaccattgattttgtctatgatttttcaacatgcaaca

SEQ ID NO: 44933 - DNA, 920 bp, Heterodera glycines
  unsure (1)..(920): unsure at all n locations
atttcttcgcctcttatttgtgcaaaatttcgaaaaagtaatttactatttaaaattaaaaaattcagaagcaaattcaagaattttttttatttttaaatgcattttttaccacatgaattatgattaaatttttgcgtttcgaattcattttggaattaagaaaaataaaaattgataatcatttgatcatttttagcgcactttaagcaccgccgttaggcagcgcagttccaaaatttattccatgccacagatattatgggcaggacacgccaagtacctcaaacttgggtaattaaaccgacgaaagaagtgcagtggggaagaatgacgcctaaaatgaaggaaatattcgatgctgtgcgaactctttgtgacccctctctgactctgccaatgcagcagttgtccatttttaccaatatttttctctcactcatcgtctgctcgtctctcctttattataagctatttttccaaagccaacaacgcccgtttctcccctcttttctgttagtcatttctcattggtgttgacgatccaacattcagtgtacaaatttgttaaacctctcaacattttaaatcaaaatcctaataaaaatttcgttgaatttcttcgcctcttatttgtgcaaaatttcgaaaaagtaatttactatttaaaattaaaaaattcagaagcaaattcaagaattttttttatttttaaatgcattttttaccacatgtattatgattaaatttttgcgtttcgaattcattttggaattaagaaaaataaaaattgataatcatttgatcatttttagcgcactttaagcaccgccgttaggcagcgcagttccaaaatttattccatgccacagatattatgggcaggacacgccaagtacctcnaacttgggtaattaaac

SEQ ID NO: 44934 - DNA, 1208 bp, Heterodera glycines
atcggaagcgtaattatcgataaaatccaaacaggcggcagaaagtccttcgattgagtacaaatgcgcgaccgtaaaaatggagcaaacatttcgaactttcaaaatggtctaaatcgatagagaatttttttagaaagaatgtatggtttgttacctttaaatattccggaattgcagcttcgagttcggaaaagccgtacttatggaccagggcgagcatatccaacacaaaactgagctcgaacgatttgagttgcaatttgccagtgtaaatgtatttgagaagggcctaaaaaacagaaaatcatcagcaaaaaaacattaatcagataaaactggaccaacttggaaagcctggacgggcgtatcgtgcagaatgacttcgctttccgatgactcgcgcatgccaccgtaaagcattgcccttttaagttggcattcggttggttatcatctaaacccctcccctacttgaaatatgaactccgtgcggccaaaaccactcgatggacgggaaaacgttgatcatcgacgaccaacacaaaatcactgaattcgtcgttcagatgcaaactcgcaatttgttcaacaagctgagaagtgtgctggatttcaccacctgaggaaatggcaatgaaataatttgtaatattaaagagaatggacgaagcgacacaatctcagatccaagcatgggcgaaagaagttttagtgattaaatctattaaaaattctgacaatgagcaatattttataaatttcgctaatttgttatttcaggccttggtgaactacatgaaatttctcgaaattcaggagcaaacagcactaacaaaaccatggcctgactcactgaggttggacattcgattagtgattgaggacgaagaattgaaatcctgaaggcttccggccaaactcgcactactaccacagttcctcagcgcggggtaataatgcgtactcatcaacgaagcgacactcacttggcaattaataatttaaagagtatactacctaattgaaaaatgaaattaaaatataaaaggaatgctcaaccaaataacaaataaattcgaaattcattattttcataaataatagagaaggcgtgagatattcaaaacatggaaacagcgttttgtgtttgcttctcaacaatgaaaagatccaattgcaaaagatcattttcaattgtccctcag

SEQ ID NO: 44935 - DNA, 308 bp, Heterodera glycines
ccttatttataattgacaaaaaacatttgtaagaattatgggcgaaaacggcttgccgtactaaaccgaccctcgtactaaaccggccctcgtactaaaacggccgtactaaaccggccgtactaaaccggccgtactaaaccgaccccgaccgaaggaaacaacaccaaccccattgtttgaatgtggcgtggcgttttgtattgttttgcgttaaaaaatgatttgaaaaatggaaatgtttggtttgatttttcaatttgttttgtaataaacattcttaaattgtacctatttatttgcttttt

SEQ ID NO: 44936 - DNA, 1381 bp, Heterodera glycines
cttgtcctgctgtgttcgacttttatctgacttctccagtttaaaattatttttttgaagtgtgtttaaaatgtaaaattattgttttaaaatggttgatattttttattcttaatttatatcttggctttaaggattcttctcttatctccaacgaaatttctcatgatcaaaactgctttaccgttgtattataattgggtatttttttcgtgttgtaaaatatacctatgttttgtatggttttggcggaatgactctattctattttattattttattatcgtcatcgtcatcgtcatttaaagatgcaaattttattttgtgaaaaatttttcattcttcaagcataatgaagaataatttaccaaataattgtcttagtatttggcacacatcaattgtggcgtaattatatagcatttatagattttttaaaatattatttttctcccaccaaaattaaacgttttcataagtatttaatagttgcaaaacaaattattaaaatattgcaatttttgaatatttatttataccttgctgtcttgttgttgtgatccatgttgttgaaaagcaaaaacagcctttccttttaataaatattttttactgaatattttcttcatatttcacttttttatccaattgagcaggctcgtgagttttgttggaataataagatattaatatattataaataagttattttttaattaaattaatttttaatttaactatttttctgatttatatatttacattatatactttttaattcatacaatattaaaagaagacacgaaaagcatttaattgattctattaattttttttgtgttaaaagttttaatttaaaatctgctttattaaataatttttaaaatatattatgatccgggcattaaaaatactcacagtttctataaacagcaagcatacttgaaagaaacaatcccttttttacctggaattttttggttttaattaaaaccttaaatttatatttttttctttgccatttgaagttttctctgttctttgttgttttttatattctgtcgatgctttagttgttgcattttaatttaacgcaattaaattatctttaaatgttacaatgatttaactgtttcatataattagtttattccaattgtttgtccaataattacaaaaaataaataaaatttattgtagaaaaacgaaaataaatcgaaatgatttccaattttacacgtgcgttcggatccccattttttttgcttttggccattaaaatggattttaaagaataatccatccatcgacttgtacgagacaaattatttttaaatagttttttgttatctgtacatgttaataaatctctttaaggaaa

SEQ ID NO: 44937 - DNA, 397 bp, Heterodera glycines
gctaaagcagacaacaacattgtgaggattcgcactatggtttcgaaattttttttatttattccttgaaatcctcaaatgtcgggtcctcaaatgtcgggtcctcaaatgtcgggaatatcctcaaaagtcgggtcctcaaaagtcaaatcctcaaaagtcgggtcctcaaaagtcgggtcctcaaatgtcgggtcctcaaatgtcgggaatatcctcaaaagtcgggtcctcaaaagtcaaatcctcaaaagtcgggtcctcaaaagtcgggtcctcaaaagtcgggtcctcaaaagtcaaatcctcaaaagtcgggtcctcaaaagtcgggtcctctaatgtcgggtcctcaaaagtcaaatcctcaaaagtcgggtcctcaaaagtcgggtcc

SEQ ID NO: 44938 - DNA, 1625 bp, Heterodera glycines
  unsure (1)..(1625): unsure at all n locations
aaaatgatttcagaaattgctattgaactattcattaatcccaaaaaaatgctcttgtaaattttgattaagtataattttagtgcttatatgtggaaaatttgtttnaaaaaataaaaatcaataaagttaaattttatgggagattttatgaggaggcgcacgcggccaaattgtatatggcgtagcaagaggaatgggcagtgactctccagcagcgcgcaactacgcctatacatatgtaagtgcattaattgtttataaaatcccacaaattaatttatttttaatagattatcaaccaacgacttaagctacccaaaattgaggtaatccctttaccaccagctgatcaaatccacccagccgacctcaacgcaatgaatgtcctccgccaaaatctttacatcgaggtgaaaactgaattggggaaatgcagaatgctgtggaaagggatgagggtatgaaaaaacttaattaaaattgattaatccatatttttagctcaaaaatagactcataattaaaaaaacaatgttgggaacagagttacggcgtaagtcctttgaaaaattaaactaaaaatgatttttttctaaaatcagaaaaaatcatttaatttttagtgtaattggaaatattcgccgccctaagggatgataatttaagaaaattttatgttctggaatggaagcttgttcaattgcaaaatttttaaattttttcattaatgttcaatttcgaaaatgtgctttctttttgtcagtcaaaagtttaaaataaaattgatagaaaaattaatatttgaaaaatttgtcaaccaatttggcagatattcttaggtgctcatggggaagggaatctaaaaaacaatgtcgggagccgaagtcaaagcgtatgtccattgaaaaaaaataagttaaaaattaatcattttttcaaaaatcaaagatgttgaaaaaaaattttgtttagggaaatggaaacattcgacgccataaaggaggataatttaagaaaattttaaatttaggaatggaagctggttaattgcaaaatttttaaataataaaatgtttattacttaaaggtgactattgtgcctgatggggtacgcttgggttgcatttctatgaaataaaattttaatgaagattatgagtaagcattcgcttacttcatttattgaaacaaatttctcaagaaaaacggagaacagctcggatgcactgttcattgggttccgaagaaattggccaacgaacagttacttacaatggtcagagtaaaattcggtatgtaacatttgattatgatagaattattattttttcaatcccccaaaagaagggttatttatgtaaaaagaaattttattataaaataatcgagcatttcttttgaaaattttctttgacagcatctatcgaattgtaaattttcttaattaagaatgttttcaaaaaatttgctattgaactgttcctccattccaaatatgtgtgaaattttatatttaaaatatttaagtttaaaaactttgatgngagatttatttaaacatgataaagtaaaatatttatcattcgatagaaggaggcgcacgaggagaaatagtttatgtc

SEQ ID NO: 44939 - DNA, 939 bp, Heterodera glycines
atatacaaaatattacttttttaaatttgtataaagttcctagtcgtatgtgctttgcgttggttaattggcgtgggtgagtgtggtggttgggccgtttttgcgatattgtggctggaaaaaagaagcgatttcgctgtggggagcgcggccgtctgggtttaagtgcttgcttgcgcttgtgctcggcattgaacggtgatggctgctgctggggtgccacctttgtcgtggcctcagtttctccagcgattggcagctgtcgaaatgaataaaacatgcagctcgtctgtgtgttaaagaaatttggcgagttaattgacttgtgtaaatgttgcctaaggcacaaatgctgtggggaactcagcactggggatgctgaacctaaagttggtggtggtgttggtatacgagtgagtggcgtattgccatggttgacaagccctatgagttcgtggatcggaactccttgcctggggaccagtgtgcttgcattcgaaaaaacacgagacataagcgaccgaaggcctttggcctgaggaagtgtcctaaccgggaaatccggagtgctcgtgtgagtgcctgtgcactgccctcggagctgtgtccagcggcgagatggttcttcccaagtccgggaagctcggatgcctggccagcgctgtgtcattaccacttgctcggtcgccttcgccgcccatgcgcacgcttgcgctgaaacggagttgtttctgctgaaactatccgtctttacaagacggctgtaatagcggcgcttggcaacgctcgctagcagctatctggttgatcctgcctgaactgatgtgttcatttcaaagattaagccatgcatgtgtaagtttaacctgccagacagggaaactgcgtacggctcattacaccagctataatttacttgaccttgacttcttacttgga

SEQ ID NO: 44940 - DNA, 1142 bp, Heterodera glycines
aaaagttttttctttttctctcattttggcgtattatttcaattgtacttggagcccaaaattgaatcgccatattttaaatacctaaaatttgcatccctagcaacaattattcccaatttttagtggcgctgtacgactgcgtggactgctcgcaaccacttcagcagcttttctgatcgaatgcccaaatctccgatcaatttactatgattggtattgcaatggccatgatcgtcccgttgacgccaacgcaaaagtgcgggaatggcttctgtggccgcgcgcggatggccgtccgaaagtgttgtactgcaccttttggtacgatataagtgacgaatacaagcaggcaagcggcgggaaagcaaaccaataaaaatgataattaatcgaaaagtaagagaggttgaaagataacagagagagagagagagaatgggagagcaaaagagggaggaacggggagggatataaaaagatgagagagtgggagaaaagagtgagtttgagagggagagaaaagacatgaaatagagaaaaaagataaatagagaaaaagagaaggagaagagggcagataaatgagactgtgagggtgaataagtttcaaaaaatagaatttaaaattactaagttggcagaatcattttggcattcatttccatttccaggaatttctgagtgccactagctcagtcaatttcatcatttgtttcacatcgttttgcattgccacgaggccgcgaagcggccgagtgagtaccttgggcgcagaaaaattattaaggaggagggttcattatttatttatttttttacaaaattaattcataagtatttttacagaaactgctctgaaacgcaccaaaatttatttacaagttgaataaggcactctgactcttatattatcaaaaagggagatgaataaatattttaaaaatttttaattcctttttaaacatgccaaaaagtttaggcttaactttttttatataaactgatcagaagcgcaccagattttgcaagggcatcaaaaagacaaggaaaagcaaagctatgatgctaacgccaagtaactcttaatttaaaaataaaggtaatttttaaaacttacacttattttatttttttaatag

SEQ ID NO: 44941 - DNA, 897 bp, Heterodera glycines
tttattcctgaaatttaaaatattttaaatttattttaagacaaattttcatttaaaaatggatccaatacaggcaagaccgtctaattatgacgacagtgagctgatttcgttgatccaattccatagcatcgacataattgtaaaaataattaaaataattaacttaaaaaaaaattaattaatttgtgaggttggcgccttctcttcaatgatttgtgtcataacactttttgtcttcattagttcaaagcaaatgttatgccataatgaggtaatatatttttttaattcattaaagcaacaaatttatttttttaaataatttatctttatttattctttaataaaaaataaaatttaagcatacaagatttcagcaaatttcttaaaaatgaatttaattcaattttttatttctttagtttattataattttgttttaattaaatttttgattaaatttcttctctgagcattttgattttgatttttttattattttaatacttcgaataattgcatatttttaccattttaaaattcttttttatatgttgaagaaataattcattcaaattttctttcagttgctaacattgctcgctgccgctgacctttgcaccagcctcggcatttttgtgctcggtctaatgcgcaaggcactttatgaacaggtcatggaaacaagtcggataccaattgaggtatggtgaacaaaaataaggaaaaagatgttactaatttgaaaataataaaaattattacaattattagtgttcctaattgaataggcaattaggcaaagcaaaaacaaagctctatgctctgtttaataaaaacaagaaacaaaaatgaatgcataaatagctaaatctttccaaacggatcatattt

SEQ ID NO: 44942 - DNA, 1666 bp, Heterodera glycines
atgatgaaattaaaatgctcaaataaaaatttaaataattattaaatattttggcaatttttaaaaatttgattttttgttgcaaaaatagctttttttcgaactcacattctttgaaagacaatgaccataaatgttcaaaaattcttgtgtagaatggatttttttttgagaaattcacgtatttattgaggcgttttttaattattttgtaaatatttttggaatttttagcaaagattttaggtttttggcaaatattatttgatttttgggttttaaatcctaacagtggtaattagttaattatttgtgaatttttaactaaaaatgagcaccctcttcatcaaaatatcaaaacattcacttcttgcaactgtttatggcaaaataggtgacctaattagtcacttgaataaataattagacataaatcaataaataatttaattcaattttattttatttcgtcgttcgtccttttttctatcgtgccatatattccgcgcatttgagcaccttctgactcgggcacccgttgcaggacacggccacggcatcgaacgattggccaacattgaaagcacactttttggcaccatctttttccaccagacaggcttcatccgctgctggggagttggtcgagccgcgtaaaacggcacgcattagacatgctaaaaagcggggacaaaaaaattggcatttttatcgccgagacgacttttttcgccaatgccaggcctgtaaattgaatataggcctaatttttcgttataattttttaaatttaagagctcaagtgaaaaatgtcactttttagcaaatttattaacagaagaagttccaagaaaaaaaatttcaattttttgtttattttcccaattccatcccctggctacgggcctggcgtttaagtctggcgagattagctgataaaaccccagaaactcagtgaaaattttgtatttttccatgaattaactaaattaaatcttcttacgcaatttttaattaaattttaaaaaattaaacgaaataatttgttcgatctatatttcaaccgagaataaatataaaaaagtaaattctaaaaaaatctcttacggctcacgctgcagtcggcgctgaaccgcaacgaaatgccaccagttttggcactttcgtttggcataaagcatttgccagccattgtgcacacgcacaatcgttggcactccgaatttgtgcgcaaatcgaagaacattacatccttccacgcgcgccaagcagtgtttttcctggcgaatttataaattatttaaaattaaaaaaataaatttacaacaatttattaaatatatttatgcattaaaaaaatacataataaaattaaaaatttaatgactataacagaattttttaaatttaattaatttcataaaaagcattataatattttgccttacaataaagccattgccttttttcacttttggattattttttaattttaatataaaaaatttagataaatttaaaaatattcaaaaattctttgaattttcgtttattaaaaaaacaatattttttgaactttattttaatttttttttttaattaaatttattataaatataaaatattattattaaaatttttaacatattttacattaattaattaa

SEQ ID NO: 44943 - DNA, 1004 bp, Heterodera glycines
actgcgctgcctaacggcggtgcttaaagtgcgctaaaaatgatcaaatgattatcaatttttatttttcttaattccaaaatgaattcgaacgcaaaaatttaatcataatacatgtggtaaaaaatgcatttaaaaataaaaaaaattcttgaatttgcttctgaattttttaattttaaatagtaaattactttttcgaaattttgcacaaataaggggcgaagaaattcaacgaaatttttattaggattttgatttaaaatgttgagaggtttaacaaatttgtacactgaatgttggatcgtcaacaccaatgagaaatgactaacagaaaagagggagaaaagggcgttgttggctttggaaaaatagcttataataaaggagagacgagcagacgatgagtgagagaaaaatagtggtaaaaatggaaaactgctgcattggcagagtcagagaggggtcacaaagagttcgcacagcatcgaatatttccttcattttgggcgtcattcttccccactgcacttctttcttcggtttaattacccaagtttgaggtacttggcgtgtcctgcccataatatctgtggcatggaataaattttggaactgcgctgcctaacggcggtgcttaaagtgcgctaaaaatgatcaaatgattatcaatttttatttttcttaattccaaaatgaattcgaaacgcaaaaatttaatcataattcatgtggtaaaaatgcatttaaaaataaaaaaattattgaatttgcttctgaattttttaattttaaatagtaaattactttttcgaaattttgcacaaataagaggcgaagaaattcaacgaaatttttattaggatttgatttaaaatgttgagaggtttaacaaatttgtacactgaatgttggatcgtcaacaccaatgagaaatgactaacagaaaagaggggagaaacgggcgttgttggctttggaaaaatagcttataataaaggaga

SEQ ID NO: 44944 - DNA, 1262 bp, Heterodera glycines
  unsure (1)..(1262): unsure at all n locations
ctatcatctgtcacccgatctttttccagctaaactttctatttcaatttcactaaccaaaacatttcttctgctgctggtaaaatttatatgtgaatttcatttcactttttggggagtgcaaatttgttcgaaaccgatttacattttcagaaaaattcaggtatattttattaaaaaaaaacattgaaaaatttttactcttgaaaattttgtcagaggggggctgggatgggctgattcggcggatgaggggagggtaacggtttgatgccagaacgtaacgttttgcatttaaatttgacatattcaaataagtcgaaatgttgccaaccctggaaaatgtcaaaaccccatggccaagcaaatccaatttatttgcattgataaatatgcaacattttccgcctgtaatcattgtcattttcacgaaaattccggtttttcattctgaaatattcccgaaaacagcagttggccttcattcactacgcacaatcataaaattgaatgggtgatcggcaatgaattcgatcgttggtggccgtatgatcagcagtgatcgctccaccatgatcagaccggtggctgcagccgcttcacttccagcctcattattcttaatggaaaatcagccaatttttgatactaaagtttttaaatggcattaatggccatgtgttttaaaaataacaaaaaaaagttttaggaaattctgctgttttaaatcgtattttttaaaaatatcgaatctttaaattcgaataattccgaaaataacaaaatcagcgcaaaaaacccgcaattaaaaaataaattccatttgaacagattttttaatgtgtgagagaagatttcaaatatttaattaattcaacgttttgatcacaacaaatgattattgctgtgcattggattatgtcttcaatttgcgattattatgattaatgaacgatcagtataatcaaatcatccgtgaaaaactgtgccgaaaagcatattggcattatcatcgccagttgccaagaaagcgaggaaagggtgatcagcgatgaagcgatttggggaaatgttggcactattggccacaacatgaatgccagtggcagctgcagcttcggtgccctgctcattgacctaagtgaggatcatcgattggtttatttggcagtgtgatcaaggcccgtgtcgagaccgagatgaagatttgatcccgagaccganaaccctanaccaagactncagaacgagatcaaaaccta

SEQ ID NO: 44945 - DNA, 725 bp, Heterodera glycines
tttttggggtttttcacccccaaattaattttatcccggcaacgaaaattatggacttataaatcctttttttgggtttttcgaccccaaattaatttttaatttggggttttggactcccggcaactgaaattatggacttacaaatcctttttttgggtttttcaaccccaaattaatttttaatttggggttttggactcccggtaactgaaattatggacttacaaatcctttttttgggtttttcaaccccaaattaattttaatttggggttattggcttttgacaaacgaaattatggacttataaatcttttttttgggttttaaaaccccaaattaattttaatttggggttattgcctcccggcaaacgaaattatggacttagaaatcctttttttgagttttaaaatcccaaattaattcaacattttccatgtttgttttgttattttataaaagaatttcgtgttttttttataggtcaaaaactcaaatgctttatttttgccgtcgggattttcctccataattcgggtggtcagtcttcccaggttgaactcggaatacaaagaagcaaataagcttaaactaacatttttttactaacctccacgatatttttaaattgttgaaagatccacatacaaaatagattcataacaaagaattatagatattttcgctgcgaattgattactatatatgagatagaaaat

SEQ ID NO: 44946 - DNA, 883 bp, Heterodera glycines
ttgtttgggaaaaatttggaaaattggctatctctttttctgctcaacagtaataggaattccaaccgcattctcagaataattacgccgatactaattgttctggaatttgtttctcggcgcgtttgtttgggaaaaatttggaaaattggctatctctttttctgctcaacagtaataggaattccaaccgcattctcagaataattacgccgatactaattgttctggaatttgtttctcggcgcgtttgtttgggaaaaatttggaaaattggctatctctttttctgctcaacagtaataggaattccaaccgcattctcagaataattacgccgatactaattgttctggaatttgtttctcggcgcgtttgtttgggaaaaatttggaaaattggctatctctttttctgctcaacagtaataggaattccaaccgcattctcagaataattacgccgatactaattgttctggaatttgtttctcggcgcgtttgtttgggaaaaatttggaaaattggctatctctttttctgctcaacagtaataggaattccaaccgcattctcagaataattacgccgatactaattgttctggaatttgtttctcggcgcgtttgtttgggaaaaatttggaaaattggctatctctttttctgctcaacagtaataggaattccaaccgcattctcagaataattacgccgatactaattgttctgtaattttgtttctcggcgcgtttgtttgggaaaaatttggaaaattggctatctctttttctgctcaacagtaataggaattccaaccgcattctcagaataattacgccgatactaattgttctggaatttgtttctcgtcgcggttgtttg

SEQ ID NO: 44947 - DNA, 1001 bp, Heterodera glycines
aaaaaaatcgattttttcaagtgtccgtttgggggtactcaaacaattatggggagcaaaaatccaacgcagaattaaagtacatactatagggaagctattcccgaaggattcggtctccccataaatctgggcgcatcggttcggggggactgccccgaaaacaaaaaaatcgattttttcaagtgtccgtttggggtactcaaacaattatggggagcaaaaatccaacgcagaattaaagtacaggctatagggaagctattcccgaaggattcggtctccccataaatctgggcgcatcggttcggggggactgccccgaaaacaaaaaaatcgattttttcaagtgtccgtttggggtactcaaacaattatggggagcaaaaatccaacgcagaattaaagtacaggctatagggaagctattcccgaaggattcggtctccccataaatctgggcgcatcggttcggggggactgccccgaaaacaaaaaaatcgattttttcaagtgtccgtttggggtactcaaacaattatggggagcaaaaatccaacgcagaattaaagtacaggctatagggaagctattcccgaaggattcggtctccccataaatctgggcgcatcggttcggggggactgccccgaaaacaaaaaaatcgattttttcaagtgtccgtttggggtactcaaacaattatggggagcaaaaatccaacgcagaattaaagtacagactatagggaagctattcccgaaggattcggtctccccataaatctgggcgcatcggttcggggggactgcccccaaaacaaaaaaatcgattttttcaagtgtccgtttggggtactcaaacaattatggggagcaaaaatccaacgcagaattaaagtacaggctataggggaagctattccccgaaagattcgggcttccccataaatctggggcgcatcgggttcgggggggactggccccgaaaaccaaaaaaaa

SEQ ID NO: 44948 - DNA, 1063 bp, Heterodera glycines
ttttacttttaaaattaaaatttaattttaaaactttagtttactaatcctttgtattttttaacttatttaatgaattattatttcatctctcgcagttatttttctttttttaaactcaaatttctttaaacttttgttgattgtattttaattattcaaattttaattattttatcacgtatatttattgaattaatgaatttaaagttatatattgttgttttttaatcatgtctatcagcagatcattcagatcattcatttgctcagccgccggcggtgccgtagtaatttctcataaatattttttctttcattttaattttaattttataaaatttaatattattttactaaatgtttatagttttataattattatggtaattatttgtacatatcctttttgaattaaaaatttaaaaaaatatattttagattataatctgtctagtaaagtttctgtgcaaatttggggaatatttttgttttgattggtttcatttcttttcatataaatttgattaaagtatttcttttctttttcctttaatcaaatgtttaaaataattattatttataatatcgactttttgagaattggtattttatgaaaaagggtttaattaatgacgaaatttaaaagtatttatcatttaagtcattttaatatggttgatttggtttgttttcattgcaaattaatttaataggtaaatacagttattttttcactttttaattaattttttatatataaattgattttactatttaaaaaattatttaagctcgctttttagcacttttagagaattggcattttgtcattaatatttgtttttttaaatttgttattgaattattttaagttttttattatgtataaattagcttaatttaattcattatttttatcattaattctaattgcattaattatttacttccataataaagttgctccggtttctgaaggtctgcaacagatcattgaatcttttatttttctttttaaatatatttttttatatttattcacattacggatagaagtttg

SEQ ID NO: 44949 - DNA, 1231 bp, Heterodera glycines
aaacatgaaaaattagaaatcttaaaaatgaaatatgtggcacaaagtcggcgatatatctcttaatctcgtcaaattcaccaaaattatgtcgcttacaaattaatgttctgctgccataaaaacgtgcgttttcacgtaaatttttaaaaactcaatgagaaacattattactaaaaacaaaagtcagattcatttcactgatcagcggaacttaaagtacgaagagatcattaaagttcgtcatattttgtcaatcggtaattaaaatgaaatttaaaacatttcattgataaattttgaaaataataatattttccttaccaatttcattgtcgtcagaaacggctttggggttaatgaacgaatgaatttataaatgaattatgaagtcagccgcacattcgattaaataggcatttaatacgtataaaatgagcctttgaaacaaaatgttttcacacggttaaaatgaaaaaaaaagtgaaatgccaaagaatttttttataaaaagcaaattttcccactgttttgttaaaaattattatgaatttattttatgacgttaatcggttagccgttactaaatggggacgagattttacgaaaagtcggtctctactcataactcactggaaagaccgtttaaattaaaaattcaattatatgaaattgaaatcggtaataatttaaattatttgcgaattttttttgcttctttaaaaattaaattaaataataaattaaccaatgaagtgatcaagagtcttggggagaggggtgggggtgagggaactgcaccagggaaaatgaatgaaaaacacggaatgaccttgaaatcaattagtaattcaatatttaaatcaattagtaattcaatttttcacataattattacattcaccaaattggcattaataatttgccggggaagaaatctttgtccgaattgttgagagataaactccaaaatttacaaataatatccttaataacgcgtaagcctaaatgttctaatggtttttgatgcagaaaaaattgttactatttttatacattaaattctcaatttttggcacgttaagtaacttttttggcacgtgaagtaacctatggtatttacagagcacaaaaagcaattggctcaaaggttggccacaaaagtcaacctaaattagttttggcattaacgagatggtcttttgttgcgcatataaagtaataaaattaa

SEQ ID NO: 44950 - DNA, 1400 bp, Heterodera glycines
ttttatcaatttctcataactgtgatagttgatagcatagataaatattgttttacaaagtgctaaaatgttaaaaatcagaaaactttcaaaaaatagccccccccccattgttgcatctttttcaaatacaaaacaatcgcgtcataattttttctttttcaatttttcgttgatttggcaaatgtttccaatttttcctcaaacttttctacaaacgcaataagtttcttccataattcttttaatccacttttgacgatgtgcttaatgctgtccagcaactgctgcatttctttgaaaaaatggacataaaatttcaaattgtttttgccaattttattggtttcttcagctgatgatgcacgaatagggacaaaattggtaatgaatttcttaaatttaaataaagcatatttaatttaatgtaaacagccctcatcaaaaacaaaaacataaaaaatgttatttctcaaaaaatttattcattaatttttaatataaaaaacattttttttaattaatgttctcttttgcatttaaaattaaaaaagatcaattatggttaaatgatcccaaagcaagaaaattttgtttgatttttcttttagtcacttttttaccaaaggaatttttatgagcctcctccttccagaaagtttctgaaattttgtgttttttttattttcagtgtaaaagacaaattgttaactttgcaaaaaaaaaactgaaaatttctaagccatttttaatatttgcatatcaatgccaaacctccaaatttttgcattcagcttcgatcaatgccgtttcatcagcacccaatgaatcggccaacaaaaatatttttgaaatttttaaatattctaaaaatttgtgctcaattggttcagaaatgccaagcaaagctttgccaattctatcagcattagccaatgttacttctaatttcgaattctcgttgaattcagtccgagtagagattatggtaaatgccaattgcatacctaaagtgccatttttcaaaaaaaaaagtatagaaaaagaaacaataatatttttgcttttaacgaatgggtagtttttcgaattcaaaaagcaatgattttaaatgtgtaaaatatatttattcaaaacatctttgcataattttactagaaaaatctcatctagctataatttttgtcagtttttaaaattttcttttgggcttgtggcccggacggactcgatcagttcggccccaaccaattttttgactataatttttccattgccaaccaaatcaaacgattttcatagcaagcctaatatgtttagaagttttttctaagctattgcttggcaattagacaattataaaataaattattacctgtaaacttgaaaatcgatatttt

SEQ ID NO: 44951 - DNA, 1658 bp, Heterodera glycines
aaaggaatttcaggggaaaaaaaaaattgtggcccttttttgtgcccctcccatgccagcccgattaaatttatttttccaaccggaagagagaaatgcaacttggggtgggcttttgtccccctaaagcaaaaaatgtcccttcaaaattggtcctcatttttctcgaaaaatgcttgacaattgccggcatcatttttactattgccggcatttccttttgtgtaattcgcgcatatttgtggtcaattgaacccgattcaattgaaattaatgtttgaaatttcttttcaaaatttgcaatttccccgctttttactgcgtttttaattaattccatatgaccaaagttttgcagtgccccccccccatttttttctctccgtgccaaatatggcagccgacggaaagcaatttatctcccgtcccctctcccgttttttgctcttccccgtcgcgacattagctttttgcggcgatgaatctcccctgtcgctcgggagaaaaacgttttttgccttttttcccattagctcgccgctgttgtaacatttaaaaaaaataaattgcattttttgctgtaacgcccatcgtccactcggacccgtcgttatttaaggccggctcatccttcagaaaagccatttcttgtcttcattctcatttttcctccgctccttatttttcattttttccattttccattttctttttttcaatttttatttttttttatttttcagtttttcatttgtttagatgcaaaaacctattccttcaaatcgccccaactcttctgtctccaaaacccttgcctgcgggcttgaaaaaatggtgaatgcgagtggaaatgagccactcacggtgccggtgctggcggatcggagtgatccgctggggctcaagtcggttcaacccgacccggtgccaatggaaagtgccgaggctggcacaaaagaaatggaagtgatggaagtggatgaaatgagcggagaaaaagggaaaaagggagaaatgggtaaagaaaaggtgaaaagtggtggaattgaagaggaggaagaaagtgagggcagtgagggtgaactgctaggagacggtggatttggcaatttgcaactaaaccccagcctgagggcgggaaataaagcagttgaaaaggaagataaggggaaaccctatctggtcgcccaagtgagaagcgacggtgtgatcgcggcacggatgaaacttttctgggatttcccggaattggtctttgtcccttttagcctcttcgacaacgcccagccgatcgaaatcggcgatttgttccgcttacataagtgtgagtggacgaatagcggaacaggatgggaagagcgcggagattggctgtatgaagcaaccggacggctgaactaccaagccacggcaacggacgtgagccaattgcgccagcgcatccccactcaggccgtcggcattttggtcgatgtgcaaagagcccgtgaccgacacgtcaaagtggctatggtgtcagcacctgagctgagctgcgtgatgcgcgcctaccgtcgccacttcccggccgatttcacggataacgacatccgctaccgctccgttgttcgtcttcaacatcggcagatcaacagtccgccatgggtgctgtattcaca

SEQ ID NO: 44952 - DNA, 1176 bp, Heterodera glycines
agatttatttgaaatttatacctcaaaaacaaaaaaagttattccagaaattctggaaattttcgatttttcagaaaaaaatttatatctcggttctgaaaagtcattagggaaaagtaaaatactacaaaaatccgcaattttttgctctattaaataaattttaattcatatttttatcacttttttaagaattgttataaaaataaaagtgattttggcattcggaaccaaaggggtgagcataggattattgagttgaaaatttttttcgtcaaaaatcttccaaaaacatgtctttaggggttatttgggccgctgatcacgaatacgtgatcagattttacttttgacatcgttaagccctcagaatccctgtgtgattggggattctgaggcatcatttttgggggggggcgaagttcggatccgatcggtgtacattatttttctgtgcattttttgattacttttacatgttttattaattccaaatattttttataaattatttaaatttatttattttttttaattaaagaatttcattatttattttttgaatttgtaaaaaaattaatttaatttcaaattaaatgaatattcaattaataatttccaacgttgtttttaattaataactaacatttttttcgtgttttcattgtttaattcatttaaaatattttttattttattaataataaattacatttttttatttgaattaaatttttttttataaataaatgttttgttttaaaattaattatttatttattttaattaatttaatattgtttgtttaattaaatgttttaaaataaaattaatttcttatttatttttaaataaaagaaggaatttattttataatttttaaaaaattattaacacattcaatttttaattatattttttataaaaccatttccttatttatttaattttgaaaccatgaatcacggatacgtgatcagttttcacttttgacatcgctaaagcctcagaattcctgtgtgattggggattctggggtatcattttttggggggggggaggaagttcaaatccggtcggtgtaaattcctttttttatgcattttttcgtcaaaacacgttgttgtacctcttctaatcactattgaaactcatttaatcactgttgtacctctt

SEQ ID NO: 44953 - DNA, 642 bp, Heterodera glycines
cggtaccggttttttcaaaatgaaattaccgttaccggtttgtctagtaccggtaccgccggtaaaaatttgcactggtaagaatgggggtctggtcgagaaaagagtaggaaattggtgaagaaggagaaatttttgagaaaaaattaaattttatttcatttagtcatggggttacacacatgcacatgtggtgtagtggttaactttctacctttcataatttttcgcctgggttcaattccccacttggatagaatattcctcatattttctttaccattattttaattaaaattttaatattaaaaaatattccaacttttttctttcatgttaagcatcctaaaaacccaaaacttaatcaattggtcattttttttacaaattctgttaacaaatcgcattaaaaattacaaaatttttcccggcggcgcctatcggcaccgcactacatagggtgcccactttaaatatcgattgattttctccgcagagcgcagagagtatgagcgggcatgcccgtgcctattgggtgattgtgtctgcgtctctgacgtgtggtgcgcggggagggggtggggggggtgcgtcgggaaatgtgggttcgggatggtggttggtgcgcgcgacggtgtgggg

SEQ ID NO: 44954 - DNA, 1344 bp, Heterodera glycines
tgaggcttttttatggatgaaatgaggattatcaaaattttgagatcgaaaccctcggataataatatattttttatttttttttaaattggtattttcttttttcatttttcatttgaaaacaattaatttttaccagttttttggtttaattattttatctcatggctcgtaaaagttcagtgttttcacttcaatattagatggagacgctttgcatcgtaaaatatgaataagttttattttgttggaaaatcattactaaattagagaatttttctaaattttcttatatttaaaagtgtttttaaatattactatattccttttaaaatcattttttatcattttctaaaaaccaaaaaaaaatttattatgaattaatcataaataatctcttgtattcatgcattcactgtgattctttgttgacggaacggagggcatttttatttcaaataattaattctaataaataataattgaaattaattattttattattttattcatctcatttattttctatttcttctggcttatttaaaatttagatttattgttttaaaataataaaaatcattttattgatactttttttgacagtgcattaaaacattgttaattaattatttaaatttcctttttatctgataaaagcaaataatccatcttttttattaatatataaagtgttcataattttaatatatgttcattctagaaatcatataataatataatatctatctataaatttatagaatttattatttctttgtttaacatttgaatataattttcataaatattatatttttaaaatattaattatattaatttgtattataattattcctaatcagttctatataaaaatcaaattaaagttttttttttaataacttatgtagaagtgctataataattttaatatttattattttttaataattgttattctcatgatcagtaaactacacaaaaagataataaaatgccatcgccaaaagggaccgattgtgccatatcaagaagaaaaaaacaggcaaataaaaaagtgcgaatgcagtctaaaacattatttcgttgcaaattagtttggcatttataaataacggttacacatttgatgaattttaagcgctttttcttgccattcctcgagcacaatgccgtcctgtggattatagcataatcggtccccttcggctacggcattttattatctttttgtgtattaggaaattttgatttgaaaagatataacgaaggtaagataaaaataataattatctagggggaaaatatctttccctgtaataattgatacaacagttttat

SEQ ID NO: 44955 - DNA, 1040 bp, Heterodera glycines
taaggtgaaaacacacattttacaacccatttttggccaattgtaaaaagccgggtttttttctttaaccctgttattctcgaaaaaatgtcttgcgacattttcatccactaggatagatcgctagagaattattttgcattgcagcagttatttacgtctagttcatttatgattaaaatattgaaaaatcttttataaattctatggtttattaaattgattcacttttattattggatgaaacgaaaattgggatttttccttttttaattttttaataaatttttgctcataatgcttgttattccattgctcttagatttttctatcatgtacattttaatttctttacatttctcacagcatattcacatatcacaaaaatggtaatagcattaaatatattaaacttcattcataatttaattttatctcgagcttcagcagcaatcgtgctgtccttccattttcatcaagaatctatggagagttagtaagtgaaagcaattttttgcctaatttaagaattgattgggtttatttttaaattataattcgacttaataatgctatttatatcctttaaatttaaaactaactaaaatcgatataaaaatattgagttgattgatgtaatagaaaatattatattaattttaagcaataaatttgcattgtttataaaatttttaaagttttttaaaattcttgtgaagtttgtgttatgtatgactttctcgtctattcatcaagctcagatcacttacgttagaatttcttattttctggttaagtatttttattgaaatataaattttaaattatactttaaaacgcacttagatattaaggacaattctttttctcaaatgctagtcgtatttcttttaattttttatttggttttaatttgttgtagataattctgttgggataaacgaaaactgtagtttttctttttttaattttatgaatatttttgtatcgttcagaaaaacttttatgttaatttgggctcttttcatcataaagtttct

SEQ ID NO: 44956 - DNA, 1379 bp, Heterodera glycines
agggtgtccatttcaaattaattaatgggaaatcgttcgttcttttttaatcaaggatttaacaaacaatagcagaagaaataatttaattaaagttaaaataaatgtaaataaattttctttcaaattaattttacagtgaatgtgaagagggagagaccggaaaagaagctcgagagaggggaaaagcatcagtacaattctcgcttttcctcccttcggattaatcacatcgcaaattccaatttttccgtttcccttaaacggataaatacgactgaaaaggtgtacacccttttgtgcggagggccttttgctgaagacccttttttgacaatttttggcaggcccaacggaattgggccttaaaacggacgtggaccgatcagtatttttgttgtaagtgatttttggcacgaaaaaataaagttttaataaatgaatataacttttggtttaatttttgattactgttttttgagttggattataataaaatttgtggaaaatgtttaaatgtaaggccgtattaaaaactaatcattatttaaccatttttgaacgtttaactttatatatagcgaatttttaaaatttttgacattttatatgaaggaccggtagaaaatattgccgtgctccagccggaccggggctttgttcaaaatttgtggtacgttgcttaaaaaattgcggaatgtgcaaatttagattgggattaattactttaattaaatgtaattctttttcttacaatttcagggaaggaagaggaccagcggcatatgtggataaagagaggggggtcaggggtcgggtcaatgtcgtaaattttaggcaaaatcgaaaaaagatatgaaaatttacttttacgacattgaatcgcttttcgttaaaataattaaatttttgcatatctaaaattatttaattgtttattgaaataattatgtagtaataaccttttcaaactatttttaatttattgaaatattcagcgtatttaaaatgagggatatgagttcattttgttaatttccatgtttaaattattatgtgtttctttagtttagcataatttttttttgaaattaatttgaaaggcccaaattgggtaaaggtcaaaagcaattctgaatttttttttaagtgggtgtttccaatgataccaaacttgaagaaaagtgtcagctgttactggttgggagttagttgaaatacattcacccccatttctaggtgtaccatatgtttggcataaaattttatttttttttaaatctcaatatttgcaggtcaaaaattctgaaaaaattcccattaaagtaacttttaatgctgatcaaaaaaagtcttttcagcaacttcattaaatcact

SEQ ID NO: 44957 - DNA, 776 bp, Heterodera glycines
ttttgttgttgtttgttaacttcgttggtattataattttttttgttcaacttcgtttgtattaatatttaattaatttatttaatttaacatatacgaattaaaagcatggaataaaaattccacaatatgcgatactaattcatactgtatcctttttttttgtttttgtttccgtccaaggtcaggcttttcccgttttcttttttgtgcaaacaaaaatgagtgcgtttggagatgcgagttcaaaaacagcaccaacaaatgcaacggccgaatctggacggacctccacgaccaattcattcgcctagcaactccgcacacatgtccagcagatgcgtcacgtgttgatgctcaaatggtcacgaccgcaatcaaaaggcgtgcaattgccaccttcgaaccaccttctgtcatcagagcagaagcgcttcaaaatgtcccgtctccgtcagcaattttggtgtcaaaacaagcagcaaaagatgtgaaaacaaaatatttttcatttaataaaaacaattccaatttagttgatcaaaagagctcgccgagaagtgaatgcgccccccgtcgttcctgcaaatcttgagcagcttattatcagcccggcgtatcagacgtacacaccgacggacggcattgatgaagagttcctgttaggagacagcggcgtatattatgaacgaggaaatgagaacccacagaggtaaaatgacaattattttcttatttcttttgttatagaattttgttgttcggacgcgagtcat

SEQ ID NO: 44958 - DNA, 931 bp, Heterodera glycines
aaaaacttttgggtaatgattatttttgaagtgagtcaaacaccgtattagtgcttgctgtgccgagaaccggcaggcaatggatggctttaaatctgcaagaaattagattggcaataagtggttgtaaaaaacttttgggtaaggaattattttttgaagtgagtcaaacaccgtattagtgctttgctgtgccgagaaccggcaggcaatggatggctttaaatctgcaagaaattagattggcaataagtggttgtaaaaaacttttgggtaatgaattattttttgaagtgagtcaaacaccctattagtgctttgctgtgccgagaaccggcaggcaatggatggctttcaatctgcaagaaattagattggcaataagtggttgtaaaaaacttttgggtaatgaattattttttgaagtaagtcaaacaccgtattagtgctttgctgtgccgagaaccggcaggcaatggatggctttaaatctgcaagaaattagattggcaataagtggttgtaaaaaacttttgggtaaggaattattttttgaagtgagtcaaacaccctattagtgctttgctctgccgagaaccggcaggcaatggatagctttaaatctgcaagaaattagattggcaataagtggttgtaaaaaacttttgggtaatgaattattttttgaagtgagtcaaacaccctattagtgctttgctgtgccgagaccggcaggcaattgatagctttaaatctgcaagaaattagattggcaataagtggttgtaaaaaacttttgggtaatgaattattttttgaagtgagtcaaactccgtattagtgctttgctgtgccgagaaccggcaggcaatggatggctttaaatctgcaagaaattagattggcaatatgtggttgtaaaaaacttttg

SEQ ID NO: 44959 - DNA, 926 bp, Heterodera glycines
agtcttttaaatggtcaatccggacaaatttggtattattcgaaagctcttgatgagttacgtttaaaaccccaagaattattacatctgagctcccggacaactgagttccagtgaaaacagacctttcagtaccagatattatcgaagacgattaccaaatttgtcagggttcgaccgttttaaaaatcccccgtataagtcaggagattcaaaaagacctatagagcaaaacatcaccaaatttgatcgatttcattctgcggcgtcagcaacgaaagtgcctaaattaacaaatgaattccaaaaacaatgaaatcaaaaagaatacattctgcgcaagctgacgaacttcctccgccaactttaagcttcaaaatggaacacagcgaagttgagcgttaagcccaggcgagttggattggacagtttcatctccttggtggcaatgtcaaggccatcatggtaggaatgttttgacgggtccatgacagctaaaaatgtaaaaatccgttttcatttatttattcgaatatttagttttaaattatactaatcgataatgcgcttgcgcagcaagttccaacgccccaaggcggtcttccacggtgttgaaccaatccaccaattctcccatcttcaatgcgaccagacgatgatcgactgggaaatggccaccaacacgaacattaatagttcggaagacaccctgcatctctcgttactctgtagacgcgccgatgcatttgccgaagcatcttaaaggcgagcgtttggtaatcgaggtttcgcaggataataaaatgactcttggacctcgagggttaatttctttctataatgaaagaaggctgaagcaggtccaaatataatgcatcgtgtttaaaaagcgactggtaaacgccctctctcatttggtcccagcg

SEQ ID NO: 44960 - DNA, 949 bp, Heterodera glycines
  unsure (1)..(949): unsure at all n locations
gtttcttacctttgccaagttgtagataaataaaaaaaatataaaacatactttcatatcttggcccagtttcaaccaaattaatatttcatggtgtcattcaattttagtctacttgcttctgaaaaaaaagttataaagcattgaacaggctatgttttttgccatggtcatgcgaatataattataaacatttaaaattttcaagtcattaaaatgcaactaagtcaaaatgcatttatatattcgatagtactaagaattctctatttacggttaaaatttcaaaaaatttcagtattaaaaaagttctggtaaaataatttgactcagcacttattgaaaattttggaccataatttttttataatttcatataaaaattttataaattaatattctaatagaaaacattgtatgataccatgaaatataaatttggttgaaattgaccaagttatgaatttatgtcttacattttttgttttcctaccacttggcggtttttaggaaacgacccagcacgattaaaaaccacggtcatggtcacggtcccggctctgctctcgggaagtgccggtcccggttttgcacaatgtctcttttcctatgcaactatttttatttacgccaaatttttaacgtttttgtagtgttcttttaaattacaattttgaaaatcgcataattagggaaaatgattcgtccacgctgattttctatttgcacgccgaggccccaatggtgggatggcctcagcacagacggaccgatcaaagttatgtgatgtacacggctgaatcgccaccgaacacattgccacatttcnnccgcnccatcatgncggncaattggttcttcgtaaggggtnncctntcggncggncagtnccgtatncttgccttgtaaaggaggcttgtccgaatcgcacccgacactcccgcggaag

SEQ ID NO: 44961 - DNA, 911 bp, Heterodera glycines
tcagcgcgaactcactttacattcaattcataaagagattactattaaattacatttgtaattattttataattgatacaaattacatttgttcagccttagagactaaccgtgggggacctctctatctcggccaagcttaaaaagtcctaactttatcattccgaacaagtttggcttcctgaatatttcaagttttggtctatatttttcattaataatttatattttacaagaatttggaccccggactataacgtttttctttctcaactaattgaacattgttggtatcatttgatagcccagtgtcctctattagcctgcaaaatctcgaaaaattttgttaaggctcacaaaaagttatggccaaaaatgattgaaaataaatattccgcacttataattaagtgcgtcaaagcattcaggtagcgtatattgattgttctgttatggttcgaattattaatttagcggtgcattcgcctgcctcaagagttacatggcctaaaaaattggaaattttaacacatttgcgatagagtgaatgaagcgagactgagttgtacggttggttaaaaataagtttttttttaggccatgcgttcaattccacttgcctgttttagaatatagacacgttcgaaaaaagatatgagcgttcgaaaatttgtttttctcattttttatgaaacggtatgttaatgaatgatcataatgttcccaagcaagcatttttatgcaaaatgaaaggagcaaaaataaaagagaaaatcggatggatgctcaattaatgggtcattgttgcatttaagaatgaattgctttaaactgacaaatacaatcgaatagaaactaaatttccaaagataaagcctttgaaaactccttcaaaatcacttgccatcaca

SEQ ID NO: 44962 - DNA, 199 bp, Heterodera glycines
ccgcaaatgtccgggtcgcaaatgtccgggacgcaaatgtcgggccgcaaatgtccgattttggcttgggccgcaaaattcaacaaaaaattgggccgcaaatgtccgggacgcaaatgtcgggccgcaaaagtcgcgacgcaaatgtccgattttggctggggccgcaaatgtccgggccgcaaatgtggggtaaccg

SEQ ID NO: 44963 - DNA, 1200 bp, Heterodera glycines
  unsure (1)..(1200): unsure at all n locations
gaaatttttttttaatttatagataaataaagaattcttatgtatattcaatatataaattaattttggctcaattgcatttaaagactntagaattttaaatgtttataaataaatatgcatgaccaaggcaaaaaacatagcacgttcctgttttataactatttttcagaagcaattagattaaatttaatttttagaatttcaagtccactacttaatatatttatcttgaaaaaccattttgttcataattatttaaaatgtatggaaaagtttcagaactcaagaagaaaaaacataatacccaaataaataattaaattttgcataatataaacttcttaaatgctcatgatacgattaaaggataaaaaccaatgataacactttatatttaataaatcttatgatgattaaaatatagcaattaaatattctatacactttatatttacattaattatttctatgttaaataataatgaaattaaattgaatataataaattttagaataaaaaatgaaaatatagcaaaaatgtatttgaatatatggataaagatagtttgacaattataaaaaaatgcaaataaattctccagtatttattgtttaaatgaaaaaacacaaaacagatagtttcttcattcatagttgcaattaatcatttcgttggttgatgaaatcagcaatttatattacttagcttgaaattgttagcatgaaatgcaataacaataaatgtataaaaaaattctaacaaagtaagaataatacgaataaaaatgagatattatttatttccaaaaataatttattaataaataaaccgttatatgtacatttacatactttgaaatgtcctttccaagaaaacatgtgataagaataactaagtttatacatgattaacgagtaaaaaaaattttataaaatacatgtagattattattataaatataaaatattgtaagtaattgtgatcatcgatgtgaaaaatggtcgaaatttggacggaaaagtccatgcacataatattttttaactcagtcattataaaaatttttaaataaattattaccaagatttgcataatatggaaaagtttcagagctcaagaagaaaacaacataatacccaaataaataattaaattttgcataatataaacttcttaaatgctcatgatacgattaa

SEQ ID NO: 44964 - DNA, 1416 bp, Heterodera glycines
attcccaaaagcttcattcagtcggcattcgtcccccacataaagcatttggctgctcctccatttggtgcaaaacggaacggtactgaaacgcacaacaaagggcttattgttgaatttgctgccgaaaaagggccagcaaaacctttttccaaaatcccaaatcgaactgttcgggcagtcttcgcactgtacacagccctttctccttcaaaatgacatgggacaatccgttgacaaccgctcaagcaaaaaagggcaattacggggagcgtacaaaaagcgccgactcaccggcacccaacaattggtcacccgactcgccaaagccatccaaacaaaagacggaagcgccgctcggtttgatcggatgacggacaagcagaaaggaatcggagaaaacgacggcacattcttcggctgacggcaccaacaaagagcagcgggaaaggcgtttgtcctggaggcgtttgataaatttgacaacaatgggcccaaaaacaaacaaatccagtggcactcagcgattcgggaatcgcaattcggaccaatgttttgagagaacgcggcgaatgggcactttgttgatgacgagtgtcctcttcataataccctggaaaaggaaggaaatcatttgattaacaaatgttaaaaaccaatgaaaatttgtttgtcttcttcggccctgtctttgccgatgagtacgccaacgaaaagcagcaaaatacccgaccgaaacattgctgcgtcaagaacaacaaaatgacgaagttcagcactgtctcgactctttcagttaattatgaattggtttataaatgccaatgcttccgctctcctcgccaaccttattgtgtttgctcaacgccaagtcggcaatgtcaacttcatgaagttgcatttttcgctcgaaaatggcataaaagcgcaaataacgggccaaaacggtgacgagatcggccggaccaaagttcccccgaacaaagagaatctttttgattctgaaagaaatgaggtaaagatggaatggcagaaaagacacgcactgctccttttcagatgccaaattgccgaagagaaaaagggacattcgtttgccaatgccaccgcccggcccaccaacatccaaaggacgcgtcgccattcttctgaatttgctcggcgatttaaactcacaaataaaaactcactcggcctgaccagcggagctgcggaaaacgtcaatcatatgaaaggagccggtggttgtggtcaagagaaagcgattgacatggtctgaagaggaaatgggaagaaaagggaagggaacggaggagggacaacagaaagaggggtaatcaccttccgattcgaccaactgcacggagtgcgccacttaaatgttcagcaaacagctctcgtccctgtacggcttcc

SEQ ID NO: 44965 - DNA, 1054 bp, Heterodera glycines
taatatgttttgattactttctaaattaaatttggttttttgttcagtttttctttaatttgttattaaatacaaaataataaaatgacgagataacccaacccaaccacgatgatgctcagtggttaatattttcatttttcaatgaaacttgtagtttattttttcataagataatttatataatttaattagataaaaaaaaattatgttcaattgtaatttttgattttctatatttttcttcaaatatatttttattgatttttttatgatttttcttaaatgatcttagttttttagttaattatatgatcatttttcttacctttgatttattttttaaattatatattgcttgtttttgtcattttcttcattgtatattatattttttaattttcgagaagtgtattcagaatttaattaattgatgctatcttttaataaatttttctgatataagttaattaattttttttagttgcacaaattaaaaaaatatttttctttgttaacctttgttgtatttgtataggtttatttattgaaacggtttcttgtaccggaatcacacctttcgcaaaagattgtcaactcttttttgcatctagttttttgaacttaatttaattttatgttcaattatttttgattttaaaattgatgttctataatttttttttaatttaatttttttttaattcgttgacggcgtgttttctcggttaacacattatacatagaaattattaattgggtaaaataatgattttctctttgatccctgttgttatagttactattggttatcatttttatacttttttcggttttattagttcggatattatgctttgttacacagtatatttaataaagaatttgggaaaaacataaaatgtgagattatcgattgctttattaaataattcttagtaattatcttttttttcaagaacaaagtcttcagcttgtacactcgccgcaaactcagatggttgattctttcactgaaaaatttgtgttgcttgttatgtcaagtatattgtca

SEQ ID NO: 44966 - DNA, 609 bp, Heterodera glycines
  unsure (1)..(609): unsure at all n locations
aaatttttcagaattttaacgaatttntgttaaaaaatagtcaaatttttcgacatttcctcttttcccctttgctagcctcccgcccccaccccctttatgtatgttaataatactacaaattaccaagaataagtcagattaaatcgaaatttgggtagccttttaataaaaatagaaaaaaaaattcattttataaaaaataacttacaagaaatcgtctcgaaaaatattctaaaaaagccagttacggatcaaaattacggaaaaatccgtaacccgtaatccgtaactccaaaaaggccgtaatttccgtaatccgtaatacgtaatccgtaattacgtccagccctgggggggaaccaaccttcaaaaaaactgaaaaaaaatctccgaaaaattgaattaattggttgtcgtcaaaagggtataagatgattgtgggtgggggacattatagtctggccggatagtctgagccaagtttaaagcatcataacttttttctcagctggccaaattttataaggttggcatcattcgaaagctctacatgtttagaagcttttgataaactaatttctaaccgattgaacagcttataaaaaa

SEQ ID NO: 44967 - DNA, 990 bp, Heterodera glycines
tagtcagagaaattgagaaaattagtgatgaaagaaatgaaaatgcagggtgtgagacgaaaggagagagacaaagagagaagagggatataaagacagagagtgaggagagagacaatgagagagaaaaagaggagagagacaaaacagagagtgaggagagagacaatgggagaagtggcatagagacaaagagagagacaaagagagaagagggagacaaagacagagagagaggaaagagacaaatagagagaaaaagagaagagagacaaagacagagaggaaaacgagaggagtgcggcatggtgggacgcgactgcgatcgcggtattttgttttgcgaggcgtgccgagaattttttgggagaaaatttatttaaaacatttattgaagcgattgtctttttgaatacctattcaaatttgggactgggtcgttttggcgccgacgttttggcgccaacccaagttttcggactataacttttttcattgttgaccaaatctaacaatattggtatcattcgaaagcccttctcaagctctattagccttacaaaaaacaaaaaaagtttggcttgtaaaaaagataataagaaaaaacttccaaaattttgtttttttttgtaatttcatgttataacttttttgataattgtctaatcgcgaaacaatagcttagaaatagcttctaaacacgttaagctttcgaatgataccaagaatgttaaatttggttaacaattaaaaaagttatagtccgaaaacttgggctggcgccaaaacgtcggcgccaaaacgaccccgaccctcaaatttaaaccatttttttttaaatttaggttatttttctcaaaaaacgtttcaaattccaattttttcccatcggagctaagaaaatctttaatttttctttaaaaaaattgactctaaatcacaaaataggtcattttatacaaaatcttttaccaaattgcactcaaattt

SEQ ID NO: 44968 - DNA, 983 bp, Heterodera glycines
atttttaatttgaaaaaacagaatgccaagaattaaaattttttaattttgagaaaacagaatgccaagatttaaaataatttttaaattggaaaaaacagaatgccaataattaaaataattttaaatttgcaaaaacagaatgccaagaattaaaataattttaaatttgaaaaaacagaatgccaagaattaaaataatttttaaatttgagaaaacagaatgccaagaattaaaataatttttaaatttgaaaaaacagaatgccaagaattaaaataatttttaaatttgagaaaacagaatgccaagaattaaaataatttttaaatttgagaaaacagaatgccaataattaaaatattttaaattagagaaaacagaataccaagaattaaaataatttttaaatttgagaaaacagaatgccaagaattaaaataatttttaaatttgaaaaaacagaatgccaagaattaaaatattttaaatttgagaaaacagaatgccaagaattaaaataatttttaaatttgagaaaacagaatgccaataattaaaatatttttaaatttgcaaaaacagaatgccaataattaaaatatttttaaatttgagaaaacagaatgccaagaattaaaataatttttaaatttgaaaaaacagaatgccaagaattaaaataatttttaaatttgagaaaacagaatgccaagaattaaaataatttttaaatttgaaaaaacagaatgccaagaattaaaataatttttaaatttgagaaaacagaatgccaataattaaaatattttaaattagagaaaacagaataccaagaattaaaataatttttaaatttgagaaaacagaatgccaagaattaaaataatttttaaatttgaaaaaacagaatgccaagaattaaaatattttaaatttgagaaaacagaatgccaagaattaaaataatttttaaatttga

SEQ ID NO: 44969 - DNA, 866 bp, Heterodera glycines
tagggagggcgggtgcgcaatagcccttttatttttgagggaattttttaaatttatactctatcccagaaaaatggctatctcttttttttgagaaattttatacctcacaaaagcgcttgcgtatgagacggagggctgtgcacaatcgccattttatttcacagaggatttttatatttagaggttatcccagaaaaatggctatctctttttttgataaattttatacacatacaaatgctctcgagcatgatagggagggcggtgcgcaatagaccttttatttttgagggaatttttaaatttatactctatcccagaaaaatggctatctctttttttgagaaattttatacacatacaaatgctctcgagcatgatagggagggcggtgcgcaatagaccttttatttttgagggaatttttaaatttatactctatcccagaaaaatgtcaatctctttttttgagaaattttatacctcacaaaagcgcttgcgtatgagacggagggctgtgcacaatcgccattttatttcacagaggatttttatatttagaggttatcccagaaaaatggctatctctttttttgataaattttatacacatacaaatgctctcgagcatgatagggagggcggtgcgcaatagaccttttatttttgagggaatttttaaatttatactctatcccagaaaaatggctatctctttttttgataaattttatacacatacaaatgctctcgagcatgatagggagggcggtgcgcaatagaccttttatttttgagggaattttttaaatttatactctatcccagaaaaatgtctatctctttttttgagaaattttata

SEQ ID NO: 44970 - DNA, 1179 bp, Heterodera glycines
  unsure (1)..(1179): unsure at all n locations
aaaaaaatctatttttttttttttccacacatcccccccaaaccaattcccccatatttatataaaccccaaatccttcataattatcttccctataccctttactttaattctactttcattttttcctccccataattatttaattcccccaaacncacacttnaaaaaatctatttttttnttttcnnnccaatccccccnaacccatccncccanatttaattcnatcactcatattttttnctaattnancanaatcctcccaaactttccannaatactccccnttaaannactaacttacactnaaatnanctcccacctanctnnctcaaaaaaattttcnaaaatctcactctttcttttttatttattttttccaaaattaattcttaaatattttttcaaaaaaaattctaaaacccaccaaattttatttacatttattttanacactctaatcctttttctatcaaaaacccccatcaataaaatttttaaaaatttttaattcctttttaaacaaaccaaaaaatttatccttaacttttttttcanaaactcatcacaatcccaccaaactttccacctttacataaactaatacaaataacctattttaaatattatctacgcttgtcatttaaataatttttatccaaaaaattttttttttttttttctcatcactccccctcaacccatacncccacatttatatcaatacccaatccttccccaatatcttcactatatcctctactttaattctccattttattttttctccccataatttttttantaccccaaacacacactttaaaaaatctatttatttttcttttcatcacattccccccnaacctatncacccanatttataannanaccnaatccttcnnnaataacttccctatancctatactttaattctncnttnaatttttnctccccataattntttaantaccccaaactnacacttaaaaaaatcnatttttttnttttcnnnccactccccccnaaccnatncncccanatttatnnnnanaccnaatccttcnnnaatancttccctatancctntactttaattctncnttnnatttttnctccccataattntttnantaccccaaacnnacacttnaaaaantcnntttttttntttt

SEQ ID NO: 44971 - DNA, 1256 bp, Heterodera glycines
tatgtatgttaataatactacaaattaccaagaataagtcagattaaatcgaaatatgagtagccttttaataaaaatagaaaaaaattcattttataaaaaataatctcgcaagaaatcgtctcgaaaaataatctaaaaagccagttacggaccaaattacggaaaatcccaaaaatccgtaacccgtaatccgtaatccgtaactcaaaaaaggccgtaatttccgtaatacgtaatccgtaattacgtccagccctgaagcaaatgggaacttttccttcactttttttaatgattttttcataatgatataaagaaaaaataatatttttaaataaaattttgtaatttttcaatttcctttcctttaattatgccattatcaaagacttaagaaatgttttttatgaatctcatcttgctaaattttgttttaattatggttctaattaatttgcctttgtaataattctgaaaagcattttcaaaatttatttggtgccaaatttattattttaccttctttacgcaatatgaattttacttgaaattggtttatcaaaaaatagaaaattttttatttgcctgtaaaatttaaaaaattcatcacgataaaaaaaagttaaatatatttttgaaatttttttgctcatatttttctagaattgaaaaatttgtagttatgataattaatctcttttagcactttttttcaatttaaattttcttagccaaaatagaataaaactgcattctgctccattttgttggaaaatattttcatttttggcattataacaattataaccaaaattttatttttacttgggttttattatttttatttaatccatattttgtttattttttcatttttagtcttttggcaatccttaatgttttattaggttttgttttgatcatagctcgtaactgaacaaattcaagtgaatttattttttattatttacttttatttaacaatgtacattgtgactgtctaaggaatgattgatttccttataattttttttaattttaaaattcaattttggtttaaagtctcttttttaatattttataatagacactcctggtacgatgttatccaatgttaccgaggcaatcgttggtcagatcaaatagcacaacgtaatcagtaaaaggtaacgaattttttttttttaatttataacattttctggtaaattatttttatttttaaatttatgtctcatgaactatatttaatt

SEQ ID NO: 44972 - DNA, 1247 bp, Heterodera glycines
ttttgcccgaattatttgacaaaagaaggcggtgaaataacgaaaatgccgctaatttcgccttttgtgttatttaatattttaattttaatgggatttaaattagttagagaaaatatattttttcatttttttgtttgcgattttcagcttggatttggaattttttcataatctgctgaaattaccgtccatttttatgtgcaataattaggcgaattattgccccaattagtgataccaaccatttttttcataattggttttcaactttcttttcaatctttgcgttttccatcgtttcggggaattttgacaaatatcgcacttttaatggcgcataaattgagaatatcgaactggtgcaattcagcaaagaaaacagctggggtcacatagaaatttcaaattttaacgatttgattgaatttggccatccgtccattttatgttcattttctgtccattcccgtaaagccgggccccgtgaaagaatcgaacgatcgcttctcaaatccgttgaagccatagcctgaaaaaaagaaaacataaatcaaatataatcaaagggttgtcctttttaccatcaaacggttcaaatcgcttgtcaagtccggtgaagccaggcccagtgaacgagtcgaacgcgcgtttgtcgtaattggtgaagccggtgtcgaaagcggcccgcttgtccagcccagtgaagccggggccagtgaaggaatcgaaagatcgcttgtcaaagccgggatttagcttaaaatggggacaaatagttttttcaattaaattataattaatttgagttttcctttttttattgttttacaacacttacataagcattgaatggctgcttttctgctgggtgttgttgttggttttgcggttttggtgctggggccgaaagcgtcgactgaaattatttaaagaatgaaattaatttattttttaatttttaattaccgtaataaaaactaagccgaaaagaacggcggaggtggagaaaatttgttggaaggacattttgtgactttcaaagaacgattaaacacggaattattgcgaattgtctaaaagaaatttaagtaatttgccaattcattctgagatagagaagaagaagttccaaatatttctaagaagtgtttttaatgggttttgattattaattttcatcgcttttctttcttttggcctcttacgtgcgtggcgtccccaaacaaaggcaattaggcgccaat

SEQ ID NO: 44973 - DNA, 1598 bp, Heterodera glycines
gcgcaaagtgaaccaattttttcaaggttaaaatatttgaggaatcttcagcttttggtattcgttctaattgatcaaatttataattcaaaaacaagaacactcgagaagaaactaagcttggtcgggaccacaggaattcccgtatttttagatccccggtttttgaaaaaaaaattaaagcttaagtacgaatcataaatttttatcttaataaaaacatgttaacaaaaatttcaagggtgacaacgaagaatatggtagttttatctgtttatactgtatctatctatatgtgtctcagcttactgtacgtcaatttatctaacagttcgtctctcttctgctgtttttgttttcttttcagccgtagtaatagctgtaatgacatgaaaaagacagaattaagcaaaataagtttaagtatgagctttgaattgaaaatgaaaggagccaacggaaatttatttattttgaaaagcgtacgaaagcgcaaaagggcggcataatgaaagtgatttgagagcagacaaattgagagactttttatagtagcgccaagccagacaaatgccataccttccaaacacaccaaaatgacacaacatcaaaaaaatagactcttcagctattttaccataaacaatgtattaattaattaattattaataattcaaaacaccgcagccaaactcaaattatgaccggaagtgacacacataacaaattcagaaaacctaattttgcacaattgctttcaaatttaattaattagggaagaatttagtgattcataaatcattcaaaccattaaatttaattagtgtattttaattggggaatatgtctaaaccaaattaccacatcaaaacatcaattcatttttatgacggaaatgacgcaacaaattcttaagtaattatatttttattaagatattttaaattttagaaaagaataataattacaaagaaaaataaattaaaattttaacagcaactttttttttacattattcgtttttgaattcatctttttagtcgaagaattaagttaaattacaaaaaataataataatacatctttaaaactattttatggtttagtttttaatttagcatttaacataaacattcatttaaacaaatcatgtgcttatgactaactcggattggcataacacttgaattggcatttctttcttatttatgaaagaatgaaaaaattgtgcatatgacaccaaagaaattataaatgtcaaaaaatatggccatataaattgcgattaatgcttttgggttttcaaaataaattttcaaaaataattttccgcttttaataatttcaaataattttccgcttttaataatttcaaataattttccgcttttaataatttcaaataattttccgctttttccaaatgttccatttgcgtttcgttgtgcttcttctgctggtaattgtcggccttttcattggccccaattttgtttctgctgattgtgataaaaaggtggccggttgggacgacaagaaagtgaacaaaggctgagaggaagccgaagcaccgctcaacatcccgtgcccgtcgtcag

SEQ ID NO: 44974 - DNA, 1151 bp, Heterodera glycines
  unsure (1)..(1151): unsure at all n locations
aataaataaaaatataaaagaaatccgacaaaaaataaataaaataaaatgaataaaacagttttcttaatactttttggtttggcaatcggccaagcaaatgctaattgttgttgtctatctaatgaagaaaaacagcaattgaatgctgcgagaaaaaccattgaaaaagcatttcgggatacgctcagattaaatactgaagcccgagatttcgcggctgcatctcatagggcaattacggaggcagaaaaaattaaagttcgtcatcccgaggcaccgggcatgaaaacatggttcggtaggttattggaaggggtgagaaaagtacaaggaatttctgaaaaaataaatgaagaaaggcagaaaatagaccatattagaaaagaaatggacaagtgtttgaaccgaaaagatgtgttaatgtgtcgagaattggctgacgaagcgaagggggcatttgaaattgttaagcagtataggttggatgccggtactgcgtaccgtaacgcctatactcagtctgacctcgggatcggggaattggccgaaaaggtaaaggaaacaatgaaagaatatttgtcccgaccggggctatcctcaagaccaacatttaatgatgagtttatatctgcttaagggtataaaagagaacggaaaaaaataaataataaattttttaaaatgattcaaagaacagaaaaaggaacagcaattttgatggaagcctcaaaaaaagaggcagaaagggtgtggaaggaagtttcggtattagcagaggaagccgatgagtatgtcaaatctgcccgtggagcccttaatcgggcaattaaatcccgagaaaaagccccctatgccccgggggttcgagatttgttcgtaaagatctcagattgtatctgggaaagttacaccattttagataaaattacttccgagtctgaaagggtagaatctatttggcgtgagtccgaacgttctaaagatttcgatcagaccaaaaaactagaggagaaattacttaagggtttgagtgaagttagaaagctacacttagaatctcgcaggattcacacaaaaattttggagctggaaaataaagttcagtctgtagtgtgggattttattgaacttcccanaataaaatagaa

SEQ ID NO: 44975 - DNA, 1132 bp, Heterodera glycines
  unsure (1)..(1132): unsure at all n locations
gcaattgtttttgttgcgcttttgaacacaaaagtancattgttgttttcggtgccagtgctaattattctcctaattaagttggctnttcttagaacaacgaaccaaatggacgattcagctttattcatttaaatgtgtaaaattaaataattgaataaaataaaattgaaattaatatgccaaatttccaagttttttggcaaatttcgattaattccgttttcaaatgcattttgctcatttcttgtttatttcactttttacttaatgatatgtggaggtgtgccgtgactgaaaaatcccgtgaatcgtgaccgtgaccgttaatttttgagtttaatttttctctggtgctgaatttttttgcgttttttggggaacagggggtccagtgcgccaataggcgcatgaattttgtgcacagattttaaccaaaaaatggccaaattttgcaaatttgagccattaaaataattggcttaattagaagtgcgtaaaatttgtaaaattcgaatttttagaagataagcattgaatgctatagtaacatgtaaaacattggagaggttttattattttagtttttaaaaaaatttgatcacacataacttatcattaactgatcagaagctcacaaaactttggaggaaaaaaacatcagaattcatgagcaattttcaaaaaataaacattataatgctatagtaacatgcaaaaaccaaaccttattcgttttatatatatatttcgaattttccattatttttcaatttttttgcggttaactattgattgcaaattgcacataaaagggtgatttcagccttacaaatcacaattttttaacaaatccaagcatcctttagctataatagcttcttttctttaatttctttttttaaataatattctttatataatggaaaatgcggataggcgccgccggaaaattttgaaaatttgattgtgaagtgttaacagattttcaccaaaaaaagacaaaatttttgcgattttggtcaatttgttaagaaaaattgtgcgttattttttggggttgggcggtgccattggcgctgccgggagaaaaattataacttttgacccttttaaacagattttcattgaa

SEQ ID NO: 44976 - DNA, 889 bp, Heterodera glycines
  unsure (1)..(889): unsure at all n locations
ttccttatatttggttatatcgttttgcttttggtggcttcgcttggaacagtggaatcatgcgcacccgtccgatctggcaagttaagcaacgattgctgactagccaaaaggttcggtgccgtgatgaaacgaaccagcactgcttaccccgcggcacccggcacggtcccccgaaggaatggatttaattaaattctctccttcggggatttttttccattaggtcgtccgttagcgttcgattgctctagtcaatttttaaaaatttttgttgaaatatttgtcgtgctctgaagggcgggggggggggcgaaattgggaaaagttgaattttcgactaattttggcagttcgacttcgggattcgaaattggtcgaatgaatgaaaatttctaaaatattctaaattagaagaatcaggccataaaaagcgaaatttgcgaaattgaaaaatgcgaaatgaaaaaaaaatgcgaaatgcgaatagccaaaatatgcgaaaagcgaaattcgaaatttttttcaaaaattttaccaatagtctaagtcatatattaagaggttgtgatatgaaaaccacaaaatttctgtatttccggtttaatcattttctcagaccacaaaaaatgacaaatctacccattttgggcttaaaatttcaaaaaacaaggtaaaatgagggttcggcggtggcgacatgcgccgccggaaatttttttggaaattgtaataaatatgatagttcagggctcggatcgtaccaagtcattttccaagtacatacggnggaatttttaacatccaagtatacataaaattttgatagaattgatagatggttttttgcttttcaaaacgatttttttgcggccttgtttcaaaaaaa

SEQ ID NO: 44977 - DNA, 710 bp, Heterodera glycines
taaaaattaccagctattggagatgcagtgggcaagcacagcgagtcgcttaaatgcacccccttcaacacgtaaaatattccaaaaaaagagatagtgattttttttggattaggccggagaaataaaaattcccaggttatttgaaatgcagtgggcaagcacacagagtctcttaaatacacgccctttttcacgtaaaatattccaaaaaaaaagagatagtgattttttctggattaggccggagaaataaaaattaccagctatttgaaatgcagtgggcaagcacagcgagtcgcttaaatgcacaccctttgacacgtaaaatattccaaaaaaagagatagtgattttttctggattaggccggagaaataaaaattaccagctatttgaaatgcagtgggcaagcacagcgagtcgcttaaatgcacaccctttgacacgtaaaatattccaaaaaaagagatagtgattttttctggattaggccggagaaataaaaattaccagctatttgaaatgcagtgggcaagcacagcgagtcgcttaaatgcacaccctttgacacgtaaaatattccaaaaaaagagatagtgattttttctggattaggccggacaaataaaaattaccagctatttgaaatgcagtgggcaagcacataaaggagcttaaatgcacaccctttgacacgtaaaatattc

SEQ ID NO: 44978 - DNA, 1431 bp, Heterodera glycines
aattttatttatcaatgaccaacaaatgcgtctcatccctcacccccgggaccgccaaaaatggaattttcacgattttttaaatttatgagtcggactatcagtggtcgtcgtcccattttgcgcaccattcctcacttttggactcgtcactgatccgcactttcttcaacaccatttgggcaccgtccgccacccttttgcacagaaagcatttgccaaacgaaccgctgccaatctgtgaaagcattgtgaattgactgtgcgatgggttgctcatcgaggaacatggccaaacgcattcaaatgcatgtgttgtgaaatatcaaaattatgtgtttgtaaatgtgcaaaaagaaaagtgaatgtaagaaaattgttgaaaatgctatattaaacaagaattgtggatagataacaaagtttcagtttgataatatgttcaaagttcgatatcctcgtgagtttacgtttcagggtcaaataaactaatgcaaaaaagctttgtaattgttttttcctgctatgtacaaccccatcactgctttttaataaatcacaagctcctctcttccctcttaaaaaggcaataaataagcgtttagcacttccgaatggtctttgaactctcgtgcaaagaaaacagtcagcgagtgagaacaaatccacaaatatttccaaaaatagttcaataaaaaatgcatgggattttgcttttcctcaacagatttccagcttttttggaacaaaaagtcattccatggtccaaaattagaattaaatcagagttcccaagttttttttttcaaaataggacaaaatggcctaaaaactaagattctgaccccaaaaataagatttttctaaaactaatatttgcgtgaaggaaacgcaataaaaacatgaaaaattgacttaaaacaatattttattagcgtaaaaacaattaaaattgatcatcaaaagtattttccccatccgccgattttctccaacaatttgtgattggaaatgagcatttggtacatttgtgggcaagaaagatcataattgactttggtttggaccaacgccttgactgttcgttcgacttgcaaaagatttcgtttatcagtccattgcgatccgcacaaagagaataccctcgcaacaaatgcatttgagacaggcacggaaagtacgacgctgaccagcttgagcagattaggcaaatctgcttcaaacagcttcttccacttctgttcgggggttaatttttgaaattcatcatttgggaaagaattcaatatttggtttgcttcgctaacatcgtcaaacaaatcatttgttaactagggcgcaatttgtcgagccagagccaatgcatcgtcgtggggaatttgcggtatgccagcgcaacccattgcaacttttccggaaatcgggcaatgc

SEQ ID NO: 44979 - DNA, 1399 bp, Heterodera glycines
agtttcccccccccccccccccctgggcacccaaaaaagtgttgcctcataaacagcaaatccgatggctaaattctcgacgccggtgttcttcaactcgcgtcgatacttttgcatcaccgcgatgattacggtgcacagtttgtcgtcgtcgttggggtccgagtcggtcaatttcatgcggaactgcggattcagcgcaaaagtgccttaaaagcgatataagagtcaattaacccaaaagaaacgtacgcaaattgttgcggcatccgccggccgttcgccccgcacgccacgagccgtcgtgggcgacggtggcccacgcgttgtgcggagtcgccttgacgccggtcatttcgtaaatctcctccataacttcgggccccaaattgcaaatttccatcttttcaaaattggacaaaaagtcgctgaaggacatccttaaaaggaacccaaaacaaaatgagtgaaatggaaaaattgaccaaccaaaattcgccgtcgtgggcaaatgtgaggccccatgtccgttttgagttcgttggacaactgtcgccactccgacgaattgtccgaccagggcccgttccattcctggtcgttgccccaagggttgcgaattcgcaacaacggcacttcgccccgcggggtcggcacaattcgcatgccggtgattgagtaggcgtggccctgaaaacaaaaagggagaacccggtaaatttctcattctgcgcttttcgcactttgaccaatccgttgggcagtcgcgcctcccaaacttgggggtccgcttcgatggaacagccgaacagagagcccatctcaaagccacgggccatcatctgcagaggggagggattttgcgataaattgggacgacgccaaaaggattattgacttggaaaatgcaattagcgacggaatttcggaattaaactccgtgaggtcgaaattgaaagcaactatttaattctctgccaacaatttgtctccctttgttaaatccttttcccaattgcctcgcctgcatcaaattctccgatggctgctgcaagtcgaagaattcggtcagtccccccgtcatgtcctccaatgcttcgctggtcgtcccgcccttcagcgcttcgtacgagccgtacagcctgaagaggtcgaatgggaattcaaatttaaatgcgatttttgaaatacgaaaacatttctaaaaaaataatgcttttttccaattgtttcgcttactttgcgtatgctttttccaacaaagcgctccaaaattcgtttctaaaaccaaaaaacaatgaaattaaaaatgtttttgaaatgttattccaactgacagttcttgcgagtgcatgtaaagcaactcgccctccattgagcagggcaatcggtcgtcgat

SEQ ID NO: 44980 - DNA, 749 bp, Heterodera glycines
ggggatctctagagtcttgctcactgaaacaaaataacatttttgactgcccctcgtggcccattgttggcttcgcgtattgcaaggatacttccaggaaaattcaattagtccgtaattacggagggatcgagacaaaaagtcgtcgcaaattttttttcttagaaaaaaatcagaaaaaatattaatcttttagttaacctagcctagctaattcaaaattttttttattaagaaaatacaaagaaacgaaaaattttttgtttttcctggaattcagcaaaatttgtataaaaaaagctttaaaagcattttactaaaatttctgaaaagatttctatatttttcttttgcggcgacgtttggagggtagcaattgcggaggacctaaaaaacccgtaaccggtcacggcagggaccaaaaaggtcgtataattccgcaatccgtcgtcaccccaaactctgtcagagccctgctaacgctttccaaatcccatttttgcccatcatgctctgtgctcaccaaagcgcattgaaacgcaatccgaattcgtcagccatctgttgaaaagtctgtacacgttgcgatggtggaatggcgttgtggttgccacaaattggtggcacgccggtggcaattggcggagtcgttttggtggtggtggacgacgaagttggcactgcttttgctgtcggcgccgatttcgccgccgccacccttttcctcgtcgttctctccgtcgtgttgg

SEQ ID NO: 44981 - DNA, 1091 bp, Heterodera glycines
atgttagtttaggcactctgatgcttttctatcaataatggaggtgaataaaatttaatagctttttactttggaaaaagtttaggcttactttttagtgaaagtttgatcactcatattttttagtctatctactcaaaacgggtcagaatcaataaaaataacattcacggtgcgaaaaatggggtttgacaagtttattggggaaaaaaagactttacaaaataatacccctgggagaagggagtgggaaacatgatttcaaaattttcaattttttctagtctaatctactcaaaccggttcagaattcaataaaaataacattcacggtgcgaaaaatggggtttgaaaagtttattttgaaaaaaagactttacaaaataatacccctgggagaagggagtgggaaacatgatttcaaaattttcaattttttctagtctaatctactcaaaacggttcagaattcaataaaaataacattcacggtgcgaaaaatggggtttgaaaagtttattggggaaaaaaagactttacaaaataatacccctgggagaagggagtgggaaacatgatttcaaaattttcaattttttctagtctaatctactcaaaacggttcagaattcaataaaaataacattcacggtgcgaaaaatggggtatgaaaagtttattggggaaaaaaagactttacaaaataatacccctgggagaagggagtgggaaacatgatttcaaaattttcaattttttctagtctaatctactcaaaacggctcagaattcaataaaaataacattcacggtgcgaaaaatggggtttgacaagtttattggggaaaaaagactttacaaaataatacccctgggagaagggagtgggaaacatgatttcaaaattttcaattttttctagtctaatctactcaaaacggttcagaattcaataaaaataacattcacggtgcgaaaaatggggtatgaaaagtttattggggaaaaaaagactttacaaaataatacccctgggagaagggagtgggaagcatgatttcaaaattttcaattttttctagtctaatcta

SEQ ID NO: 44982 - DNA, 1167 bp, Heterodera glycines
  unsure (1)..(1167): unsure at all n locations
ttattttaaaaaaacaaattaaaaattaaactgtgtaactctaacaaataagacaggtagcatgaaaacgcattacaacgtggtttgaggcttctagatgaagtttttcgtgcatgcttaattttactaggcttggttgcttaatgcttatttgttagcatttattatttatttttttatttttgctataattttctttaatttttgctttgtgaatttgttgccgcaattccattgtaatatttgttaattttttttctttggcactttttgaatttatttattttttttgtgtgtatgacattcaaaatattaatcattcaatttttttttacatttttgcttttgggatttaatgaataaattgtcttatcacattttatcagagcattgaaatttaatctcattcagaaaattttcattttagacaatttcataaaaagagcatcgaattaaattataaataaaatattttcataaaaaaaacaattattttccctccaaaaatgcaacaaaatcttcattttctttcattgacctaattgttttaaatgctaaaaattttgcattatttaaataataaaaaattgatttcttaaatattttaccattcaaaattcgtttttaatttttctcgcatcactcgcattgatcagattcataacattttgtcaggaaatatcggtgcaatgatttgcatttccacagaatttttttggtccaaattaatatattttttagtcaattcagcagaaattgtcgttgttgaccaactcaaaaattggtctgccattatatgtttaatgtcagtcaattgcaatggtaaaggccaattcctgcattttttgaaaatatcatttcatattcatagaaaattaataaatataaatatattcaaatttaaaaatggcaaataaatcaatagttttaaataaaccattagaaatattttaataatttatgttaaaaaattattcaataaaatattatttaattanatatatttttatccgattttttcaaataccaaattgaataaattaggaaaaacttttctaacaanaatggcacagaaacattgcccaggaatagcagaaacactttggtcagcattatgcaaatcacttgcgcattaaatggncaatattttcgtcaaaatattttttc

SEQ ID NO: 44983 - DNA, 701 bp, Heterodera glycines
  unsure (1)..(701): unsure at all n locations
taatcagcatctcaaaataccacagaaaaaaatttttcaccccccttttcaacccaaaaaaaatttcaannaattctaggggggcctagctcgaaatttttganaatttccgaacatntagtacaccattcgatagaacttaaaaagctctataattttgccctagggcaatttttggctagaaccaacccccgacgagttatgggcccgggactcaaatgtcccgcttaggccaaaaaatttttctatttcctggaaaaaatcgaaaattttctaaaaacatcactaatcgatagagctcaaaaaacgatgttttggaagtggtcttcgttttccctggaaaaatcgttaaaaaatcataaaattcaaaaacccgaaaaccgttttttaggcctagctcaaaaatttttgaaaattttcgaaattttaaaaactggaaaaatccagctcattgaactctacaataagtctgctggcaccccctcgctcagttcaaacccttacgagctattcgcctggtactgaagtgtccaaaaaaagtgattcttacgttgcctaacctacaggtcaggcctttgatctgatcaaaaattttttgctggcaaagttgtaggccatagttggggcatttcgcttttggggtccgctaagctctgaaagcaaaagcaaaaaatttcgtaacactgagactggcggcaaag

SEQ ID NO: 44984 - DNA, 157 bp, Heterodera glycines
cactttttggccactcttcaattaatgttggccaaattcagcagtttttctccattaaatgggctgttttttcgactctaaaatttaaaagtgcaaaattcgccctttctccgccctttcttttgcacaggaatttcccctctcactttggtcccat

SEQ ID NO: 44985 - DNA, 235 bp, Heterodera glycines
taatacgcgatccagtgctcgccccaacggcagtaatttttctttatttccctgcgcggcaataatttggttgatcagcgagtcgataaccgggctttgcacgccgggggcattataagtggaattgatatattccgatgaccaggaaatctgtaaatcggaactgggccacggcatcgcccgccatacgcgcggcatcatgtcatagtcgcgactgcgcatgcggttagtgatt

SEQ ID NO: 44986 - DNA, 850 bp, Heterodera glycines
  unsure (1)..(850): unsure at all n locations
atcgtattaaatgaaaaatatgccccggcgaaatatttcttaacagtttaactcaaaactcttaaaaaattataaaaatatatcaaaagccttataggggtaaaagaataaaatcttaagctacaaatgttgatgctaattcctcatcacttttctgtcgcgtaaatttgtcaaataattaccgctactgctaatccgctaatgttactaaaaatcgcattaaaaatggatgagcgaaagcaataattaattttatcattttaaccagagatcattgaaaatatatatcatacaaattatttcttctaacatgtttagtcgcgtaattatattctcattggttacatcaattaattaattatctcgtttcaccaaacttgtcgtggatgttgaagagagcatgtctgaaatgattttccattaacataaatgataaattcagattcaattttctaattgattataatttttacaaaacatatgtataataacattaagcaaaagcatagcaaataaatgaaaatgacaagggatagtaaaaagaaaagctgaaagattaccgaaatttttctgttttagtctttgctaaaatctaaaaattttcgaaatgaaaagccgaacaaagctttataattccaaagcgaaaataaaattagaaatggggcacaacaaacagacaaaattgcccaattaagcgaacccaatgaaacataacacaaaaatacacacactttgtgcttcactcgttctcctcattttggacgaggccggcagccgaagaagaaacagaagtgccattgaagacgaaactgtgctgcgcattcgggggattgngtcggaagtcaaaagt

SEQ ID NO: 44987 - DNA, 1214 bp, Heterodera glycines
  unsure (1)..(1214): unsure at all n locations
tttagatttgtttcgtttcgattggttaatgttancntcatttttaattcatattcccatccggtccatctaattaatccncaaattgtgtttgatgttggttctgcgtaagttctataaaagaaacattccgatgatgggagtgcgcatttatgaccccaaattgcgtctccttttttacagaaattgtttcatggaaaattttcataatcttccatttctggaattttttcatccattttaatgtttttacatttactttttgtgcatgagcccattgttggacagcgtctttttgaaataacatttattttatatgaccgtaaccattttaaagtttgttggttacagtgtaatcgtaaaaattgtaaaattaattctaatgaacctattatttttcctttatcatcttttaatgctaatgaaactttttgtccagcgggtaatattgttaattcggttgttccactgactctacatacagaaccatttgattgtctttcacagtcttcggaagttgactgaattgatattacttcggcaccactgtgcactaaatcaggcattgtcaaacataaaaatagtaatattaaaatgcttccaagtctatatagtcttctgttttttcttttttgaattttttctttttctcttttttcaaattcatttaataaacttttctgtatctcatcgttaaattttttgtctaattttgggttcaagacccattttaacgccaaatatggcccataaaaacaaattttaataatccaccatatttttatgataaactttatgataaaacttgctatgcaaataataaaagaaataatacaagttaggccgattcctattagtatgagcgtttcggtcaacatgcattcgggatttgccaatttttctaggcaaaataaacatttaattaatttgcatatttctattggtgggcaaataattttattttctataagattttcctttctttgtccagtaatttacggaacaatagtgttctgtaatcaatatttctttgcttaattcaaataaataataatttctaaaagtcggggatcggcaatgaaccataacaacaaatttcaaatttatttatttttgggggggaatttaattccattcctttttgatccgaattaaattccacaacctttgctttttaatttgaatatgcttttccgttttggttattttccttt

SEQ ID NO: 44988 - DNA, 1101 bp, Heterodera glycines
cagaataactgggggagacttagggttagcgcatcaattatttttttcagaaagtggatcggggtacaaaaatacgggtccaaaagtgggtttaactccgcttggagatgcgttagaaaagaaagaaaaatatgttcggacagcttttgaagagctgcattgaatgctgcagtcgccgctgctgtacgcccacgcgttgctgagttagggtcgagagcggcatgaaaaaagacaaaaacgaggaaaatgaaacaaattcgcggctttgctctcgcgttggagaaagcaatgcgcagaataactggggagacttagggttagcgcatcaattatttttttcagaatgtgatcggggtacaaaaaatacgggtccaaaagtgggtgtaactccgcttggagatgcgttagaaaagaaagaaaaatatgttcagacagcttttgaagagctgcattgaatgctgcagtcgccgctgctgtacgcccacgcgttgctgagttagggtcgagagcggcatgaaaaaagacaaaaaggaggaaaatgaaacaaattcgcggctttgccctcgcgttggagaaagcaatgcgcagaataactggggagacttagggttagcgcatcaattatttttttcagaatgtgatcggggtacaaaaaatacgggtccaaaaatgggtgtaaatccgcttggagatgcgttagaaaagaaagaaaaatatgttcggacagcttttgaagagctgcattgaatgctgcagtcgccgctgctgtacgcccacccgttgctgagttagggtcgagagcggcatgaaaaaagacaaaaaggaggaaaatgaaacaaattcgcggctttgccctcgcgttggagaaagcaatgcgcagaataactggggagacttaggggtagcgcatcaattatttttttcagaatgtgatcggggtacaaaaatacgggtccaaaagtgggtgtaactccgcttggagatgcgttagaaaagaaagaaaaatatgttcagacagcttttgaagagctgcattgaatgctgcagtcgccgctgctgtacgcccaccgttgctgaggtagggtcgagagcggatgaaaa

SEQ ID NO: 44989 - DNA, 697 bp, Heterodera glycines
agactttgtcaaggacgccgcgggcaaattgcacggcggccgtgcctactcggccacccatcgttttccgccccgcacgcgccacagcggcagatcgggtgagtgtacacaaaggggttgaccagacatgaaaaccggggaggggtcgaacaaatgcggggggggggggtgtaaaagagggtcgtcggcgaaaggggaaaaagggcaaaaactgaacaaatttttcaatttcataaaaatacaaaattttcccgtaggtgtctatcggcacagccggaccccagtccccctgttttccaatttttttttgaaaacacggtttgaaataccaaaaattgcgattcacatggcttgggaccccttcaaaaaatttcggttgaaccccccccccccccccttttttttttcttcatgtatggagcttggcacaaaaacgcgtttttatggcccaggaacagaaagagggcacttcatattggactgaatgcggcatccaattttcaattttaaacggaattttgcctattacaccccccccccccccaccaccactttttcaaaacatcattgcccccaatcgaaaataggtgccccctcgttgcccaccgttgtcagggggcatgccattgcgctccaacaacagcagcagcagccgcaccaccaaatggggccgcagcaccgcttcggcaccgccacc

SEQ ID NO: 44990 - DNA, 942 bp, Heterodera glycines
  unsure (1)..(942): unsure at all n locations
ttttgggcctacacctcaaaattttaaaaagtttcacattcaataatttaaacgcaaaaccgaaatggagaggccctttattgctactttaatttatgctatgtggtgaatggtacgcaattgtcacttaagcgctcccttttttgacatttttcaaaattttgaggtgtaagcccaaaacggaaaaatatcaacgaaactgctgattttcacataatttttcatctttgctaagccaattgaaatccgacgaaaactgcctaaatcattccctctcaataaaatgtctgacaaccgaaacgaagcggaggagaaaatggcgaaagcaatgtaaaattaaaacgccatttttaaaatttcaattttaaattttgttttccttttttttcagcttcatttccgccgattgttggctttgtgtgtacgatctgcttccggcttcacaacttggccttggaattgcgatgatcagccaccgttttgacttctacgtggatgaacacttcaagactcgtcgctggaatctgggatccatgaaaatcaaaatgaagttcgaagcggatggcaccaaggaaatggatgttgtcaatgccaatttggaatcgtttggaattgcgcaaaagccgttgccaaagagagtcgtcggattcaaagccatttcactgaagtgagattttgatggttttttgtttgtaaacacgatttcatcattttcacagatacttcanccaccaatgtgtcactttttccaccgctttcgtccaattctcgccgcccgtctcattcatttgaccatcgacaacacgtacttcgatgaccgcagtttggagtcgatttggcgcaacatttggcccatgatcgcgacaaaaattgtggcgtcaattgtccgaagaaagtttctaccgtttgcgcaaattcgtgccgtcaattctcgccgactgt

SEQ ID NO: 44991 - DNA, 1196 bp, Heterodera glycines
  unsure (1)..(1196): unsure at all n locations
aaaatttttttgacccaggtagctcggcgctcatttcagtgtaagttagtcctttaccggggagtatccctgcaaagtttggtacgcttctgctcaattagcaaaaaatatgagtgatcgaattttcactaaaaaagttaagcctacattttttggcatatttaaaaagcaattaaaaaattttaaaatttaataattttcctgcaccgaaggtactcactcggcctcttcgcggcctcgtggtgggcctcccccccccccccctcccacgcccttcagagcacgacanatatttcaacaaaattttgaaatcatgtttcccactcccttctcccaggggtattattttgtaaagtctttttttccccaataaacttgtcaaaccccatttttcgcaccgtgaatgttatttttattgaattctgaaccgttttgagtagattagactataaaaaattgaaaattttgaaatcatgtttcccactcccttctcccaggggtattattttgtaaagtctttttttcaaaataaacttttcaaaccccttttttcgcaccgtgaatgttatttttattgaattctgaaccggtttgagtagattagactagaaaaaattgaaaattttgaaatcatgtttcccactcccttctcccaggggtattattttgtaaagtctttttttccccaataaacttgtcaaaccccatttttcgcaccgtgaatgttatttttattgaattctgaaccgttttgagtagattagactagaaaaaattgaaaattttgaaatcatgtttcccactcccttctcccaggggtattattttgtaaagtctttttttccccaataaacttttcaaaccccatttttcgcaccgtgaatgttatttttattgaattctgaaccgttttgagtagattagactagaaaaaattgaaaattttgaaatcatgtttcccactcccttctcccaggggtattattttgtaaagtctttttttccccaataaacttttcaaaccccatttttcgcaccgtgaatgttatttttatcgaattctgaaccgttttgagtagattagactagaaaaaattgaaaattttgaaatcatgttacgcactcccttctcccaggggtattattttgtaaactcagaaggccccaataactttcaaaccccatttttcgcaccg

SEQ ID NO: 44992 - DNA, 585 bp, Heterodera glycines
atggcagttcgtacaatgggaaatttgcccgttataccatttgccgaaaaatcaagagaattgttacccctgattttggtaagttatataatcaatcggttcctctcaatgagagaagacgaatggtaccatttttatggcgcggcgacaacctgaacagagttacaggcccggtaccgaagtgtctaaattacatcgggactcaatcaaacaatagattttcatgacatatttatgtatcatttgatttaatttgcatattgagcagagtaaagggaatatattaacaggagataatgcctcgatgttgcacaattcttcggatattgtcctgcacgggcccctcctagcggctcagccatgtgcgaatttgtgaagccaacaaaacgacacttagctggaaaagattgggagtattatgtatggaactcgcggaatttcgaacaagaatttagaaatcttccttttttaaaaaacaccaatttggtttttacgggaagggtcccttttccgaaacgtaccaaagtatacgcactcacaatacccagcagcaaagtcctttcattggcattctgcgcattttgc

SEQ ID NO: 44993 - DNA, 1602 bp, Heterodera glycines
tataacttttttggtaattgtctgatcgcgaagcgatagcttagaaatagtttctaaacatgttaagatttcgaatgataacaacaatgttagatttggatgccaaataaaaaagtaatagcaaaaacatgcaaatttttgaatatctgcacccagatacatataggtaccaataaatgggaacaggtcgactcgccgacgcacgactctccgacggactaattttttattcgtaaatttttttatttttctatcaatttttataaaattaaggttattcggaagctttaagtgtttagaatctatcattaagcaaatgttaagcgattaaaaaattctccaaagagttagaaaataaaactcatgaaattcctgattttttctgttttttttttttgcataataaaaattataactctttggtcccccaaaaaatgggtgctaaagtaaattaagtgcatttgtattggtgttgttgcataaatgcaaattttggggaaaaaagccatttcgactcttttggttttactcgaggtgacggttcggagtcggcgaatacccaaaaatggcgctttaatgagacaagcaaaaagacaacgcattcattcgctcggttggtcggaaatgttccattttcaggaaatcactacatttatcataatgacagaacacaaatccatgttgatcagtccaacaaaaaagaaaacaatttctatgagcatgtcaataattccataattcaaattggtcgatcatttcttaacaaaacgttcattcacttctgttgatgatcactcgggccgggaatttcgtcgagaaggctaaaaaaagaaaaaacaaaaaatttgatttttgcttaatccttcattcactgacctaatcgccgatgtcatcctcaccagaaacactaatgtgaatttgattccactgatcacaaattcgccaataaatcgcttctttttcccattttgtccatttgctcgcgtctcgcgcaattggacaacggacgaacagaaaacgatggctattgttaatccttttcaatgccaattgttctcgagtcaattcattggtcagatcaaagggcacaacggaggaagcaaaaggcaaaggaaaccaaacggaaatgatgaaattgacgggggaacaagccgaggcaaaagcctaaaatatggggaaaattgattaattaattgctggtaagtaccgctttgaacgctgcaattctagacaccaaactcccatcattcatatccaacgcgcatttgaacacctttggcacattgtctggacggggagtgaaaagccattttgccactgcttgtccatccgatgccatggcattgtcatcgcatggaaattcgatgaagaaatcgtcaaaataatagacaatgcgaagtgatggacattggtttagaattgatgggacgaaatgtcgcaaacggcggaaaaatttggcggacaatcccaagccgatgaatgtttttgtcgaggattggccaaatgttgtacagaatgaactccaaaatgcggtcactgttcgagtggatgaccaaattaatagggcaggcggcgaaaagttggcgaaaacggtcgagaaaa

SEQ ID NO: 44994 - DNA, 1033 bp, Heterodera glycines
cccaagaaaatcagggaagcgaaaaaaaccgggaaattgtaacaattcaaaaaatttaaaaatctaaaaaaaaattccaattttaatttatatcaagtgaaaataatccaaaattatttggttttttatttaataattaatgaaaattttcaaacaaattttcttcaattatttcaaacaattaatcatttttggactaaatcatcgaatattaatagaaattcagatttgattttcacctcggatgaccgggaattcccggcccggtcccggtcccggtacccgtgtcactctaataaaaaagcaagagatttatggaaaattgataattttctcaaaaaaaattcaattaaattccaattttttcccagtcgtatccgaccaaaacctttaattttctttagaaaatgattctaaataacaaaataggtcatttttagacaaaatttttagcaagttgcactcaaattttcaaaattttcccggcgccgcctatcggcacggccagccttctctacaccttgttccccaaaagtttattagaaagagcgcgccgagaaaaagcgattgaaacgcaaaaaaatcaccgggtttgcatgactggaatcccttcgcaaagttccaccccccattcagtcccgtcccaaattttgtatgcatcgggattttaattaatttttatataagaaaattaaaaaaaaagttttttgaaaaatggtttaaaaaattttaaaaagacttaaattttttgaacaaatttcaaaaatttaaaaaataacattgattaaaagtgatctatacaaagtatattaataatatcatattcaacaaaattttgtataaattattaatatagtaaaattttaattgtaatttaacaaaatttaggtttatttattaaattttattatgatataatatgacattaatataaacttaggaaagaaatatttaagtataatatattaggtttaaattgcaataattaaaataatataaagttttaattcataattgtatagacatattaata

SEQ ID NO: 44995 - DNA, 1181 bp, Heterodera glycines
aggcctagattcgtgccagggcctcagaaaaaataggcgataataatttacaccattgcgttttgatcgagtgagaagtgttattctttgcaaagtaagtagcacaattcatttaactcaagtagttcgtacgtctagtcttattgtaagcagaaattctcgaatttgtttgtatcgagacacaataatttttattttacaaattatatacaataaattgttaaatagaatcacatagcatttataacaaatcgaaacacaatctttaggggtcgtattggtctttgggactgtgccttttcaaattgtcgcctttccacctgtccctgttgttgtgtgattgttttgttttccgtccgaattccgctgtttttgtgttcgcgaattaactcaatcaaaagttgctgatcggacaatgctttgaacggatggctcatgatcagatttgtgttgaaattaaggtcgttttgtgttttgcgcacaatcaacatgtaagcctggcttttcgcatcggagttttcttgcaaattattcttgaagtctcgaataagatactcaatgttgcgcattgggtccatccaaaggcgtaattcctcacgttcctcttcaactttcataaactccacatggtacttaaaattttgtaagaaaagaacaaaatcaatgttaaaatcatgcaaggaatattgtgacatgtagagcatggtattgcttttgtaaatttccggcctttttggccctgacacccaaacctatcagaaaaaatcgataaaataaaactaccagcgaaaatatgcaatttagtacgattttcataggaatgatatttagtgcccaaaattaacaaaaattcattaaaaacggaaaatacacccctgagaaacgacccgaaaagttttaaaaagcatccctaagaatcacaatttctcaaaaatggatctccaaaattcatttataaattgtttatctcaatactgctttggcttaattttgttactctgaaaaatttgtaattttataccctaaattttaggcttttcagagcctattttctttattgcctattttttgggattttttagagtataaaatatcattacctacttatgagtttttaaaatctgaccaatcttattgatttttcgaaactttgataatttttttttcgatcattttggggg

SEQ ID NO: 44996 - DNA, 1026 bp, Heterodera glycines
acgtggttcaagcgcagcagcagcagcagcaatgtcatcagtttttggcacttgaccacgacaatgacgatcagcttttgaaccaaatttttttggtagcaaaattaaaaaaataaccagcaattgacatgccaattacaggatctcaccacttccgctgaaatgcaacctatcgccttggataacaacaacagcaacaataatatggtagcaagaatttttggtttgtttatttgtctaatattccattttgttttagaatccacaaatttcttcgtcagcatcttcatctcgtcgccgaaacaatgccaatgccggacgtggccgaggaagaggaggaggaaccagacgcagagcggtgagacgattgaatgaatgaagattaaaaaaaatcattttgtgaattattattattatttgtttcattttaaaataaagaatgctcgtcaacagacccaaagcgaacgaattcagtcgtcccaaccccaaacggtccaaatactttctccatcagtggttcaacatggccaaggtttaacacgtgaacaatgcgatagtatacttcccaatctggaagtgaacgaggcaatggtccgaaatgatgagcgatgtgttatttgccaaatcggatttgacttggggtcattgaatgctaccgaactcccatgtaaacatctttatcatttgtcatgcgctagagattggcttatgcaccaaaatcgttgtgccatttgtatgcgccgttttgtgcttgactctgatgcttaaatcaatttgtcttatgcaaaaataataataattacataaaggagtgcacattatttatttaaaaaattcatgtcaaaaatattaataattcaatgacaaatcattatttgatgagacttttttgcaaaatagttttgtgttatatatgaaaaataagatgagagcgaatgggagcgccgtagcatagtggttaacgcttttgattaaatgctttggggttctaatccgcacggcgctcccaatgggtaggaattaaca

SEQ ID NO: 44997 - DNA, 694 bp, Heterodera glycines
  unsure (1)..(694): unsure at all n locations
atgaaaaaaataaatntcattgatttaaaatattttaatcatcacatataaattaattctatctgtatagtgaattgagaatcgagctcaatttagcaatttctttttgatttgttaccttatacaaacatcaaattcttaaaaaatgtcaacaatcggagtagatgaaatattcaaactgtcgcaaaaagaccatcaggttttcttcctctgaatcaaaaaaatccttcaaaattttttagcctcccgaaaaaaggagcaaactcagcgatggatcaacacaaattgtgccgtcggttgcggcagcaaaaaatggaggcgacattttggaagcattagaaaagtcggaagacacttcagaactcaacgaaattgacgaagcgtcggtgaagcggatttgttttcaggttcagtgaaataatgacaaattgacagcgaaagtgattttagttggagagaaaacaggggaaaaatgcggaattgcgcataaaatacgcggaagagcctccgaaatttatggagtcggaaattgaattgaacaacgcaattcaggcaattacaagacaaaattgggctcttatatggtttgtcccccatgaattttttgaaaaaattataattaataaagagtcgggtagaacaccttttcttatgttttagtggtcgctgatcacgaatccggcatccatttcga

SEQ ID NO: 44998 - DNA, 1725 bp, Heterodera glycines
  unsure (1)..(1725): unsure at all n locations
aattatgataattacatacacgttcctttccgcccatgctctcagatttgatttcaatttgaatcgcatccatttgtttgtttttgagaattaaatgttccacttcgagcgtaaattgtttgtacttttcatccggttttgttttaacatgatattgcccatcttggcatgctttgtcaatgcagcgaattgtaattttaaattccgtccttacaaatagaaaaaatacaaaatgctgttaaattgccatagtaccccagcaccttaaggaattgggcctgatttttccgggatccgtaagtggctgaatttttttattgacacattttcaaaattttactcaaaaattccgtttagtgacggttggcgccagcaattggcgataaaatttgaatagaatttgtatcatgactgagatgtagtccactcggtcaagtggactacatacataccaggggtgggacaactctaatctctctccaacttttaccatttttgggactttcgcctctcgcctcttacctctcgttttttgggacaagaggcgagtggtgaaaatgcaccccctaaagattgaacctttgagcagtcagaaaaatattaaaatttacgcgaaaaaacaccataataattctccttctctgcttcctctatgttttaaaatcagagcacaattataatttatttttgcaaaaattgtgactacaaaacaaatttttcttccaaaacccaaatgacaacattggccacacattttaagcacaaacactcagaacaatacaaggaattttcagacaaatcgggggcagcaaatgagcagcaacagactttgggcaaaaacggtcaacagaacagagtacaaaacggcattatttttacttttagagctttttcctcttctgcaggagcatcgacatcgtcgaattttgatttaactgtcgatgaggaaattgaagacgatttatcaacgggcttcagccgaagtaccatattcaagtcgaaagttcttcaccgagaagatgtttcataggccatttgggatggaatgagaaatctgacttcggacacagaaatgaaggacattctctcgccaattgtcgtgatttttggtactctcacctctcgccaaactctcgcctttttggggactctcggctctcgcctaactctcgctctcgtcttttctgagacaagtcacactcctgcaacatacatcccagtcaaaaaatttttattagctccgaacatgagcacccagtcaaaaggaatgctgatgatgtgcttcaggaagggttacttccatcggcgcggcttttcactacctaagactttcgcacctacttcctccttttttgttcggccccttgtatgattggggctgccgtgacagagattgtgaatgagagagagagtaaaatccgctgcgcgaggaggagtcgaacttgaagttcctttttattgtgactgggaatgtaatccatatggctggactagattcccagtcacaacagtatctattttctaagaaacgaggcccaaatcttctacgcccttgaaatgatttcgtttttggtactatttctactcgaataggcccaaatccaaggacgcctatgaaatttttcgttttttgatatctattttctaagcaacaaggtccaattccatggatgccctttgaatnngattagttttgatatcaatttcaaagagtcgtgggcatga

SEQ ID NO: 44999 - DNA, 947 bp, Heterodera glycines
atttccgcagctcttagggtaacgggaaaaaattttgtcgcgaaaaagcggaacggattagcatcggggttacgagatagaaaattgtcctaaaaagagatagccatttttctgagaattaattcacaatttccgcagctcttacggtaatggaaaaattttgaagagtctctcaggaacggattagcatcggggttacgagatagaaaattgtcctaaaaagagatagccatttttctgagaattaattcacaatttccgcaactcttgcggtaatggaaaaaattttgaagaggctctgcggaacggattagcatcggggttacgagatagaaaattgtcctaaaaagagatagccatttttatgagaattaattcacaatttccgcagctcttacggtaattgaaaaattttgaagaggctctccgcagattagcacggggttacgagatagaaaattgtcttaaaaagagatacggattagcatcggggttacgagatagaaaattgtcctaaaaagagataaccatttttctgagaattaattcacaatttccgcagctcttagggtaatggaaaaaattttgaagaggctctccggaacggattagcatcggggttacgagatagaaaattgtcctaaaaagagatagccatttttctgagaattaattcacaatttccgcagctcttagggtaatggaaaaaattttgaagaggctctgcggaacggattagcatcggggttacgagatagaaaattgtcctaaaaagagatagccatttttctgagaattaattcacaatttccgcagctcttgcggtaatggaaaaattttgaagagtctctgtggaacggattagcatcggggttacgagatagaaaattgtcctaaaaagagatagccatttttctgagaattaattcacaatttccgcaactctt

SEQ ID NO: 45000 - DNA, 977 bp, Heterodera glycines
actaattatgtttttgttatatattattcatatttttgtatatttatactcgtattttgggcattctgatttcggtataaaagtataatccatatgccaatgtatgtggcaacggtggtgcccgtgatgagtgtattcaatgcgtaattctgattttaaataaaatttaaaagatcaccaaataattaaattaaattattcaaaacaaataaaaagttggaatgaatctaaatttttttaccttttaaaggctttcaaatttatggtttattgatattcaatgggaaagtgaatttttaatggcaaaaagccaattcttttttattaccaataccaataaataaaataattttttaataacgcaaacaaaaaatgtgacgtaatagccataaatttttttgtttgtgtaactgatatttgacgctttcatttttaaatgccttctgaaaactaattaaaagtgcaacagttctttccgaatgattcgttttgattgcctaattaagaaaaggctaagaagaaaccaatgaaacatcaaattcaaaaatgcacattcataaatgtagtcaattagtgtgtacttctttcaaacatatcaatcagagagataaatccttcttataaatgaaatgtcattgaaaaaattctaaagaaaatgtttcgaatttctttgtcacatttgtacatctaataacattatatttttcaatgaatcactaatctttcttaggaattaatttgattaataattatgtcatcaaatgtaactgatcaacaggtaacaaaaataataataataataaagatgtgccaaaactaataatctttttcattcattgtttgtttagtcaacagatgaggctggttttgtgtccatcgaagttgcaattagtgggataattacactgatttgctttttcggaattgcgctaaatgcgtcacttgtctacgtgaccgtcaaatcaaagtgcgttttt

SEQ ID NO: 45001 - DNA, 920 bp, Heterodera glycines
  unsure (1)..(920): unsure at all n locations
ctccgcgcccctctgcccacgctgggaacatttgtatggtataaatttctcgcaaaaaagagagccatttttctggcatagagaataaatttaaaaattccctgtagaatagaatggccattgctctccgcgcccctctgcccatgctgggaacatttgtatggtacaaaatttctcgcaaaaaagagatagccatttttctggcatagagaataaatttaaaaattccctgtagaatagaatggacattgctctccgcgcccctctgcccatgctgggaaaaatttctcgcaaaaaagagatagccatttttctggcatagagaataaatttaaaaattccctgtagaatagaatggccattgctctccgcgcccctctgcccatgctgggaacatttgtatggtacaaaatttctcgcaaaaaagagatagccatttttctggcatagagaataaatttaaaaattccctgtagaatagaatagccattgctctccgcgcccctctgcccatgctgggaacatttgtatggtacaaaatttctcgcaaaaaagagagccatttttctggcatagagaataaatttaaaaattccctgtagaatagaatggccattgctctccgcgcccctctgcccatgctgggaacatttgtatggtacaaaatttctcgcaaaaaagagatagccatttttctggcatagagaataaatttaaaaattccctgtagaatagaatggccattgctctccgcgcccctctgcccacgctgggaacatttgtatggtacaaaatttctcgcaaaaaagagatagccatttttctggcatagagaataaatttaaaaattccctgtagaatagaatggccattgctctccgcgcccctctgnccatgctggggaaaatttctcgcaaaaa

SEQ ID NO: 45002 - DNA, 964 bp, Heterodera glycines
tcggacaaatgattttctgcacaagaaaaaaaaaatttagggctcaagttcagtttatgcgtcaaatcaatgaccatcctgtcttttagtccacaactttttgcttagttggtcaatgctcgcataccttggtaccaaacgaatgcgtaaggtctcataaatttataaatgcaagaaaagagtaaaaaatgacattttgaaaaaaagatacaatgagaaaacccttaggtaattaacttttttcgagtagcaattgcgaataattcttttgtctgttgttaagcctttaatttattatgcaataaattcatgagtacttaagctttcgtttcaaaacaagcatagaccaagtaagaaaaaaagttgtggactaaaagactgaacatggtcattgattggacgcgtattttctgcaccaaaacaaaaattcatccgtgccgtactgaagcattcgtaagttttgtgcacatcatggccacatgaatcacagttgtacaacacttcaagcgccatgtgtttgcagtctgtatgtaaaatgaggggagagatggatttttgaacatatttaatgcccaaaaattttaccaaaatacgatttgtggaagcaaagcattagtgatacgacactagctgtctgacttgaaagccctgcgaggatcacaacaatcagaagcacttcaggaggaagaaaggaaagaaaggagagtattttcagatttgtggataaaagcagaatcatggacataaacgtgagcataaacaacgtgacgaacggctgggggaggggaaaatttttttctgattttatgaaatagaaacggaggcttacacaaatgatgcaaatggctaacataacccagcaacactttcgtttggcttcgtctgtgtatttgattttcacctgaaataatgtaaagagacaattttaaaaaatctgtttctttaaattttttgaccgactcta

SEQ ID NO: 45003 - DNA, 1078 bp, Heterodera glycines
  unsure (1)..(1078): unsure at all n locations
aatttcccaaaaacttttcccggcggcgcctatcggcaccgccgtgccccaaatagaccattattttttgaaaatttgagcccaaaaatggaaaaattgtgatttttcggcgcaaaaccgctaataatttttgttttttggctccgcgctgaagattctctgaaaataacaccagtacaaaaaaaaatttttggcccgaagagcaaaaaaaaaaaagaaaaaaagctcttcgggtgccctccccgaaatttttttctggatacgggcctgcctttgactgttttttgtgttcctagcttttcgaaacagcaactttcgaaaaatgcatgcgggggagaggagtgaaatgttttgcatccgtggactactaaccaaccaacctcttttttaatgatttgtcttttgtccgactgtttgtcggagctggccgtgctgttcagctgctgcaactgttgctttagctcggcaccaacgacgcgtggtgttgttgggccgccgctgctgagcgcggcagacgcagtagaaaatgaacgtgtcaaccgctttttggccttgaaaattgccgagtctccgctgctcagcgcctcgttgtattcttggacaggacaacgcggcagttcagcctcagacgacgacgaagaagatggattcttgacaagggactttcagttattttgacaaatcaacggattgccaatcaccttgctgaacccacaggcacaggacaccggcacacacgaatcccaatagtcagaatcaaacggaatagtgacctaaaaagtaagggcgattggcattttaaataaaacaacacaaagaggtggggtttgttgacaattctgcgatgccaaacgaatgttttataaaaatgatggccaacatattggatttggaattttgtaatgctttttcgaatatctcgaccccaatttggacaaaagacaatatctngggaagtcgggattaaatgacaagcgctattccccatcccccattcgataccatctacaaacaataaatgtacctcattggacttngtcatgtccgctgtnggcacaaataaatgtgtatttgaccc

SEQ ID NO: 45004 - DNA, 1070 bp, Heterodera glycines
atttagttgcctttgcgatccatgtgccacaaaatcgcttattccatcgcaagatggttgtgccggttcataaccgcatgtctcttatgtggcaattcgctatcttttaaattgcataagtttttgtcataaaaaatgctttggcatacggattgccattgttaaaaatttctgaatttttttaggcaactcttttttaaatctgcgcaaaatttgctctaaatttttcaccaattgaaaatgactgaccaattttttgttgccacacaaattgagccgttggcaatgcattcgaattgtgtcatttccaaatgattggacaatcagcacttgatcaccctcacaaatgtaggacagggcatggccggagtggagcaatactgttgtaacaattaaagcaacgaaaattgtatgcaaaaagacgggccatcgatagatgggatatggtggcgatggagaaacctttcttcccatcgaaatgctaaaaattgaaagcatttcattcgtaagcgcttcatgcctctccccatttggataaatcggttcggattagcatttgggataattggaggagtaggaaagggggggggggggtggtgagtggttgtgaatggaaaagaagtgcaattctcctctctaagcacttgctcgttttaagaagtgcgcatcgcgcaggagccgtatttttaaaaaagggacaaatagggaaagttcgccgttccctggggggctgaagagcattggaagaatgtttgaatagctgcaaccgtttgaaattcactttatataaacaggcacaatgcgcatccgtcggcagtaggaggagcatcgctctcttctttagcacttatttatgcaaaatacattcattgaacttacgtgatttaacgtgatccttattattattatgatttggttgaataaggaattgtcccacaatgagactgatgattagggcatccaaaaatatggaccaaaaatcgcgaaatatggccataaaatatggaccaaaaatcgcgaaatatggccataaaatatggaccaaaaatcgcgaaatatggccataaaat

SEQ ID NO: 45005 - DNA, 1102 bp, Heterodera glycines
  unsure (1)..(1102): unsure at all n locations
cccataatattttaagaaatagccaatcttttagcactatttggtcggnaaccatagcnnannaaagagaggcgcttttttgtgacagaaanaatcccttcgctnngannacccnaacgacccggggcagaacacngaanagcacaaggtttatcattcatcccaatttcgatggactttgttttgccttggccatcctttcctcctcttatctttcctcccaatctgtcccttggcttttcttcccaattcttcctcattagcattaattaattaattcgtttcccttcccaaatgccttttctgtcccttttctcttccgtctccgcttttgcccttctctctctcctttccttttcttcttctgtccatcacttccatcataaccatcactccgattcgtccaaaggacacaacggccatcatcagcagaaggaccatcaaacggcacaaggtattttgctttattcgcttggctttgttttgtgtgccattggtcgctttttcccttcagaaattccttccaattcgttcccttgcgcctgcggcggtcattcgtccggcggggaaaatgcgcgatggatgaacggaatgccggcgaatggagttccggtagcaaaaaggccctaataattgatcatcatcctaatgactattaatgaccaaccccgtgccttttcacagttgtttttgtttccggacaatgtcttgcgattggtcggcgtcgttctccgaagtgaaaatgcttttcatagggacaacaacgaattggcgcggcatcttttccatcttttggcccaccagttcccccgaaaatggtttatcgtcggaatcggcacaatgccatcgaatggtgcgaacgaaccgaaaatgtgggcccgcgaaggaatcgacgcactgaacgggactgtacagttgcaaagcccgcccggttacggtagcttcccctttttggacggacggcgttttcaacgagaaaacggaagcaaaatttggtatttcgtatatgcggtggagccaatgacggacaaagcaaaggacggattgccaaagcaaagcttgacaaagtgtttgtcggaagggtgagtttggcganaaatta

SEQ ID NO: 45006 - DNA, 1275 bp, Heterodera glycines
  unsure (1)..(1275): unsure at all n locations
gcagaagtcaaagtgcatattttcagcgcctagtgcatgaataggagcgttttactgttttctgagagcgcctgaaagcagcttcgnaatggtatagctgatttttttggatctggaattttcgcagagatatatgcaaattagtaaccagtgtttcgtttcaaattatttctcgtattctaacgaaataattttttactatgagtgtntggtttggaaactgtctaaaatgttccgggtcgcncacattgcacaattttcttgaaaataccatgaaaaatgctctaactccaagagacttagttgagcgcactgcaaggagaaccctaacacagttcagcacaaaaaaattaactattcacgcttgagaacgcgaagtttgctgcggagaatggcaattatatgcagaaagtcaagtgcatatatctcagcgcctagtgcatgaataggagcgtttttactgttttctgagagcgcctgaaagcagctttcgaatggtatagctgatttttttggatctggaattttcgcagagatatatgcaaattagtaaccagtgtttcgtttcaaattatttctcgtattctaacgaaataattttttactatgagtgtttggtttggaaactgtctaaaatgttccgggtcgcccacattgcacaattttcttgaaaataccatgaaaaatgctctaactccaagagacttagttgagcgcactgcaaggagaaccctaacacagttcagcacaaaaaaattaactattcacgcttgagaacgcgaagtttgctgcggagaatggcaattatatgcagaaagtcaagtgcatatatctcagcgcctagtgcatgaataggagcgtttttactgttttctgagagcgcctgaaagcagctttcgaatggtatagctgatttttttggatctggaattttcgcagagatatatgcaaattagtaaccagtgtttcgtttcaaattatttctcgtattctaacgaaataattttttactatgagtgtttggtttggaaactgtctaaaatgttccgggtcgcccacattgcacaattttcttgaaaataccatgaaaaatgctctaactccaagagacttagttgagcgcactgcaaggagaacccaaacacagttcagcacaaaaaaattaactattcacgcttgagaacgcgaagtttgctgcggagaatggcaattatatgcagaaagtcaagtgcatatatctcagcgcctagtgcatgaataggagcgtttttactg

SEQ ID NO: 45007 - DNA, 1495 bp, Heterodera glycines
ccccggccgtccaatggtgcgggcgcacgattggcacggtggtggtcaaaacattcgtcgttggggaacacgaactggcagtcgacacacaaacgtgacgtgctcgtcccatccggcagctaaaagaaacaaatttgtgtatgtgcgtccgtgagcaggtggtagcggcgagcgacctgttcactgtgacagggatagttgggcccaaagcgcaggcaaaggcggcacaccacccgacaaccggctgggtgaaagagccggtacgctgcccgctcacagtcaacacagtactgtggcactcggaacagctgctcaattcgaccaacatagttgtagtgaccacgctccagcaccagacacaaattgaactgagctgccctcctattaacataaaactcgagaaaaaaacacaccacatacatacccatcccccttgtacacaacccggtactcgtgctctttttcgaatacgaccagccggatttggcccagtccgtgcatgttgttgagccacagctgaacattctcaacatcttcaagtgtgtacatgtgtttgtgacgcgaaatgccggcccttcgcaacagatggcgcgcctccggtccgtgcatgtgttgttgaagagcgaaacggcaaaacgaggcggcgcccccaccaccgggcacaccgcgacaccgccgatcacgcaagcccaacaggacagcccgtgccagacagagacgatcacgtggattgtgcacacggactaacgactgcaccgagtgggacacgtggtgctccccgtccaaatcacatgcaccttgatcattaattgtatttaaaatgaagtgcatgtgcacaaacccgcgcgatccgcctgtacgggctcccgtggccacaccgcaagcacctttgttagtgttgtgcccgccaaaaagtcaatgccggcggcagactgctcattcagtgctcaatcgctgccgcgagggctgccgcgttgttttgctccgggggccgaagcggcaccacgtacggtcgctcaaaaccgggcgggtgcacttgaagcccaaccagcaacggtggcggatgcccttggagcacacggtccaacaaatgttggattagtgccgtcatgagcaagtccggccgctccgcttcttcaagcggcagaaaacggacttccgcaatttccccgcgcgtgttgcgcggccggtttctcatcatagtggagctctccaccacaaaacattcatcaaccggtcgccgcatctgaattacgcaaaatgttgatcatcatcatcatcatccgtcattgcagtttggttcattccacatcaatttattttacaatgatcacagaatttaattacactacaaaaaaatacatattttacaacacagtcttacaaattgggcaaatgcgactgatcagcagccatttctcatacagtctgggtggaacttgggcagacagtcaagcacagtcaacaattcccctagcaaaaaaggcttccacaa

SEQ ID NO: 45008 - DNA, 1098 bp, Heterodera glycines
tgtgaaataaaatggcgattgtgcacagccctccgtttttacgcaagcgcttttgtgaggtataaaatttctcaaaaaaagagatagccatttttctgggatagagtataaatttaaaaattccctcaaaaataaaaggtaaattgcgcaccgccctccctatcatgctcgagagcatttgtatgtgtataaaatttatcaaaaaaagagatagccatttttctgggataacctctaaatataaaaatcctctgtgaaataaaatggcgattgtgcacagccctccgtctcatacgcaagcgcttttgtgaggtataaaatttctcaaaaaaagagatagccatttttctgggatagagtataaatttaaaaattccctcaaaaataaaaggtctattgcgcaccgccctccctatcatgctcgagagcatttgtatgtgtataaaatttatcaaaaaaagagatagccatttttctgggatagagtataaatttaaaaattccctcaaaaataaaaggtctattgcgcaccgccctccctatcatgctcgagagcatttgtatgtgtataaaatttatcaaaaaaagagatagccatttttctgggataacctctaaatataaaaatcctctgtgaaataaaatggcgattgtgcacagccctccgtctctacgcaagcgcttttgtgaggtataaaatttctcaaaaaaagagatagacatttttctgggatagagtataaatttaaaaattccctcaaaaataaaaggtctattgcgcaccgccctccctatcatgctcgagagcatttgtatgtgtataaaatttatcaaaaaaaagagatagccatttttctgcgataacctctaaatataaaaatcctctgtgaaataaaatggcgattgtgcacagccctccgtctcatacgcaagcgcttttgtgaggtataaatttctcaaaaaaagagatagccatttttctgggatagagtataaatttaaaaattccctcaaaaataaaaaggctattgcggccccgcccctcctaatcatgctccaaaagaatttggatggggtataaaaatttatcaaaaaaaa

SEQ ID NO: 45009 - DNA, 1307 bp, Heterodera glycines
cgcactttttattatttaaatcgaaatttagaatactcatttttggacgtgagtcgaatggtcggtgggcgaatgaaatgaaagagtgtttcgccgacggcaccttcagcatcacaccgaagcctttccaacaagtgtacgcaattttggcacggtaagaaatttaataatttaacaattttgaacttattatttaagtcggaatcgctgggtcatgccagtgtgctactgcatgctgtccaacaaaacgcacactacatacgagcgtatgtttcgtatgctcgttgctgtatggccagacttcaacccgtacagcgtgtcgatggatttcgagacagcggcaatcactgcgctgaatgtagtcttcccattcactgaagtgcgcggatgtctgttccacctcgtccaaaattttcacaaaaaatttctgaatttgggctgaaacagttgaattcatgacaaaaaaaaaaaatcgaattttcgaaaattttagcgctatcaaaatgacccgacattcgcagaaatggcacgatgtgtcacgtcgctcgcgtttctcccaattggagacttgacccctggaatcattgctctggacatggctcttcccgacgaacttactcccgtccttgactggtaaattgacaatctcaaattgtttagtatttattgttctttaattatttattaggttcatcatgaactacacgggtcgtcttaagcatgatgtaagcagaacacgcccgcgatttgacccaaacatttggagtgtttacactcgaacactgcaaggcgatgaccggacgaataaccattcagaagccgcgaacagacgcctgcaatgcgcatttgcctgttcacatccatcgatttggcatttcatttaccttttgcgaaaggatcaaaagttatccgatgatgacttcgcgaagtgttcaactggacaagaaccaccgcaaaaggcaaagaaatatcgcgaagcagaccgccgaattctcacgatggttcaaaattatttaccacttaacaacgtagacaccaacattttcccaattcatcagccttttaatcatcactttattattgcttttttgatcggaatttctcgaaattatgaaatgagaccgtgatttgaaacagataaaatgttattttttcttggatttttaatttcaatgtcttttaaacttttggtatggaaatggcctaaataccttggtatggaaacggcggcatggaaatggcaggtatggaaacggcggtatggaaatggcggtatggaaacggcagtatggaactgaccccaaccc

SEQ ID NO: 45010 - DNA, 1382 bp, Heterodera glycines
aatgggtgcgttatatcggacgctccggcttatacgcaatgagatgttaagctagcaataaatgtgactcttgtcgaactaattaatgcattcccataatttgaaaattaataattttacagatatgatttgttttttatccttttgtaataaaccaaagaaggaactctaatcaggggtcagtttctccaataggaatttcagaatttgataaacagattttcccaaaaagccattgtagatttttgaacaagttttaaaaatataaatttgggtccgatttgccggtagagcacgtcaagacaaattcagattttgagtcggtttatgaaaaatatatcaagaaaggaatatatccaacccctttaatcaaattgtatagtttggacatattggtcagtggtatttgctcctttcagtcaatatataatatgtgattttcactcgtccatgttactgccatcattgggagtttcgctgctgctttcgttctccaccggtgcattttcattcgttggatttgttcctctacccgtgtccacgacatttgatgtacccgccgcgttcctttcttctgaatttccatccgaaaaagacatccatgactaaatataggatgttttcaaacttcgtgactaaattcccaagttgggccaagacttgcctgctcgacaattgcctgaacccttttttcgtattcacgtcgattctcctgataaagctgcgctgctaatgagtttgcaggactgttcgggttgggttcgtccagcagtgattggatggaggtcaaaattgcagccacatcataagttggtgaccattggttcttaaaaaaataaatttaaaaaattccgttaaagacaagattaacctgtaaaatatccagacaaatacttccatcggcgtaaacatttggatggaacattttcgacacaaatttgacggttggtggcttgttagggtattcttcagtaaattcgagtgtcaatttgaaagttccgtcttcaaatggtgtgtcctgaggtccaaaaatgactgcttcccagcgcatgatcgattcctaaaagttggacgggtcttcctcacttcgggggatggcaaaggcaatggcaacctctgtcggtgctccgcaaactccggcagggggatcatcctggaaagagaacaaacttattaaactcaagttgcatatgagctgtttattacaaaaaaaaatcacctgtaacttcttaaaatcgcgcattaaacggcgtctcgacggagttgtcattgcatttgttattaaatgatctcaaatcagcttaataaaaaaattaaaattaatgtaaaaacacaagaggatgcttttgccgttatttttctttttttaagttcactatccg

SEQ ID NO: 45011 - DNA, 1122 bp, Heterodera glycines
attcactttttgtattgtatattggaaaatgccgcaaaacagactaccatttcattatattgtaccatttgagcgagaaaagacacacaaacaaacaatctttgcataatataaatttgcgtttttggtggagaggcataaacaaaggaggaactgattgtgaggaactcttcaagcagtagttataatggtgcagaggaaaatgtgggaaatgttgtgtgacaaacaaacggaaaaataaaatagcattaggaaaaagccggtaagaatcgaataaaaatgtctaatgaagtagggagtgacgtgccgcaaccattgatcaattctcaatccaccaatccgaatcctaacacaattagcacatcatcattattcatcactgcatcatccgggtgatgctctccaactcgtcaacatcggcgaaagggtcggccgactgttggtgctgtgacgccgcgggtgacgacgattgtcgctgcttctgctgcggctcttcacctagcgccgaaaagcgagagattggaaaaagcgcgccgcgaaaaaaggggttttgaaaagcaaaaaaaggtcctcgattcacacgcccggacccctagcaaacttggccgctgacctccttgttatgcaaaaaatttttattttgaggtaatcggaattttcattttttttatcatgcatttgaaaaaacggtaatgtgctttgcccgtcccttttttgaaatcttttttttgtttttaaaaatcatgaaacatgcttccaaggattttagggtcgctgatcacgaaaccggaatctaataaggaaaaattgccgaatacggtatcggctcaaaatcgcacaaaaacacttttataggttttcttaggtgctgagaacgatagaaaagcttaaaattgggcgcggaaaagcatttaaaccggtttttgaaccggtttaaaactcgaaaatttgagtgaaaaagagggctcctgaccttataaaatggtcaaattcggacaaatttggtatcattcgaaagctcttgacgagctaagtctaaaaatcaaagaatcaagtcgaactgacgccatctgagcattgggacaactgagtcccagtgaaaaaggacacttcagtaccaaa

SEQ ID NO: 45012 - DNA, 865 bp, Heterodera glycines
aaaattggaaaaattggctatttctttttctgctcaccagtaataggaatcccacccccattctcagaataattccgccgatattaattgttctggaatttgtttctcgccgcgtttgttgggaaaaaattggaaaaattggctatctctttttctgctcaccagtaataggaattccacccccattctcagaataattccgccgatactaattgttctggaatttgtttctcggcgcgtttgtttgggaaaaatttggaaaattggctatctctttttctgctcaccagtaataggaattccaaccgcattctcagaataattacgccgatactaattgttctggaatttgtttctcggcgcgtttgtttgggaaaaatttggaaaattggctatctctttttctgctcaacagtaataggaattccaaccgcattctcagaataattacgccgatactaattgttctggaatttgtttctcggcgcgtttgtttgggaaaaatttggaaaattggctatctctttttctgctcaacagtaatagggattacaaccgcattctcagaataattacgccgatactaattgttctggaatttgtttctcggcgcgtttgtttgggaaaaatttggaaaattggctatctctttttctgctcaacagtaatagggattacaaccgcattctcagaataattacgccgatactaattgttctggaatttggttctcggcgcgtttgtttgggaaaaatttggaaaattggctatctctttttctgctcaacagtaataggaattccaaccgcattctcagaataattacgccgaaagtaattgttctggaatttgtttctcggcgcgt

SEQ ID NO: 45013 - DNA, 876 bp, Heterodera glycines
  unsure (1)..(876): unsure at all n locations
tttttcgggtttttagggcnatatttgggggatttttacctcctatgttatgcacatatttgacatttttagtgcatacaccttataaccctaatgattacagtagatttaagaggggaaatggacgtacagaaaaattttataaaactcatagaatattttatggtaataaatttttaaaaatacagtattttacattatttcaagaataaaaaaggtcatgagaatcatgagaatgatctgtagtgaaaaattgaaaataaatttattattattgttttttatttacttaatttaatataaatgtgtctaaaacattttaaattatttaaagtttttaatattttaataatttactgggtctaatgaatccccgtggcgtttcctaccatttctggaccatgctgatcgccatcacttttctgtacaatgcgttgtccatttctttgctggtttttactgaattcattgccgcattttattggtaaaaaatatttaattatttgaaatataaataatttattgaattttaaaatggtatttatgctatggattcttctgaactttgtgactgactttctgaacatggcggatattgttatgcagacgaggagaggtattaaatctcggcatttaaaaaacgcacttaaatataaatctttagaatattttgtggatggcattttgattagaaatgccaaattgacgcagaaacgttacatactcaggtaaaaaggcaaatatttgatttgcaagatttcaattttagattcattaataaaatcacagtgactttttttcaacttttaaaatgtttaccaaaaataattttttattttttaattggtatatttttcctatttttcgtcggcattt

SEQ ID NO: 45014 - DNA, 993 bp, Heterodera glycines
aatataaaaatcctctgtgaaataaaatggcgattgtgcacagccctccgtctctacgcaagcgcttttgtgaggtataaaatttctcaaaaaaagagatagacatttttctgggatagagtataaatttaaaaattccctcaaaaataaaaggtctattgcgcaccgccctccctatcatgctcgagagcatttgtatgtgtataaaatttatcaaaaaaagagatagccatttttctgggataacctctaaatataaaaatcctctgtgaaataaaatggcgattgtgcacagccctccgtctcatacgcaagcgcttttgtgaggtataaaatttctcaaaaaaagagatagccatttttctgggatagagtataaatttaaaaattccctgaaaaataaaaggtctattgcgcaccgccctccctatcatgctcgagagcatttgtatgtgtataaaatttatcaaaaaaagagatagccatttttctgggatagagtataaatttaaaaattccctgtgaaataaaaggtctattgcgcaccgccctccctatcatactcaagagcttttgtatggtataaaatttctcaaaaaaagagatagccatttttctgggataacctataaatataaaaatcccctgtaaaataaaatggctattgtgcacagccctccctatctacgcaagcgcttttgtgtgtgtataaaatttatcaaaaaaagagatagacatttttctgggatagagtataaatttaaaaattccctcaaaaataaaaggtctattgcgcaccgccctccctatcatgctcgagagcatttgtatgtgtataaaatttatcaaaaaaagagatagccatttttctgggataacctctaaatataaaaatcctctgtgaaataaaatggcgattgtgcacagccctccgtctcatacgcaagcgcttttgtgaggtataaaaattctcaaaaaagagatagccatttt

SEQ ID NO: 45015 - DNA, 1205 bp, Heterodera glycines
ttccttctacaatcgcctttatacatcccattatgaccgttaaaattatcagagtgccgaaaatcgcatgtgatctaagcctagaaaaaatggtgtaagtaaaaatcgtaactacgctcaaaaagcttctcaaccaattttagcgcatccaattccttctacaatcgcctttatacatcccattatgagcgctaaaattatcagagtgccgaaaatcgcatgtgatctaagcctagcaaaaaatggtgtaagtaaaaatcgtaattacgctcaaaaagcttctcaaacaattttagcgcttccaattccttctacaatcgcctttatacatcccattatgagcgctaaaattatcagagtgccgaaaatcgcatgtgatctaagcctagaaaaaaatggtcaagtaaaaatcgtaattacgctcaaaaagcttctcaaacaattttaacgcttccaattccttctacaatcgcctttatacatcccattatgagcgctaaaattatcagagtgccgaaaatcgcatgtgatctaagcctagaaaaaaatggtcttacaagggaacattccgagctgcgagtgggaaaatgcatataagctatataccattggatatagtggtctccacttgcattgccaatttttaattgtagaggagtattccctctgctatcgtaagctacccggcctcgacccccgaccatttgcgcttcaagactcatcttcgacttgtctttgctatactctttgtaggctcaatttcaccgacggatcggaaagcgactgttggggcgagtgattgtcgactttgatggtggaggatcccattcgattggacggcggcgcattggcaaaggcatttgtgcttttcaaagctgaaattggcaattaaatcattgggtccacaaacagtcgctctattcacccttttaatattgccattactttccccctgtttttctttttccctaattcgtccgtctcctctcacttttctctcctctccactctctccctttcctttctctcccccttcctctcctttccattttgtcctctctcaccactttttgcttcctcttctcacttctctcaccctctctcccttcctctcctttccctgctcttttctcccctcttcctccctcctcttttcccacccaattatcttttttcacccttcccccgtttctcttccctcttcg

SEQ ID NO: 45016 - DNA, 1120 bp, Heterodera glycines
  unsure (1)..(1120): unsure at all n locations
gatggatttcaaaaaaaaattctaaaaatcgaaatgttggcacttggggaattagcggacggacggcggtaaaaaagaaacaaacaaatgagagacaataaaaaataaacccatttattgagcgagaactgctaattgcgagaacatnttccctgggtggcgctaattgggcaagggaattaacaaatgagcatgattaagcattgaatgtttgtttggcaatacagtaaacatacggaatatgtttttctctctgtgtctctcttccttacccaatgccttgagggaatcactttctgttcttactgtatcgcgttctttaccataactttttggctattcccttgcccagtgaatagatcggagaacaaagacagcgatggtcgactgagcaattgcctgaggcgcaaagcttgttcccttatcccaagactgaaaccgaaaatcaaaagccccgaaaaattttcccaaggacgagactctcgaccatcgcttttttcagagagtgttgctgctcgaaaacctggcatttttcacagattgccaaaatttcgaaattgccaggttttagcatttgccaaaatgcgcagaattcccgcgggtgtttcttcccgtcccttttttcttctcatgcgatttgcttctgtttggacactcccacaaacactcgcagttggttcagctcaaacagtgcacattgcagttcgcgtcgcagttgtgcattttccttctccaattccatgttccgcagctgcgtctcctcctccttccggcgtcgctgttcccgactctttcgtgccgagtcattgtttttctttcgtcgttctcgataggccttaaacggcaccagctaattaatgctaattaattgctttgctttgccaagaaagcaccgccccttctttttaccacaccaacagaaattcctgcgcgttatcctttgggacggatcagatcacgacccacccactatctaataacctcgatcactgatcaatttttcgggattggtaaacgattttccctactgcatccgatctttggtgggatttgtttctccttttccttacgtggtccttcttctcctccggcactgggctcggctttttctttatcgaca

SEQ ID NO: 45017 - DNA, 942 bp, Heterodera glycines
tctagaacgttgggtgataaaatgaaaaaaataattaaaaaaaaataatgctggtgtggtaagtgtgaagaactgtgttcctccaggcaaaaaattctaagaaaatttataagcatttgaagggttctcagcagtttccctgcaaaattgtccgtttggggtactcaaacaattatggggagcaaaaatccaacgcagaattaaagtacagactatagggaagctattcccgaaggattcggtctccccataaatctgggcgcatcggttcggggggaccgccccgaaaacaaaaaaatcgattatttcaagtgtccgtttggggtactcaaacaattatggggagcaaaaatccaaggtaaaaataaagtagaggtatatcgaagctattcccgaaggattcggactccttataaatctgggcgcatcggttcagggggactgccccgaaaacccaaaaaaaaattttttggataaaaattatttaaatgaactgactagataatatttaaaataggttatttctcttcatttcagtatccctgcaaagtttggtgcgcttctgatcagtttctgaaaaaaaagttaagcctaaactttttggcctgtttaaaaaggaattaaaaatttttaaaaattttattcatctccctttttgatagaaaaagcatcagagtgcctaaactaacatgtaaataaaatttggtgcgtttcagaaccctttctgaaaaaatatttaagaattaattttgcaaaaaataaataaaaacgaaagactcagattttcgaaaatttttttgagccagctagctcggcgctcatttcagtgtaagttagtcctttaccggggagtatccctgcaaagtttggtacgcttctgctcaattagcaaaaaatattgagtgatcgaatttacactaaaaaagttaagcctacattttt

SEQ ID NO: 45018 - DNA, 717 bp, Heterodera glycines
ttttgtccaactttttctgctgctgctgctttttttgttgttggtcatcgtgttcgccagcagaaaatttgtcaaaactggtctggaattgtaggggttcctttattttttttgtgcctcgggttacaatttttttgtgggggggggggggtctccgatcacgattcgaacaacttttaggggccaatttcaaacgtgccgaattcgaaaatgtttatgtgagttgccaatagtacatataaaaagcattttcccataaatattaggggaggagggggggggggggtggaattgttaaattttcaaaaaaaaaaaaaattttttttcgtcggaagatcataaccattttccatttttctgccccaccaattgttcttctccgtcgtcgacgattgtttttgttggcactttgtcattactgttgttgttgctggtggtggtgaccaacgacggcggtgcattcagcgaaatttgaccctgtaaaaaatgttcagaatgaaagcaaaattgtctgccaaattttggaaaatttggttattaattttttagcaccccatgaaatcattctctcagtaagccaattaaaatttggtaatactgccgatggtccccctccccccccctttttggaaaattttttttttctgttcttaaaagtcgtgaaaacacgtttatggggtttttaggtgcgctggtcacgaatctaactttcatttt

SEQ ID NO: 45019 - DNA, 958 bp, Heterodera glycines
  unsure (1)..(958): unsure at all n locations
tctgatgacattgccggagtcattgtgcttattatgcttttagaggatattacgcggggcttgaagaagcgaaagccaaagagtgctgcggtgacaaagagaaaaacgcggaaaatgagcaacaacagaaacaggtgggaaggcgtaattggggaatcagggtaattagggaataattaattaattgaccggtcgctttgatgcattttgagtggacttcatttagcgaccattcacaaactttttggtccctttaaggccaaattgcctccgtacgatttgctcgcctgtttggtctgctatttgagccgcttcacccaaatgtttgtccagggcaatttggagaccatcggcagtccgtacgccatgatgatgttcgcctggtcggagcaaattgctgtccaagtgaccgccatcgcccaatcgctcgtcggtgccatcactttcggcacttacatcctttacatcagtctcaagtccaaaaaagagtatgcaaagctgcaataatgagtattttacggtccaatttgttcagattgaactgccgattgagttgcattttgtcctttgtcgggctgatcattttccatctgatcactttttcgtggcctttcctcccaacgcccgtcacaacattcaacgaaacacgtaagtcaattggtaattcgtcattttgatcacttttcctaacccattcattcatttcagagtcgcaaatggagccgaggccggtcggatgcaacgcgacaaaattcaggtgaagccgaaaaggcgagcgaagaaggcattccaccaagacattcccccccccctcgctgttcagctggtgccaaaacctctcccaagtgaatgtgtggttgttctactcctcctacgtcgtgtgcatcggctttggcttccccgtgctgaacattgccatgaacactctcttctcccatatncctcggccccgtcgtca

SEQ ID NO: 45020 - DNA, 1214 bp, Heterodera glycines
  unsure (1)..(1214): unsure at all n locations
tacggatgacgactnttctgtgctgncgcagttggtccatccggtgcgaaaaaggnaagtgggntacatttcccacgccaggctagggaaatgacggttcgcaagagctgtttgcgcgggtaacgcaaatgaactcgcagacgtcgtgtggagtccgagccagagttctcttttctggtttagggtgtgcgtgcctggaagtggctcagcctgagatagggatgttgcgcccgtaaagcaccgcggttcctgtggtgtctcgtgcgctccacacggcccttgaaaatgcgagggaagctatttgaatctcctgcctgatcgtaccgatatccgcagcaggtctccaaggtgaacagcctctagtcgatagaataatgtaggtaagggaagtcggcaaattagattcgtaacttcgggaaaagaattggctctaaaggtcgggtcagccgggctgttgcgtgaaacaggcggcttttgcccgtggctgcgtgctgttctttcggggatggtgcgtggactagtggtgagagctgcttgtggagcgcttcagctgcgtgtatgctcgtcagggtatgcacttcggttggcgctgaacgaccagtttagaactggcacgaactcggggaatccgactgtctaattaaaacagaggagacggatggtccttgtggacgttgaccgtgtctgatttctgcccagtgctctgaatgttaagccaaggaaacttgattaagcgcgggtaaacggcgggagtaactatgactctcttaaggtagccaaatgcctcgtcggctaactaccgacgcgcacgaatggatcaacgagattcccactgtccctatctactatctagcgaaaccacagccaagggaacgggcttggcaaatttagcggggaaagaagaccctgttgagcttgactctagtctgactttgtgaagaatcatgagaggtgtagcataagtgggagccgcaaggcgccagtgaaataccactactttcatcgattccttacttaatcggtggggcgggagtgcgcccgaaagggtgtccattttggtgttaagtcgggccacccggtggcccggcgacccgcgccgatgacagtgtcaggcggggagtttgactggggcggtacatctgtcaaagcgtaacgcaggtgtcctaaggcgagatcggagaggacggaaacctctcgtagagcaaaaaggcaaa

SEQ ID NO: 45021 - DNA, 981 bp, Heterodera glycines
  unsure (1)..(981): unsure at all n locations
agtaaaatcgtaattacgctcaaaaagctttcnaacaattttagcgcttccaattccttctacaatcgccttantacatcccattatgagcgctaaaattatcagagtgccgaaaatcgcatgtgatctaagcctagaaaaaaatggtgtaagtaaaatcgtaattacgctcaaaaagcttttcaaacaattttagcgcttccaattccttctacaatcgcctttatacatcccattatgagcgctaaaattatcagagtgccgaaaatcgcatgtgatctaagcctagcaaaaaatggtgtaagtaaaatcgtaattacgctcaaaaagctcctcaaacaattttagcgcttccaattccttctacaatcgcctttatacatcccattatgagcgctaaaattatcagagtgccgaaaatcgcatgtcatctaagcctagcaaaaaatggtgtaagtaaaatcgtaattacgctcaaaaagctcctcaaacaattttagcgcttccaattccttctacaatcgcctttatacatcccattatgagcgctaaaattatcagagtgccgaaaatcgcatgtgatctaagcctagaaaaaaatggtgtaagtaaaatcgtaattacgctcaaaaagctcttcaaacaattttagcgcttccaattccttctacaatcgcctttatacatcccattatgagcgctaaaattatcagagtgccgaaaatcgcatgtgatctaagcctagcaaaaaatggtgtaagtaaaaatcgtaattacgctcaaaaagctcctcaaacaattttagcgcttccaattccttctacaatcgcctttatacatcccattatgagcgctaaaattatcagagtgccgaaaatcgcatgtgatctaagcctagaaaaaaatggtgtaagtaaaatcgtaattacgctcaaaaagctcctaaagcaattttagcgcttccaattccttctacaatcg

SEQ ID NO: 45022 - DNA, 1076 bp, Heterodera glycines
tttttactttggttctttgctgagacattccaaaatttcttttgttccctacagctgagaatttgtttttcccaaaatgccgttgtgtgagcaaagaaaaaatgccgactccgttcacttgcataatgagggcatttagccggtcaattaatcaaaatgcatcagaagaagagagggggcggaaagaaaaggcatggcacacatataaaagctcagcagaagcggtgccaaaatcatttctgcataaaaccaacaacgaacagcccaaattttccaaataaatctaaatttttttaaaatttttgctccaaaatatttgagatggcactaagacggaattaccgtaaatgctctatttgaatgcccccttctggtagaatacccccctccaattttatgactgtttggcgtatttataggtttttcgtgactttttgacgatttgaattaatgaaaaggggaggaggaagaaaaaggccattttatagacaaaattgattcgtttcattcattcaattcactaattgctccttctgctggcatttgaatttttcgcaaatcattgaaaattccttttttcaatttgtggtgcctttttttgccatttggttcttttttggtgttttttttgtcgatttttttttactcattgtcagtacggaaaaagaggtcagctccgttcccatttcccctcctgttttcttatgtattcgcgttcccataaattattttttctaccaactctttttctaaacaattttaaggttagccgacgatttgcggaccgacttttgcggaccgacatttgaccgacattttgcggaccgacgatttgtgactaaaaaattatcaaaaaaaaagaaaaaaaatttaaaatgaattttcaaataatttttcgtaatcaccgaattgaaataatgactaaaggtgataatttactagtgcttcttgctctaacgaataagcgatgtcgatttcgacgtactttttttttctttaatcggaaaatttacccacgaactaaacggggtggaggacgatagagtttattaggcagaattgatttaaaaaatgct

SEQ ID NO: 45023 - DNA, 1117 bp, Heterodera glycines
  unsure (1)..(1117): unsure at all n locations
ttgatcattgtcaattcctttattatgacaattattcatggtgataaattctgttcgtgaggaagatgatgtgagaaaaaatttgtgaattataattataaattttgttaccaatagtccatttaaaattctaaaaaagctaattcttatgaaaagctaaaaattaaaaaaattaaattagtttagtgtgtacacaatattaaagtccgcgcaacgagtatttattagagaaagtgaatgcgaataaaaatttaaagaataaagaaaaacatattttttttcaggtaaatttatattcaagaaaataataaaaccaaaaactaaattaatttttgtcgttattaaaattttcaatttccctattcttaagatgaaaaaaagacataaaatttaaattataataaattttgttttttaataaaatggtaaagtgcaatcagtatattaaaaactctttatatgaaataattatttaaaattctttttttttgaaaaaggaaaaataaattaacatcttgaattagtaaatgttgaaaaaaatgaatagccctcacagaatttcatgttgatttttttcataaaaaatttaattatctaaattgtcttttatttagaaatataatggacaagcaatacataaaatttaaaaaatataattataaactaaaaaagtaaataataccagcgaatataaattaataatggtttagaccgcatctcatttggatttactgcaactcagatcaagggagtcaagccaaaattatttctttttaaactttttaatattaaaaacacgatgatattgtgatatgaagattattcattatcacaccaaaattattgatatagaataataacataaatgctaatctccgttggagtctttttgatcccaccaggcttcaatataaatttaaaaaaatttaaataaataagaggataaatttatgaaaaattcaacaaagtgttttctaacaaaggttaataacgattaatgctgccaatagttaagaaaaattatattgtaaaaaattaccacaaaatagaaatccaaagaaaaaattacaaaattgttttaattgtggtaagaatttaatgataattnttatgacat

SEQ ID NO: 45024 - DNA, 958 bp, Heterodera glycines
  unsure (1)..(958): unsure at all n locations
ttttcattgcctccacgttgtaatgcgcgcgcgtgtccgccacgccgtaaatgttcttcgcgacgcacaaatattcgcccacatgctctgcgcggaactgcgcaattcgtacgcggcacgcgccgtccggcgtattgcgaatgtccaattcgtccgacggcaccagcaaattcttgaatttttttttttgctttttttcaattcatacacattgtagaattatttcagtatttaaaattttattttttaatttattcatttaactttttaaaatttgtgtaatttcctttccaaacagggatggacgaaatttcgtttcgttttcgtttcgtcctacattttcggcactttttgagtttcgttttcgtgtttcgttttcgtctaccaaagttttttcgtttcgttttcggtttcggttttcaaaattttgtttttcgtttcgtgtttcgttttcgtcagagcaaaattggacgaaaaagacgaaaatatttacacccttaagaatgacttttttggtaagaaaaaataagatatttcttgaagtattgtattaaatctgacaggaaattgtatgtaaagtttgaaatgttgataattttttctagagagcgacatttggcgaaaatacggatcaggatcaggactacggactaggcatccatacggactacagacttacggactaaaaacccggaaaacccttactccgtataagtccgtatgcaggaaaaatacggacccgtatacggatcagggttttttgaaaagtttttaatcaataaaaaccatattttttaactannatactaatatatgtagatttcgtctaaattttattacgaacattnaacnnagagtttttggagtccggcggtgccgataggcgccnggcgggaaattttttaaatttgattgcaaattgttaacagatttatcgaacaaatttgcgctttttaac

SEQ ID NO: 45025 - DNA, 637 bp, Heterodera glycines
cagtcgattttatcattcataatcctataatacaatctgtactacctagctgggggatgcgccgaaggcgctgaccccgctagtttattttaattgatcatttttaaaatgccttcaataattcataatttttgtacaaaattttgtgaaaccaaaccgccaaaacacgcccaattcagcgccataaaacccaaaaaagacaatgagaaatgaatgtgattggttaatttgtgatttgtgttggtttaattgggagttgagagagtccgttgcgctaaaacggtacataaattagcactaattacaccgtccaaaaattgccattgcgaacttcataaatgatttttcacattttcaattcccttcccgttcaatgtgtacacacaaatcaatccatgcagaaacaaccaaccaaccaacagttgccccaaaaggagttgtgaatttttaaattttccaattttatgggccaacgattctttctttttttcgttcggttggacggacggaccaaatttaaagtgatcagagcggagggagaagaacaaataataacccgatttagcagtcagcaaatgctctgtgctgatcagcagcagcggagagtgagtgagtgatcaaaagttgcaaaaatcac

SEQ ID NO: 45026 - DNA, 1394 bp, Heterodera glycines
  unsure (1)..(1394): unsure at all n locations
tccttatgcgatcattctcttctttgttcctttcctgtttcccttaaaatttcatttcgcacaatttcccacgctttagctgctttttcagtctgaattcttgtatagaccgaaatatcggacacaagctcatcgggggatgggagtttaagtaaccgatcagttggcaattttggctgtcgtaaattaatgataaaaaatagcgtgcggcagaatttcatcccaattattccctttttcattgaccatttgagaaataatattagccatgattcgcatagccccttcagccattccattagactgctgatgatatggtgttgtagtgacatgctcaaaaccgtatatttttgccaaatcattaaaaattcccgaagtgaactgtcttccctgatcagtcacaacaatctcaggagttgaatgttgatggaccacaatttcaacaaaaatttctgatacagtattcgctttctgatccgggattgctttggccataacccattttgaaaaactatcaatcgccaagaaaatatacaagtttcctctttcagttttctttaaaggacccattaaatcgcaatgaattctttgaaatgggccatttgatggttcgattgggacactcggagccgatttggcctgccctggctgaattttcctcacttggcacttttcacacgcctcaattagcagtttaacgtcgtctttcattccgatccaataaaatcgttctttaatttcgtgccaagttttttcgaatccaaaatggccttctgaatggaaaataatgaaaagtttttgtcgtaatgaatgagggattattaatttaggtctttccatattttctttgccttttataaagtaaatggccccatttattaggctataatcagaaacaactcttttccatttcagaacatcatttggacactttccggtttttaaaatatagaaaattttggccaattcttttacctttgtttgtgcctcaattactgtttttaaggttatttttggattttcattcaaaattccatcattttcagcaattaaattttcattaatattttttgcacttaaaatttttggctgaaggtcaaactcatctgaattttcttcctgttttggttcaggatccttttcatttcccggtatattatatcgagacaaaaaatctgccactttattcttttttccaggccgataaataatttctaattcgaaactttggagagtaacttgatatttctcaagtctcccttttaactccttagctttcatcatgcctgttaaggcactacaatccgttataagttttgtaacccccagacccaactnatatatggcgagaataacgaaaccgcatacactaatgccaatgcttccctttcaat

SEQ ID NO: 45027 - DNA, 821 bp, Heterodera glycines
tcccgtgctgttgccatgtctccagtctggcgacgttcagttcgtcgtctgtcgtcgtcgtggtccgtgtggtgttgtcatccatcaaaaatgcctcccttagcagacttgacgaacgccgtggtttcggtgccgttcccttttgtggcgttggcggtggcgcggatggcatttgccgttgccctcctccttcctttactgtcggttggtctaacggtggcgccagcgatgccaatgccaacgtttctccttctcgtgcggcacgcggttttatcggtggcaaatgatgatggggttggacattgctgattttctgcaagattttgaaaattgagccgatgccacttctggatggacaaattcatttataaaattaccaaacacagtcccgttatttataacttttcttttgtgtgttaaaatttgatttttgtctcccctcggaggagtacgaatccaaagtactcgtagaactattaaaagagcagcaccaatttccctcaatttttgcctcagtggcattgttcattcctcacccgattgttgttgttgtttttgtgttttgcattcgaaattgtcgatggacacgagctgcgcaatcagttgttgtggttgtgttgctgattttgctgctgttgttggcccttcgtcggcgtcacggccaaaagtgacgagcgaaagttgttgaagtggcggtggttgtggtggtggtcagtggtggccgggtgcgtacatcggaacagaaaggacaaaactttgccgaatttgctgcgttcagtccgtcgctttcggcccaatcgtttcagaaagcgtctgcaaaa

SEQ ID NO: 45028 - DNA, 974 bp, Heterodera glycines
aatttttaaatttatcttattatccaagaaaaaatgactatctttttattttgggaaattttatacgttacaaaagcgctcgagcgtgagaggggagggcggtgcgcaatcgccatttaatttctcagagaattttaaatttattttattccaagaaaatgactatttcttattttgagaaattttatacgttacaaaagcgctcgagcgtgagagggagggcggtgcgcaatcgccatttaatttctcagagaatttttaaatttatcttatatccaagaaaaatgactatctcttattttgagaaattttatacgttacaaaagcgctcgagcgtgagagggagggcggtgcgcaatcgccatttaatttctcagagaatttttaaatttatcttatatccaagaaaaatgactatctcttattttgagaaattttatacgttacaaaagcgctcgagcgtgagagggagggcggtgcgcaatcgccatttaatttcacagagaatttttaaatttatcttatatccaagaaaaatgactatctcttcttttgagaaattttatacgttacaaaagcgctcgagcgtgagagggagggcggtgcgcaatcgccatttaatttctcagagaatttttaaatttatcttatatccaagaaaaatgactatctcttattttgagaaattttatacgttacaaatgctctcgagcatgataggaagtgcggcgcgcaatcgccatttaatttcacagagaatttttaaatttatcttatatccaagaaaaatgactatctcttattttgagaaattttatacgttacaaaagcgcatcgagcgtgagagggagggcggtgcgcaatcgccatttaatttctcagagaatttttaaatttatcttatatccgagaatgatgagtatctcttattttgagaaattttatacgttactaatgctctcgagcatgatagg

SEQ ID NO: 45029 - DNA, 988 bp, Heterodera glycines
ttttttgttttcgggcagtccccccgaaccgatgcgcccagatttatggggagaccgaatccttccggaatagcttccctatagcctgtactttaattctgcgttggatttttgctccccataattgtttgagtaccccaaacggacacttgaaaaaatcgatttttttgttttcggggcagtccccccgaaccgatgcgcccagatttatggggagaccgaatccttccggaatagcttccctatagcctgtactttaattctgcgttggatttttgctccccataattgtttgagtaccccaaacggacacttgaaaaaatcgatttttttgttttcggggcagtccccccgaaccgatgcgcccagatttatggggagaccgaatccttcgggaatagcttccctatagcctgtactttaattctgcgttggatttttgctccccataattgtttgagtaccccaaacggacacttgaaaaaatcgatttttttgttttcggggcagtccccccgaaccgatgcgcccagatttatggggagaccgaatccttcgggaatagcttccctatagcctgtactttaattctgcgttggatttttgctccccataaatgtttgagtaccccaaacggacacttgaaaaaatcgatttttttgtttcataaatatttttttcagaaagtgctctaaagcgcaccaaattttatttacaacttaattttagcactctgatgctttagtatcaaaaaggaagatggagaaaaaattttttaaaaaatttttccttatattttggttatatcgttttgcttttggtggggtgcttggaacagtggaatcatgcgcacccgtccgatctggcaagttaagcaacgattgctgactagccaaaaggttcggtgccgtgatgaaacgaaccagcactgcttaccccgcggcacccagcgcggtcccccgaaggaatggatttaattaaattctct

SEQ ID NO: 45030 - DNA, 984 bp, Heterodera glycines
  unsure (1)..(984): unsure at all n locations
gagcagaaaaagagatagccaattttcctaaattttcnccaaacaaacgcgcagagaaacaaatccangaacaattagtatcggcgtaattattctgagaatgcggttggaattcctattactgtgnagcagaaaaagagatagccaattttccaaattnttcccaaacaaacgcgcagagaaacaaattccagaacaattagtatcggcgtaattattctgagaatgcggttggaattcctattactgttgagcagaaaaagagatagccaattttccaaatttttcccaaacaaacgcgccgagaaacaaattccagaacaattagtatcggcgtaattattctgagaatgcagttggaattcctattactgttgagcagaaaaagagatagccaattttccaaatttttcccaaacaaacgcgcagagaaacaaattccagaacaattagtatcggcgtaattattctgagaatgcggttggaattcctattactgttgagcagaaaaagagatagccaattttccaaatttttcccaaacaaacgcgccgagaaacaaattccagaacaattagtatcggcgtaattattctgagaatgcagttggaattcctattactgttgagcagaaaaagagatagccaattttccaaatttttcccaaacaaacgcgcagagaaacaaattccagaacaattagtatcggcgtaattattctgagaatgcggttggaattcctattactgttgagcagaaaaagagatagccaattttccaaatttttcccaaacaaacgcgccgagaaacaaattccagaacaattagtatcggcgtaattattctgagaatgcagttggaattcctattactgttgagcagaaaaagagatagccaattttccaaatttttcccaaacaaacgcgcagagaaacaaattccagaacaattagtatcggcgtaattattctgagaatgcggttg

SEQ ID NO: 45031 - DNA, 1544 bp, Heterodera glycines
tttaaaacaatattttaggtttttttggcggcgccgcccaaaaatgccattttttccatttatacaaaaaaaatttgaaaacgataaataaattaatgacttgtagtgccgacaaccagcagagaaatcttcgtaaattttgaagtattgttaaaaatatatcataatttaccgtatttcctaaaatagaggcccggggtctttattttcaacctatgctttatttcaggaactacggtaatttaattgtaatataattttttgatttcggattctaaacattgctgcttccctcatgggttgggccttgcccagctctattaaattcatttgtccattaataaattttcacaaatttcctaattttccacctcttcctcaaccagccgacccattgcaaaagcgcggaaaacatttcgcagctccgagacattaaaattccgaatcattttgaccagcccattgacattgtattttttggctaataaacagggaagggatttatatgtgctaaaaaacgccaaatatgaatatgtacatatatatgtgccaaaaaactcccaaaatatgtgccaaaaattgaaaaaaactgctcaaaaaataagtgaatttctcaaaaagtctcgttttttatcaatttcgctagcacaatgctaattaaaagcattttaatcctttttgtcgtaaatttttttcgctctcaaaaatttactcatttttcggaattttcctagctaaaaatcaaattttaccttaaaagtgaaaaaaggtcatgaaaagcgccaaaaatacaaaaattgaaattgaacatttttggggacattttgccaagaatttgattgccaaaaaaggaacttttgtaaaaaaaaatcaaatttcccaaaaaatcgccaaaatatgtgccaaaaacaacgaaaccccaaaatatgtttttatatatgctaaaaactgggtctgatgtatggaaaacaagtaaaaatgctatttttgagcttttcatgcgatagcatatgccaaaaaaaaatgtaaaaacatataatcccttccctgctaataaattagtaaaataattttttatttgaatttgattttacccgcataaagcatttccgccacattttctccgttgactgcgcataaattgtccgtgtaaatgaaattcagcatggcctcgaacacatcagaagtgatgtcactgatcacaatcggattggatggatctgaaacaatgaaaagcaaatgggtaaagttatagggaaataaacgaattattataaaaatatgtttttatgatggcacggaggaaatgaaagaaaaacttaaattaaaaataaaataatttatattgttttaaatttttattttaaagaaatagattgtttaaatggccaagagatgcctttttgacaaatttaatttatcatttttgatagaaattctccacaattaaacattttagtggaaaattggttgttttttaaaattcaatgcggcacactatccaagggtaattagttaattcatcagaccattcccattttttt

SEQ ID NO: 45032 - DNA, 1237 bp, Heterodera glycines
taaaaagttgtttcatattgaatattatcacatagatctgttaaatacattttcaattgcacacgtcaagttgaacatgatgttgttatgtcggaaattactgtataattataaatgtttatattaaattttcgaataacatgtttcttgaaatcacacaaatgtcattaaatttgcgattttggatttattataaatagatatacagaattttactatttttaaatattggttttaaatattattaaattagattgtcatatatttaagcttttgttattaaaatttccaatttttataaataatttaatttcacagcatggtagatgaaaggttcaagttctcatttcgtcttttctagttcgcattccacttctccaagatggaggcctaacgtttatctacaccctaacaaatttcgctggtgctattctgcattttttaatatttcaatattcttttaggcagcattccactaagactgttgattttcaaaaaaaattaatcggaaaccactctgtcaaattaacaactagaattaattttaataaacgattgagatacaaaattttatatcccattctcttccgtccatttcacccagctcacgactttacgttgtcacccatctaatccaatccattcttcattcttcacttggtcgtttaaagttaaaagaaaaaatgacggcaatggtgataggaaatcaatttgcttcataaattgatggtataattgaaaaattattgaatggatttgttaaaacggatgaaattaaaattgtaatttaattatatagtaaaattttgtacaaacaaatgataattaaacaaatcaaaaaaacattttctgcccagttaacattttataattttttttctgaagaaggtacatgtttattgcgctttaatttattggtactttgtcttaaaattcatataatttatagaaaggaattaataaattttaacactttaataattaagagaaaattcacattggaaaaaaacatacaattaaaaggttgtgacatcgataaggaaactaacttttatgagcaagaagatctgatcaatccaaaattttaatattaaagttgttaattgactatacgcgtttaaaaatattattataaaaatcaaataattgcgattaaatataaaaatgttgatttttttatacaaaattaaaaaagttaaatttttaaaaacctatgggacaggagaatactccgaat

SEQ ID NO: 45033 - DNA, 1159 bp, Heterodera glycines
  unsure (1)..(1159): unsure at all n locations
atttatgtattgtgccaatatgcctattgcaactgaaattattcaactttcccgacaaattgttgagataattattctagacgatttttttatatctcaaagcttaactattgcctttttgtatgataactggtagatattgggagtaaaaaaaagtttttttgtgactatttacaataaaaatttatgcagcatttctaaaaaggatctaaaaataatttcttgcgtaatattttttacattatgttgttgaagaatttgaggctgcttctgatgcgattgaaaatttttcagcttttcttgaaaagttttttcccagaatttatacagctttcccgacaaattgtttagataattattctagacgatttttttatatctcagtgcttaactattgcctttttgtatgataactggtagatattgggagtgaaaaaaagtttgtttgtgactatttacaataaaaatttatgcagcatttctaaaaaggatgtaaaaataatttcttgcgtaatattttttacattatgttgttgaagaatttgagtctgcttctgatgcaattggaaaatttttcagcttttctcgaaaagttttttcccagaaaacggatgggtcaaataaaaaactaaacatctcacatgaccaatttaaattcacttacattttgggtttactttattatgctggcccataaaaaaatggagtttttccggtgccaaatttttgtgaattttctttcggcccgtcataagcggattgtttgggggcaaatgaaaacaaattttgtgttattcgaatgcgctagccgagctctacattttcaaatgtatcaacaaagggtctatctccactctctggcgagttatgtccagccaaagcagagtgggccataaacacgaattttttaatctttggtatttcctctattttgagcctgctctacatttatgtattgtgccaatatgcctattgcaactgaaatttattcaactttcccacaaattgttgagataattattctagacgatttttttatatctcaaagcttaactattgcctttttgtatgataactggtagatattgggagtaaaaaaaagtttttttgtgacaattgacagataaaanatttatgcagcatttctaaaaaggatcta

SEQ ID NO: 45034 - DNA, 836 bp, Heterodera glycines
  unsure (1)..(836): unsure at all n locations
atatatatatatatatatatatatatatatatatatatatatatatatatatatatatatatatatatanccgctaataaagcattctctcggttaataaagcattcttagttgttattttgcttacataagattattatcacttttttaaaagaattaagtaggggaaattaatttttttaaattttatcactcagtattttttttattataaataaagaagctgtttgattcgttcgcacaattaaagtttgattcttaacttttaattaattttcattcttcaactttatttaaatgtttttttaagtatttgcattttttattgtatcttttaaactgtagtttttactttataatgatattgctttaaattttatatcttttttattttttcacgtctcgttcgagcttaatttcttcactagcgggtgtgtgcatgctggtgtgtgaacagttgattcagggttggggaaagcgctgcgcgctttttgagcttcgctacctaggcctttgattatgttagggtcttggcgtcagccgacatgcacttggtttctttccaaataatggaatcgacacattggcatttcaaatgcaatggaaaccggaagtgccctaactcgcacatcatgagccctcctcccttccattagcccaggtgctggcacttttgtgtgtttttcgtttagattttaagtgcagataggaatgggtagacaccagcatctccaaaaagcaccaaacacactggactatagctcattgattttactgcaatttgagcatatttgtagccgacaatgttcaacactttggctcggccttgtgcgtca

SEQ ID NO: 45035 - DNA, 1279 bp, Heterodera glycines
tttttaaaattttttattcctttttaaacaggccaaaaagtttagctttactttttttttcagaaactgatcagaagcgcaccaaactttgcagggaaactccccggtaaaggactaacttacactgaaatgagcgccgagctagctgggtttaaaatttttcaaaaatcaaagtctttcgtttttatttaattatttattattttttgcaaaattaattcataattattttttcagaaagtgctctgaaacgcaccaaattttatttacaagctattttaggcactctgatgctttttctatcaaaaagggagatgaataaattttaaaaaatttttaattcctctttaaacaggccaaaaagtttaggcttaactttttagtgaaaattaatttactcatttttcgagtagtgatcagaagtgcaccaggttttgcaggagcctaaaaaggtcaaggaaaggcgtctctgcgttgatttagcagtagtacctatgaatttaaatttcctatgaatttttaaaggttcacaatttatttattttttgcaaaattaattcataattattttttcagaaagtgctcttaaacgcaccaaattctatttacatgttaaataaggctctctgatgctttttctatcaaaaaggaagatgaataaaattttttaaaatttttaattcctctttaaacaggccaaaaagtttaggcttaactttttagtgaaaattaatttactcatttttcgagtagtgctcagaagcgcaccaggttttgcagggtaacagctgagaagaatgcttattcatataattatttaactgtcccataatatttctttaaaaattttagacattgcaattttgcgtacttttccaattttttgcaaaattaattcataattattttttcagaaagtgctcttaaacgcaccaaattttatttacaagctaaataaggctctctgatgctttttctatcaaaaaggaagatgattaaaaatttttaaaatttttaattactttttaaacaggccaaaaagtttaggcttaactttttagtgaaaattcaatcactcataattttacgagtagtgatcagaaatgcaccagattttgcagggtaacagctgagaagaatgcttattcatataattatttaactgtcccataatgtttctttaaaaattttagacatagcaatattgcgtccaattttttgaaaaattaattcataaagagattttcagaaatgctatgaaacgcacacaaattctatt

SEQ ID NO: 45036 - DNA, 1305 bp, Heterodera glycines
cccaaaaaccgaaatcagaaaaaaactcacttatcagatcttccaagtccaaaacattagattttaatataataacttattattatagcaagcaaatattttaagcagggatttgaaatgctctaaatatttacaaacgaacatgggcgcaagtaatttttaaaaaatagtaaaattaattatcttgaatacgattaaaatgagaaaattaataattaaaaaatagataattaaaaaatgtgactaaaatattccaattactattaaactaattagcaaaataatgtatttattgtaatatttaaatcagaaaattataaataaatcaatgttttcatgaatatgtaagaaaagtgattaaaaggtaaaaatagtatcaaatttataaaaccacatatatgtaaaaatagatatataaattagttgaaaagcgaaatatgaaaatttgggtatctagattgattctaattatgaagaaaacctgaaaattaccagcacctgtaataaacaattttataaagacaaaatattaaatatttgatttttaaacaaaaacgtttaaacataaatacacaaaaactatcataaaatgtatatgaatatgttaaaatattacttaagtaaaaaaaaacgagcaaaaaaatttcattattttgaaattaaaaataataaaatggccgtttgaataagaaaaataattacataaaatatttgaatttaaaaataattattctgtgcatgatactttaataaatatatttaattctcattttccacaacatcaaaatatgaatcgtgctcaccttgtgaaaaattattaagcaaattttatttataaaaatgttaattaataatttgaaaattgtttatttttgtaggcatttaataatttttgatattttgtcggtatgaatttatttctacaaatattctttttttctaattttattaaatatagattgaagttttgctttattttcgaaaattttttaatcatatttaatcaaaaattgaaaatatttattttagaaattttccttttatttttatgaaataaattaattcataaactcctaatttttacatataatttttattgaatcgttccaagacctccttccctcctggtgttaaaaaaagcgaattaatgataaaatttttaattttaataagaaaaatttaataatttttgaaattattaattatttttgctccagacattattgaggaaattaaggttttattaagtttttaatttttttaaattatattcccaaaaatcaaaattatatatttttttcattt

SEQ ID NO: 45037 - DNA, 1152 bp, Heterodera glycines
  unsure (1)..(1152): unsure at all n locations
gagtaataaaatcggtgttatttgtatccatttttgaagaaattgcggaaatntaatgattttctttttaatcctttaaanatgtaaattacaattttattttatttataaacaacagtttctaagcactaaaaattttttaattaaaattttttttataaaatgaatacttagatgaaaagatatgaaatttttgttgattcaagcagatgcttaaaagtgctaattttttgaacttttcttcttagcttagtaaagtgccaatttttgaacattttgctgcgtaagtcattaatgtgtaaatttacacaatttttcttcgttcggccagcaggtgttaattaaaggcattaattttcttgttcacattgcgaaaaatctttttttcacctgattttttctttacttaattacttaaatctccagcaacaaaaatttcttgcctaagaattttcataaataataaatgccaatctatgtaattaatgggaattagggttttattttctcaaatctcgggacaaaactcgttattggttacaattctcgggtgaagttcttcgtcacggttctcgggaaattttgggtctcgaaaagtgcacgacaaatgacgcagcacttccaattctcctcatttcattttatacataaagataaacaaacaaatgctaaacaaattatggtaattaaattagtcaatggtcgtagtcccgacgacaaaatttttttcttttgcattcgaaaatttattaaaataaaaaagtgctgagaaaattttattaaggtattttttggcggccaaatttgtcatcaatttgcttaaaaagaatccaaatttgatattcttggagtacatattgtatctttctgcagatctaaatgtgctttctccatcaatttttaaatttcaaaaaatttcgtcaaattcaataaaggttatatatcttgacagattttaagatagaaaagcaatttgtgttatcacataaccgaggaccagtcatttgtgaaggggcatttaaaaataattttttaattgaaaaaattaattgttctctggaaaaatcattttaaaaaattttaagaaaaaaatctcgaatagtttgngtatacatttttttttgtactgaacgaactgtcagtgtttaaatg

SEQ ID NO: 45038 - DNA, 1092 bp, Heterodera glycines
tcctaaaaagaaaaacccatttttcggagaattatttcacaatttccgcagcttttagggtaaggaaaaaattttgaagagcttctccggaacggattagcatcggggttacgagatagaaaattgtcctaaaaagagatagccatttttctgagaattaattcacaatttccgcagctcttagggtaatggaaaaaattttgaagaggctctccggaacggattagcatcggggttacgagatagaaaattgtcctaaaaagagatagccatttttctgagaattaattcacaatttccgcagctcttagggtaatggaaaaaattttgaagaggctctccggaacggattagcatcggggttacgagatagaaaattgtcctaaaaagagatagccatttttctgagaattaattcacaatttccgcaactcttgcggtaaggaaaaaattttgaagaggctctccggaacggattagcatcggggtacgagatagaaaattgtcctaaaaagagatagccatttttctgagaattaattcacaatttccgcagctcttagggtaatggaaaaaattttgaagaggctctccggaacggattagcatcggggttacgagatagaaaattgtcctaaaaagagatagccatttttctgagaattattcacaatttccgcagctcttagggtaatggaaaaaattttgaagaggctctccggaacggattagcatcggggttacgagatagaaaattgtcctaaagagagagccatttttctgagaattaattcacaatttccgcagctcttagggtaatggaaaaaattttgaagaggctctgcggaacggattagcatcggggttacgagatagaaaattgtcctaaaaaagagatagccatttttctgagaattaattcacaatttccgcagctcttgcggtaatggaaaaattttgaagagtctctggggaacggaatagcaatcggggttacgagataaaaaattggccctaaaaagagatagccctttttctgaaaaataaatttacaattttcccaattcttgggggaagggaaaaaattttgaa

SEQ ID NO: 45039 - DNA, 1114 bp, Heterodera glycines
gtcgaaaagtcccctcctgaattttataatatttctcttttaatgtcctttgctgtcgaaaagtcctctgtctaaaactctggcgcccgctttagccccctcagccccccccctgcctacgcccttggcgggaggcaccatatcttttgatatattgaccaaatatttatcatttacaatattgttcgagcgtctcgggaaaagtctcgggttttttagtcttggtccgaaggagaaataagtctcgaatttcatgttttggttttgtggactagttgggcgtgactccctattttgagttttttagaacctaaaactaacaaccgtatttcctgaaatacaaccctcccccctaaactagaccccccccccaaaaaaagccccctttttgtgggttgaaaaatagagccccgggggctctatgtaaggagatacggtattttggcagtgtttaacaaactataaataacatccctccctaatcatgacaccagcagcagtcagtaataattcatgttacatctctaaaatgaatttagaactttgagcgttcggcatcaacttcagccagcttcattgtgtcttataatacaatgcgctacggacggaatgatcgattgccttattctgaatttgaatcaacgtgaaagtgtgggaagaaaaatgccaaaagggcatgggcaataacttttccattgaatttaaaggtgtaaacttgcatcctgaatttccttcaggaaccgattgatattgtaaatgacaacgggattttttctatgtaatttaaaatctcggcaattgtagagattatttatcccgaatttttttttttaatattttctgaatttctaaaaaaatttcgggaccagcaatctttacaattgcaaaatctctgatttggatgtggcaactccacatttatttgttttgcgaattaattaattgaaaataatttgttaatgttcgtttcgtttgtcctttataaaacagaaaacttgaacagacagaaatatttaacagaacaaatcttaaaaattcttttcttcctcttaagtcgccgtcatccgaaaatctgtaaaattaattaaataaattagttttaagactttttggg

SEQ ID NO: 45040 - DNA, 1091 bp, Heterodera glycines
cgccattgaacgaacatttcccgaaattttgcatttttcctttgaaaaatgtggggaaaatcaaagaattaataaaaagtaaatatgaaaaatgagttattttttagggtttacgaaaaattttttaaagccctattaattgcccaaaaggctcatttgaagcaaaaattattaatgacaaaatcctttacaaaagttaggtccgtcggttgagaagggaaaaaagttggcgaattttcagtacgaaataataaaaaccattttctcccctaataattaggactttcaatttaagtccaatgactttttttctgctgactcaaaatggccttaaaatgacttaaaaatattttcacttttaaaagcttcaaacatggcacttttacgactatttcatgtctttttttttactttgtgaggcaaaatttgaatttcagcgaagaaataaacggtctgaccggtgaaaaagcaattaaaatccgacagaaatttccgcaattattgagaagaaaaatttaaaaaatgcctaaaaatgttttgaatatcaaagaagaaaaaaagccaaacttttgacttttaagaaaatctaattttatgtttgccttgaatttcgaaaaataacttacgaactctaattgtaccgaattcttaaaaaaatctttcatacaaaaaatggaaaccttaatgttaataaaaaaaggattgttcctaataattagcttgaggtaaagcttaaaaatatgggtatatattctagctcttttaaattaatgaattcctagctaaaataaaagatttattttaaaacaatattcaacaaattttgaaaaaagccacgtacctcacggttaaaggctttttttgaaccggtcgacttgggcccggtcaactgtctaagcctgagcctcggtcccggtagtttaaaaattctggtctctaggttttatggatatcagctaatttccatcttttttttttggatttttgtgactttttggcgtttttatgactttttggtgttatttcgtgacttaaattcccagccctaaagataagacattcattgtaatcccaatacccaattattaaaa

SEQ ID NO: 45041 - DNA, 958 bp, Heterodera glycines
tgatattgtatattacagtacttctatgtttttttatctccgagtaatgttactgtattttacactatgtctatgctttatatgtccgcgtctgggttttacaatacgtctaagttatatatgtccgagtgaagttactgtattttacagtaattcttggtttctatgtgagagtcattttgtctatttatcaaattcatgcagatttaaatgctttttaccttctatgtgacatcagttgttctcataaaaatacacctttaattacagtacagtaatgcccaggttactgtaccgaaattacttgacccaatgattttctcctctaattgatcctccccatcttccttcccctatatcaaggtgccatgaatggtcagttgcagcagcgaattcggcacagcggtgttgccggcacaacaaacaatgccgcgctgaccacattgtcgatggcattgtgccgttcacaacagcagccagccgtgccgccgccgccgcccgagtttttcatcgaccaccgtaccaccacgttgttgaacggtggaaacggtagcagcacattgagcagcactacggtagcgattacgtcatccaacggtggttgccatgcgaatggcacagcagtcgtcagcgctgcgcaacaattggcaccatcaaacgtgacaacgccggcacttttgttgaaggcatacgaagcagcggtgtgtgattaatttatatattttaaattaatttccattacgaatcctcaaaattaatttttgaagatggtaattataatattcaaaatttaatttttctcggttttattttaattgcttttaaatttttttttacaataattgattgatagggctggaaaatatatgtataataaaattttttattatgttttttttttgcacaaaaaatcctagaaaaacgtgaataacaattaaatgccattaaaatgacctaa

SEQ ID NO: 45042 - DNA, 1024 bp, Heterodera glycines
taattgtgccgaagatgaacaatgttttggcattttcggctgattatttgccggaattggtggcgcaacggctgaaggagcgattgggcataaaaatgccaaagaataaaaaccagcagaaaacgaagaggattttggccgaaccgatcaaagggacggaggcgaaaggcgcgcggacggcgaaaagagtaaaaaattaaattaaattaaaaaaacaaaataaatgcgatttttaagaaattaaccaaagtgttagccgaagcaagcaaaggttagccaatttaacacttcttttttaatagctcaaataattttaaagggagtcactcaatcgcctcattattcggttcaaacaaaacggacaaaaagtgatcggtggcgattcgaaaactaaccaacgattgttactatcttttggcccctttttattttgtttttttaaatattattctatttttaaacaattgctttttgcatttattgtaattattatttttattaattatataaatttattggtttatttcacataagtccattttgatcattttttagcaaatgtcgaagagaaaaaacgcctctgacaaaagcgaatcggtggcggaggggtcgcccagtcccaaattgggtttctccgcttccaattcgatggcattttgttcggtttactttaagcgtccattttcgtcaacccttctcagaggctgaatgggctgtggaaagtgatccccgatcagctgctcatttactccgtcgatggcactgaaaatcgaccgaaaattgcggcatttgatttgggtaaatggggttttgggaaacaaatgtgtgattgccttgcacagatggcactttgatcagaacaaagtccggcaacactttttgcaaaaactgcgacgattggcattttggtcgggcaaagtgatcggcgcattgcgaaagtgcacttccgagggggtcaaagtgtgcattttcaccaccaaaagggcattttggtgggaatggcatcgaactcgaaaaaaatgaa

SEQ ID NO: 45043 - DNA, 943 bp, Heterodera glycines
agtcacaattttctatctcgtaaccccgatgctaatccgttccggagagcctcttcaaaattttttccttaccctaagagctgcggaaattgtgaattaattctcagaaaaatggctctctttttaggacaattttctatctcgtaaccccgatgctaatccgttccggagagcctcttcaaaattttttccattaccctaagagctgcggaaattgtgaattaattctcagaaaaatggctatctctttttaggacaattttctatctcgtaaccccgatgctaatccgttccggagagcctcttcaaaattttttccttaccctaagagctgcggaaattgtgaattaattctcagaaaaatggctatctctttttaggacaattttctatctcgtaaccccgatgctaatccgttccggagagcctcttcaaaattttttccattaccctaagagctgcggaaattgtgaattaattctcagaaaaatggctatctctttttaggacaattttctatctcgtaaccccgatgctaatccgttccggagagcctcttcaaaattttttccattaccgtaagagctgcggaaattgtgaattaattctcagaaaaatggctatctctttttaggacaattttctatctcgtaaccccgatgctaatccgttccggagagcctcttcaaaattttttccattaccctaagagctgcggaaattgtgaattaattctcagaaaaatggctatctctttttaggacaattttctatctcgtaaccccgatgctaatccgttccggagagcctcttcaaaattttttccattaccgtaagagctgcggaaattgtgaattaattctcagaaaaatggctctctttttaggacattttctatctcgtaccccgatgctatccgttccgagagcctcttcaaattttt

SEQ ID NO: 45044 - DNA, 1235 bp, Heterodera glycines
tgtgacttttcaaaaatgccttaccgtcggttcccttttgtggcaattagcacaatttggccgagttccgaatgatgtcaaacaaataaaaaatcgatagttgtccgttatctgcagggctcggatctgtcctgatttgtcagatttgtcctgatttggaggtagcgacgaaaatttgttctgatttcttaaataaactcataattttgaaattttatggcataatgtcactattttatcgaggaaatataagattatggcaaaatttggtcatttttcgacaaaaatctgttaacaaatcgattaaaaatcgcaaaaaaatttttcccggcggcgcctatcggcaccgccggaccccctgtccatcctccaaaattttttgaaaaaatgcgacgcaaaaaaagcgtttttaaagcaaaaaagtcgtcgcttgacttttaatttaattgcaaaaatgtccttttttggtgaaaatctgttaataaatcaggacgaagttacaaaaattttacggcggcgcctgtcggcaccgccggaccttcccccctcacccatttcccaaaaaatttttggaaaaatgtgccgcaaaaaatagttaaaaatctgattttttgattccgaatgcgctaaaattgatgatttgttaattttctacccaaaattgttaaaatcgataatgggagacgaaaaatataatatttgatacatttttgatcgaaaaattgtaaaaataactgatttgaagcaattttgcaaaatgtcctgattttcgaccccagaatctgattttttgggcttgatgttctgattttgaaaaattttcgatacgcgccctgcattatcccatggattaatttaacaatttggcacttaatttgttctcatttgtcagccgatcttggcgagtcgttcatccgatggaagcagcacatggagcgttgggagcaggagtacatggcggactgggaagcggccatgaaccgatggtcgcgtttccaatcgtaccgcgacagagacatcgccgaaagcatcgatcagcaggggacatgcgttggaggaggaggaggaagctgatcagtgatcggagaatagaaaagcagaggaggacaactaacaatctgtgatcggactgcggcggagtgctgagttttattgcttggtttacgcaatggcacttggtcatattcccatttaaagtcgggtatttttattttcattttttttattttgtgtca

SEQ ID NO: 45045 - DNA, 715 bp, Heterodera glycines
aaaaatttgggtgcaatttgttaacagattttcaacaaaaaatgctcgtttttgggattattaagctcaattggtaggattttcatttaaaaaatgataaaatatgtatcaatttaaaaaaaactatgagtaatcatattttctctataggaaacccacgagtatacaaaaaaaaaaaaaattgaaaataatccaatttctgtagagggattgaaccaggtgaaagaagaagggaaagtcaaggagactagccattaggccatttgcacacttgggcagtgctacttttaaagaatatattaattttttaatttttccctttgactccaattttcttcactaatttttcactcagaccccccattcttaccagtgcttgtttttcccggttcccggttgccctaccgggaccgggacctgagcttttcaaaacccgggaccgggaaccgggacctcggatgaccgggaattcccggcccggcccggtcccggtcccggtcccgtggcactctactacatacgattgtgcatgtctccgcttcggagcggatacacccgcatatgatttgcacaagggaaggggaatcatatgtgaccggcatcatatgtagacagggagataattgaaatgcgcatatgattaaccatagggaaaatcgtacgccgcgcatgagggagtcccacatacgatttttcatatcggagatatgatacc

SEQ ID NO: 45046 - DNA, 1155 bp, Heterodera glycines
  unsure (1)..(1155): unsure at all n locations
tcccggtctcgatccgtgcagactcaaataagtttatgaagtgaaatgtgaaatatgttttcaccacacgggnatttttctgaaacccatcaggaacctaaaaatcttagggtttggtataagcgttttagaaattgcggagaaaaaagcttcgatattgagaaaccaagtcaagtccagaaaagaatattttaaaacgaattcgttttggtttggcattatgataccgaataacattcggaaattatggaaacaaaattggagaaattcgaataattttttgacttcaaatttttcccagttttgattgggttttcaaatagtagtttggttcagaattttcccctctacaaaaaaaatttataatagaattttttattattaattcgaaatcgttaatttatttgacaaatccaagacttaaaattgggagaagcatggggctgtggctgaggacccaaaatggggccccattggggaattaaacatgatttctgaaaaagtccctggaatgtcgattttttctttccatatcttcttgtaaagctcgagctgttctttccaatggtcttatcccggtctcgatccctgccgaactcaaaaagttatgaagtgaaatgtgaaatattgttttcgccacaattgggagaagcatggggctgtggctggggacccaaaatggggccccattggggaattaaatatgatttctgaaaaagtccctgaaatgtcgattttttctttccatagcttcttgtagagctcgagctgctctttccaatggtcttatcccggtctcgatccgtgcagaactcaaaaagttatgaagtgaaatgtgaaatatgttttcaccacacgggattttttctgaaacccatcggaaccaaaaatctagggtttggtataagcgttttagaaattgcggagaaaaaagcttcgatattgagaaaccaagtcaagtccagaaaagaatattttaaaacgaattcgttttggtttggcattatgataccgaataacattcggaaattatggaaacaaaattggagaaattcgaataattttttgactttcaatttttcccagtttgattgggttntcaatagtagtttggtcagaaatttccctctacaaaaaaaattataatagaatttt

SEQ ID NO: 45047 - DNA, 650 bp, Heterodera glycines
attatttatttagtaatcagaacgccaaaactttgcacacccccaaatttattggggattttcccttgtaaaaaatggaagagccgatctcgagttaaaaacttaactttcacaaaataaactgtgattcgatagagggggccaaaatatgggcctaggcaaaatttcaagaaaagttacccacaggaaaaaattttttcccagggcaaagttttttctttttctctcattttgacgcactatttccatgtctctaacatataaaataacacatggttcatttttttgccaataaacaattttttaaacttttgactaattaagaaatattcttcagaattttcccttcaaaatgagcacaaaatggttttctttggtctattgttgaaaaagttataagctaaaaaaaattcataaaatcaagggtaaaataaaatgtttaccttttattgtttgtatttgttcttttggcgttctgtttttattatttttttttatttctttgctttaaaaaaatgaaatttatacacaaacacaaagaggattcgaacttgagaccccctttttggtgactaactcacagaccactaagacgaaaaaaccaacttaattgtacttggagcccaaaattgaatcgccgtgtattgtta

SEQ ID NO: 45048 - DNA, 919 bp, Heterodera glycines
cgatactaattgttctggaatttttttctcagcgcatttcttccgtgaaaattttggaaaaatggctatctctttttctggtctacagtcaagggaattccaaccgcattctcagcataatgacgccgatactaattgttctggaatttttttctcagcgcatttgatcgtgaaaaatttggaaaaatggctatctctttttctggtctacagtcaagggaattccaaccgcattctcagcataatgacgccgatactaattgttctggaatttttttctcagcgcatttgatcgtgaaaattttggaaaaatggctatctctttttctggtctacagtcaagggaattccaaccgcattctcagcataatgacgccgatactaattgttctggaatttttttctcagcgcatttgatcgtgaaaattttggaaaaatggctatctctttttctggtctacagtcaagggaattccaaccgcattctcagcataatgacgccgatactaattgttctggaatttttttctcagcgcatttgatcgtgaaaattttggaaaaatggctatctctttttctggtctacagtcaagggaattccaaccgcattctcagcataatgacgccgatactaattgttctggaatttttttctcagcgcatttgatcgtgaaaattttggaaaaatggctttctctttttctggtctacagtcaagggaattccaaccgcattctcagcataatgacgccgatactaattgttctggaatttttttctcagcgcatttgatcgtgaaaattttggaaaaatggctatctctttttctggtctacagtcaagggaattccaaccgcactctcagcataatgacgccgatactaattgttctggaattattttctcagcgcatttgatc

SEQ ID NO: 45049 - DNA, 1006 bp, Heterodera glycines
tacaaaatttctcgcaaaagagagatacacatttctgtgacatagagaataaatataaatattccctgtagaatagaatgcacattgctctgcgcccctctgcccatgctgggaacatttgtatggtacaaaatttctcacaaaaaagagatagccatttttctggcatagagaataaatttaaaaattccctgtagaatagaatggccattgctctccgcgcccctctgcccatgctgggaacatttgtatggtacaaaatttctcgcaaaaaagagataaccatttttctggcatagagaataaatttaaaaattccctgtagaatagaatggccattgctctccgcgcccctctgcccatgctgggaacatttgtatggtacaaaatttctcgcaaaaaagagataaccatttttctggcatagagaataaatttaaaaattccctgtagaatagaatggccattgctctgcgcccctctgcccatgctgggaacatttgtatggtacaaaatttctcacaaaaaagagatagccatttttctggcatagagaataaatttaaaaattccctgtagaatagaatggccattgctctccgcgcccctctgcccatgctgggaacatttgtatggtacaaaatttctcgcaaaaaagagataaccatttttctggcatagagaataaatttaaaaattccctgtagaatagaatggccattgctctccgcgcccctctgcccatgctgggaacatttgtatggtacaaaatttctcgcaaaaaagagataaccatttttctggcatagagaataaatttaaaaattccctgtagaatagaatggccattgctctgcgcccctctgcccatgctgggaacatttgtatggtacaaaatttctcacaaaaaagagatagccatttttctggcatagagaataaatttaaaaatcccgtgtagaatagaatggtcattgctcctcgcgcccctctgcccatgctggga

SEQ ID NO: 45050 - DNA, 1005 bp, Heterodera glycines
tgtgttggcgttttgttttttacgccaattattttgccttttttttcgttttttaccatccatgcttaaaatccggtcctgtttattataaaagattaattttgattaaaattgcaaaaaaaaagatatgcatttacaaatttgtcatagataaaactaattcaattgtccttataccaaagtgtaccatgaaatttatatgcgcatataattgacatgcctaggtgatgagaaccatttttaatccaatctctttttattgaattcatttttcagttggaaccaccaccatcacaaagtgtatgactggacgttttgagagttgcggatcgatcacaaacggagcagcttacggctacagacctgctcatttcactgtttcacggaggatttgtgcaacggcgtaatcgccatgaagccagccgccgttggctgtgccgttttggtcccattgatcattagtaaggctggaaatctcctagattctaaataatctataatttgttattttacatatttgtgttcaagatttttaattttcttaaaatcaaaaacaatttttgaaaagtatactccaaaaacgcagaaaagtttctttttaaaattagctaaaggaaatggatattttttattcaaaataaaaataaaaaatcatttttctttatttcactttatgtagctgcacttggctttttgttctgattgaaggaagaaggaaggaagaaaagaaggaaagagaaagaaatgtcatagaaaaagcaaaaaaataataatcaaaatgacaatttatgtgattatgaccgcagcaacactcaaaaattaaacttttatttttttaaattcatataagaaaaaaattaaaagaaaaatttaaataaaaagttacgaaatatgtgcgaaaaatatttaaaaaattcaaaataaataaaaaatatttacaattttaatatagaaaaaccggaaatatgtaaaaaaaaataagtaaataaaagtaaacttttttca

SEQ ID NO: 45051 - DNA, 969 bp, Heterodera glycines
catacgcaagcgcttttgtgaggtataaatttctcaaaaaaagagatagccatttttctgggatagagtataaatttaaaaattccctcaaaaaataaaaggtctattgcgcaccgccctccctatcatgctcgagagcatttgtatgtgtataaaatttatcaaaaaaagagatagccatttttctgggataacctctaaatataaaaatcctctgtgaaataaaatggcgattgtgcacagccctccgtctcatacgcaagcgcttttgtgaggtataaaatttctcaaaaaaagagatagccatttttctaggatagagtataaatttaaaaattccctcaaaaataaaaggtctattgcgcaccgccctccctatcatgctcgagagcatttgtatgtgtataaaatttatcaaaaaaagagatagccatttttctgggataacctctaaatataaaaatcctctgtgaaataaaatggcgattgtgcacagccctccgtctcatacgcaagcgcttttgtgaggtataaaatttctcaaaaaaagagatagccatttttctgggataaactataaatataaaaatcccctcaaaaataaaagggcgattgcgcacagccctccctatcatacgcaagagcatttgtgaggtataaaatttctcaaaaaaagagatagccatttttctgggatagagtataaatttaaaaattccctcaaaaataaaaggtctattgcgcaccgccctccctatcatgctcgagagcatttgtatgtgtataaaatttatcaaaaaaagagatagccatttttctgggataacctctaaatataaaaatcctctgtgaaataaaatggcgattgtgcacagccctccgtctcatacgcaagcgcttttgtgaggtataaaatttctcaaaaaaagagatagccatttttctgggatagagtataaatttaaaaat

SEQ ID NO: 45052 - DNA, 1127 bp, Heterodera glycines
  unsure (1)..(1127): unsure at all n locations
atccaacattcagtgtacaaatttgttaaacttctcacattttaaaatcaaagtcctaataaaaaatttcgttgaatttcttcgcctcnttatttgtgcaaaattttcgaaaaagtaattttctatgtaaaattaaaaaattcagaagcaaattcaagaattttttttatttttaaatgcattttttaccacatgaattatgattaaatttttgcgtttcgaattcattttggaattaagaaaaataaaaattgataatcatttgatcatttttagcgcactttaagcaccgccgttaggcagcgcagttccaaaatttattccatgccacagatattatgggcaggacacgccaagtacctcaaacttgggtaattaaaccgaagaaagaagtgcagtggggaagaatgacgcccaaaatgaaggaaatattcaatgctgtgcgaactctttgtgacccctctctgactctgccaatgcagcagtttacaatttttaccactatttttctctcactcatcgtctgctcgtctctcctttattataagctatttttccaaagccaacaacgcccttttctccctcttttctgttagtcatttctcattggtgttgacgatccaacattcagtgtacaaatttgttaaacctctcaacattttaaatcaaaatcctaataaaaatttcgctgaatttcttcgcctcttatttgtgcaaaattttcgaaaaagtaattttctatttaaaattaaaaaattcagaagcaaattcaagaattttttttatttataaatgcattttttaccacatgaattatgtttaaatttttgcgtttcgaattcattttggaattaagaaaaataaaaattgataatcatttgatcatttttagcgcactttaagcaccgccgttaggcagcgcagttccaaaatttattccatgccacagatattatgggcaggacacgccaagtacctcanacttgggtaattaaaccgaagaaagaagtgcagtggggaagaatgacgcccaaaatgaaggaaatattcgatgctgtgcgaactctttgtgacccctctctgactctgccaatgcagcagntgaccatttttacactattttctct

SEQ ID NO: 45053 - DNA, 953 bp, Heterodera glycines
aaatttattctctatgccagaaaaatggctatctctttttgcgagaaattttgtaccatacaaatgttcccagcatgggcagaggggcgcggagagcaatggccattctattctacagggaatttttaaatttattctctatgccagaaaaatggctatctcttttttgcgagaaattttgtaccatacaaatgttcccagcgtgggcagagggggcggagagcaatggccattctattctacagggaatttttaaatttattctctatgccagaaaaatggctatctcttttttgcgagaaattttgtaccatacaaatgttcccagcgtgggcagaggggcgcggagagcaatggccattttattctacagggaatttttaaatttattctctatgccagaaaaatggctactcttttttgcgagaaattttgtaccatacaaatgttcccagcatgggcagaggggcgcggagagcaatggccattctattctacagggaatttttaaatttattctctatgccagaaaaatggctatctcttttttgcgagaaattttgtaccatacaaatgttcccagcgtgggcagaggggcgcggagagcaatggccattctattctacagggaatttttaaatttattctctatgccagaaaaaggcatctcttttttgcgagaaattttgtaccatacaaatgttcccagcatgggcagaggggcgcggagagcaatggctattctattctacagggaatttttaaatttattctctatgccagaaaaatggctatctcttttttgcgagaaattttgtaccatacaaatgttcccagcatgggcagaggggcgcggagagcaatggccattctattctacagggaatttttaaatttattctctatgccagaaaaaggctatctcttttttgcgagaaattttgtaccataca

SEQ ID NO: 45054 - DNA, 1019 bp, Heterodera glycines
atcaaaaaaagagaatagccatttttctagggataacctctaaatataaaaatcctctcgtgaaataaaatggcgattgtgcacagccctccgtctcatacgcaagcgcttttgtgaggtataaaatttctcaaaaaaagagatagacatttttctgggatagagtataaatttaaaaattccctcaaaaataaaaggtctattgcgcaccgccctccctatcatgctcgagagcatttgtatgtgtataaaatttatcaaaaaaagagatagccatttttctgggataacctctaaatataaaaatcctctgtgaaataaaatggcgattgtgcacagccctccgtctcatacgcaagcgcttttgtgaggtataaaatttctcaaaaaaagagatagacatttttctgggatagagtataaatttaaaaattccctcaaaaataaaaggtctattgcgcaccgccctccctatcatgctcgagagcatttgtatgtgtataaaatttatcaaaaaaagagatagccatttttctgggatagagtataaatttaaaaattccctcaaaaataaaaggtctattgcgcaccgccctccctatcatgctcgagagcatttgtatgtgtataaaatttatcaaaaaaagagatagccatttttctgggataacctctaaatataaaaatcctctgtgaaataaaatggcgattgtgcacagccctccgtctcatacgcaagcgcttttgtgaggtataaaatttctcaaaaaaagagatagacatttttctgggatagagtataaatttaaaaattccctcaaaaataaaaggtctattgcgcaccgccctccctatcatgctcgagagcatttgtatgtgtataaaatttatcaaaaaaagagatagccatttttctgggataacctctaaatataaaaatcctctgatgaataaaaatggcgattgtgcacagccctccgtctcatacgcaagcgcttttgtgaggtataaaatttctc

SEQ ID NO: 45055 - DNA, 624 bp, Heterodera glycines
atttaatgtctacttctagatttttatgtctaaaatttccatccctactaatagcatattagtttaatgatattaaaacataaggttctatccgtttttgcgtggcaagaaagccgacggcatacaatctaacaaaaagattggatggaacaatttgtactgatgggatcaataaaacccaatttgtttttcccaattcgatcaaatttgaaatgggcgatgaatttacagttaatgctgcgaatttggacactaatgagggtctgaaaaaggctatgttattataatattttaattaaaaaatacatgagtgaatttaaataaaaaaccccttttaatttttttacagctggagttttgacattgacttcttatgacgagtctgcactgattcgacacaacgacaaagcaattacttatgaattaacagaaattgaatatccataatatattctcattctttaaaataattcatgttaaaatgatttatcacagcagagttttcatcaaaaaaataatttaattatttttaaaaaactctgttaaatttttttatttgtgttttttaacacttgattccattatggaattttttttttgtatggaataaaccatttataataa

SEQ ID NO: 45056 - DNA, 855 bp, Heterodera glycines
tttactaatttttttttcacccatgacccacggattggcacagtgttgcgcgcacatgaaaaagcgggtgccattgttgcggcaattagtgccctcccattgcattggtggcacaccaaattggcatgggcggcgtgctcacttcataccccgttcaggtacaattaataattcgactttttcctttcattttttgccccaataaatttgagaaaaaaaatttttttaaatggtgcgcccatctgaggcctaacattataattctgaaatttcagtaaaagttccattttctttttgcataagaaaatcactgacgcttgctgctacgcgtactccgaccagcacaaaatgcgcgtgcacaaaactgtggtgaccagccatggatgggcctggtgaggcaaaaataaaacaatttaaattaaaataatgaattttcaaaataattttgataccaattttttagatagtttttggctgaaaattaggtaatacttccgatggttgccccccttttttaagaaattttttttgttttcaaaagttgttgaaaacaggttccaggtgttcggggtcactgatcacgaatccggcatccctttcgaccaattccgaatcccggacccaaattcgaacaaaaagtttaagctcaaattttcgaattttgcaattttgtttcaaattttgttcaaatacacagaaacattcccaaaacataaatattgcaataaaagagcatttaagtcatgtttgaaccaaaaatgcgaaattggaaagtattaatttttcgactttttgttcgaatttgggtacttgggagagtttgggtccaccatttttggttaaaattttttcaac

SEQ ID NO: 45057 - DNA, 1141 bp, Heterodera glycines
taacttatttaattatcattcataatcatgaaattcttttaaatgggttaatattatctatcagattaataagggatcatataaataaaatacaaatttttgtccgtctgattcacattaaataaaaacaaattatttgacgttaacaaattcatttattgtttcaattgaattatttgtcttcttaattaaaggaaataaattaaacgactatatcaatttaggtaataaaataaatattagatattaaaaaaataattaaacaaaggtaattcaaattcaaccaaatatttattcagcaatatataatataacatcaatatatatttatagcaacaattctaataaaaactaaatttatatatttcaaacccgataaattactactagttaatacagggattcaaaagaaggagcatgggaaaaataaaataattaaaaaattatggaaatgtaaaagtattagaaaaataaaaaaataatatcatattgaatttaacgatgtttaaagttacccaaattaacgaccaaaataataattttcttttgaacacgaaagatattgtaattaaattaaagaattaaaaagaaacaaaattaaaataaattcaataaataaggacaataagacaacatatagaaaaaatgattaaattaataaattaattaaaactcttcatatgatgcgataaatgataatgataaaagggctctttaatcaactcatattcagtaattttcaaaatataaatcatctcagaaaagtaagtaatttaaaaatatatatataattttatgtaatttaatttaagaaaaagtagtttttcctttatcatttttcgtcatcatgttatcttttttcaattagattcatataaattttcgaccttcgtggcagctttttttaataggttttacactggtctaagtccgatacaagttctctaataaaaccatttgaacattctgggtggattatctattaattttatattaatttcaatttatattcattgtattttattaaaaaaatttaataatattttttataaaaaaagttgtcgaattttgtaaatcaatatattttggacgcagctaattaattgatattttaagattttccagggagtttgttttaata

SEQ ID NO: 45058 - DNA, 1577 bp, Heterodera glycines
  unsure (1)..(1577): unsure at all n locations
agtgcgtttgtgccttttcagtgtgcacatgttacagacgcanctgttcaagcgggtgtcatttggcactcttacctcatcttttcgctcgattacacgtgacgaaaggaggntggtggaaggcaatataacaaataaatatagccaaattgaaaataaacgcataccaattccaaggggttgcccattccgagaagacgaaccaccaagcggtacttaaccgactggcccgcaactgttgtgaagcgcttgcctgtttggccggctttcgtccggacacgccggacaatgatggagtacaaaaaaggtggttacttacaattaggcaaaaaattgctgaatttatctccattatgataccgtttaaagtttgcgtgccatgctaacgccattcatttgccgtcaaatgcaattggctcggattgctttgcccgttaatgttttacaatttggtgatgacgatgaaatagcacagaatgtaaagcagaaacaacagccgaactcatcagccaaagctcccaacggcggtggtgaaagtgcaaaaatatacattatatttttaaaatttatcatattaagggcaaaatggggatgaggacgaagagggaatggcgaatgccaagcccaatgttgaacagtgccgtaatgattttgtgttgaaattactcaacgcaaacaccgaagatccctatctgatttgggacaactccactcgtgctgaactgctcgattttgtggacaaacaaagaaactcacacgagaacgtatttaatttaatttaattcaaatttagtaattcatctttttttatctagagcgaaatgtttggtgccgaattcaaactgagtatttacgcaacagaattggtggttggcgaaatattcgtgcgtatttacaacgctcaaccggaattcagactgctggtatttttttaaaagtatttatttattgccttaattacggtaaaggaaccaaaacggacgtgcatggactttttggactatctatctaaacatgtggaggaacttcttatcggtgaaggcgtcgttcgacctgcggcagtgaagcagaaaccgattaccaccccgaaacccttgaatttacccgcaagaccagcagggtcctcattaaacggaaccaacattgcaacactgtccaggcccaaggtacgtttagtagtaagaattggggaaaggataggaccatcaatttaaaaaattaaatgaggaaatgatcaaaaagcatctagtattttttgtacgggcggcagggcattagcgaaagcgaaaaaacaaatcaatgagaatttggtattgactactatactaacctgtttatttaagccggcgaaaaccgaagaggccgatttaatagatttgacaaccgaatttgtggtggaagaagagcatccggctgtcgattgnggacggtttgccaatgtcaatgcttccaacccggaaataacgacgcattcttccacttttggcaccgttaatccaaacggtgctttccggggggtcgctttctctccagggatcgggtttcggatggtgctcgaggcgttgcgtattgtgctg

SEQ ID NO: 45059 - DNA, 761 bp, Heterodera glycines
gggtgggacaagtgtcattctgtcaagagagccgtttttacgatttaagcatcaaaaattattattccaaatctcaccggcattatgccgggcaaatccacgtattgcaactcgatgttatatttgcgcaaaaagaaggccggcatggacaagcgctcgggcggacggccattgtcactgtccatgtcgatggtcaactcactcactggcctatcggtcagattgccgagctcaaaagtgcgagtgcgacggtagttcaactgtgacagtaaagtatttcaggatatagttttttgcataattaatatacaaaaaggaaatagatttggtacttttcggtttcgtgtatacacctcaaaattttcaaaaatatgcgaacaaaaaatgcactgagttttttggtcgcgcaaatgaataatttgccacaagaatacatgaggtttttgcaattttaagggtaaattattccatttgtgcgatcaaaaaaataaaattttttgagagtccaagatcccgaggcctttttggagtagtaagcttttttagaccttcggttatcccaatgtatgaatcaccataacccaaaacagacgaaacctcgacgcgaacatctttgatcaccgtctcgacctcggaccagtccttgggagtgaagtcgcgcatcgacggacgcccgccgttgcgacgctgcggcagtatttccatgacagtgtccaccaaattctttgactcgaagaacgccgcaactttggctaaaaatg

SEQ ID NO: 45060 - DNA, 973 bp, Heterodera glycines
aatgttcccaataaaataatcgcatcgcttgaattcctccctagtccgtccagagatctcaattagcaaaacaaatgaccttcaattaatgttattttccatcgtaaaaaagggggtcgtcgtggagggaggtgttaacgaagggggaaaattgaaaatttgcataatttccttagcgaaacgcatacaaaattcaaaaattttcgcccgcccgccaccccttcaccaaaagtttttggaaaaaacgcgccgcaaaaaaaaggtactttgaatagcaaaaaaaaaaaagtcgacgccggatggaaaatcggtcccgagacacccccctgtcccaatcgtccggcgtatggcccttgggctgagacaccccttgtacatgtatgataattcctcatacccattacattttagtccattctctcctacagtgtcaaatgccaaacaaaatgaaacaacatgccattggcacggcacgcgcgccgcaactccgtctcgcccccgggggcggaaacgtcggccagccaatgccattctttgccggcggcgtccacaaaggtggagtggtcctgttgaagcacacgctcaatggtctccataacagactctgcaaaaaaagagaaaacaaaatgaaataaattgcaaatatcgtaattaatgatgtttgatcaatggacctgccgatgaactctgatcagtcgattgcccttgcatgggaaatgcttcgacagtgatcggcggatggttgtggccaaggctctggaagatggcccgttgttggcccacccaaatggcacggaaacagcacgagagagaggcgccgtaaaaggcacagcccaacaaaaaatttctgaaaaatatttgaattttttaaacgccttaactgcgtttttggctcccgaacatgcatacagtaaaaaatgcgtcagtgatacagtatttgtaaaatagtacaaaggtcaaaattgtaaaagaa

SEQ ID NO: 45061 - DNA, 1000 bp, Heterodera glycines
tttttaaacaggccaaaaagtttaggcttaactttttcttcactagctgatcagaagcgcaccaaactttgcagggattcttaaaggaagagaaataacctattttaaatattatctagtcagttcatttaaataatttttatccaaaaaatttttttttgggttttcggggcagtccccctgaaccgatgcgcccagatttatggggagaccgaatccttccggaatagcttcactatagcctgtactttaattctgcgttggatttttgctccccataattgtttgagtaccccaaacggacacttgaaaaaatcgatttatttttgttttcggggcagtccccccgaaccgatgcgcccagatttatggggagaccgaatccttccggaatagcttccctatagcctgtactttaattctgcgttggatttttgctccccataattgtttgagtaccccaaacggacacttgaaaaaatcgatttttttgttttcggggcagtccccccgaaccgatgcgcccagatttatggggagaccgaatccttcgggaatagcttccctatagcctgtactttaattctgcgttggatttttgctccccataattgtttgagtaccccaaacggacacttgaaaaaatcgatttttttgttttcggggcagtccccccgagccgatgcgcccagatttatggggagaccgaatccttccggaatagcttccctatagcctgtactttaattctgcgttggatttttgctccccataattgtttgagtaccccaaacggacacttgaaaaaatcgatttttttgttttcggggcagtccccccgaaccgatgcgcccagatttatggggagaccgaatccttcgggaatagcttccctatagcctgtacttttattctgcgttggatttttgctccccataaatgtttgagtaccccaaaacgacacttgaaaaatcgatttttttgtttcataatatttttt

SEQ ID NO: 45062 - DNA, 1580 bp, Heterodera glycines
  unsure (1)..(1580): unsure at all n locations
gggccatcccatttttggggtatttttttggagtcctcccccgggggcttttataccgccgaagcgcttttacctctctcagcaggcgcctcctcagtctccctctttgactcacctccgttccattgctcctttgtccgcccagnccgatgaaaagtctacaaattgcagaaccatccggtgctaccagtagcgcggccgtgcgcggtggacgtgctggtgttgggactgggcaatttgggagggcagatggggaacattgggaaggaactcataaactcccgaaggaagggccccatgggatgatcaagcccagggatcccatcccgcctttgatggacacactgggataagtggctttattccggagagactgaagatacttcgcttgaaatggcgaacattaaatacacgtgaaaaaggaaatgtgatcgatcaattatcgtcgggaaaggggcgacaataagcaaaagggaaattaaatgcgaaatgaaataaatgtgagaatgtgaaattcatagggcttcggccggcaaacaagaaaacccggatctaccttacatgaattagttttgttgacatatcagcagagcagggagcacgacttttacgggacgccaagcaccattatttgctcggtctgtgttgtaccatcctattctgtaacaaactacagaacgggtcttaaccccgagctggtcaagaaaacttgtgacggcattgttgtcagaaatggcacggaaagaaggagtctccgactggttttcaggaagtccggtgatgactacagagcgacgtctttccatctccgcagcgtagtcaatgtctgagacagagttattgacgatggagacggcaattttcagtagattgttgagttgtgaaatgatggcacgggcagctggtgaaatggtctgttcgtcgtcaagtgtgctaatgtccaaattcattgaagtaacttcgtcgacgaactgttgacgtttttgcgggatttgattaggggaattagaaatcaaggggcgtttaagaaaggactgcgacatatttgaaaatctcaaacttgggtaattaaaccgaaaaaaaaaatttggaacgcttcacgaatttgcatgtcatccttgcgcaggggccatgctaatcttctctgtattgttccaattttagtatatgtccatttggaatgaacaaaattgttgctaatagtgggcgcttctgcattgagcagccatgtgcctcagaacaataatctaaaaaaaaaaatttggaacgcttcacgaaagccggcggaggggactgataaattaaaaatttttttttttttttgtcaatcgcgtgtttatttttaaaaagttttgtgctgttataaaaatgcaaacacatggatggggcggggcaggtggtgggtgggtggtcattattgtctaattaacattgcttttcgagctcctcgaaattttcggtctcgaatagcgctactaatttgcccgcatgattgggtgaaactgcaattaatttcgatcccgccaataaaaaaaagtacgctctgatcttaaattttatttgaaattatcaaatgaaaa

SEQ ID NO: 45063 - DNA, 1044 bp, Heterodera glycines
  unsure (1)..(1044): unsure at all n locations
ttggtccgatcagtcattaatcaatcacncgatcaagaaatcaatcagtcctcacacncctgcctgaagagggtttgggtgagaggcggcggacagcggaggatcaatcagttcaagccgaccttctccatgctgactttgaacaccacgtccacgcacgactcgaacacctgagcagaagagggaaggcgcaaatgagaagaaaaaggtgcattttgtgcaaagaaaattcccataaaacttcaattaaacaattaatcaatcactgatcagtcaaataatcaatcactgatcggagtcactcgcaccttcaatcaaaaatacataatcaatcactgacaaatcaatcaatcactgctctttcatttaataatgactcacccaatgatcattcaccattgactcattaagcactcaatcacatcattcaatcactaaccaatcaatcagtgataattttaatcattaatgaacatttttacggtaattaattcactttcgttcataagtgaacggtcgttagactgatcatcgttcagcaataaattctcgctgatcaattggtgtgttaatctccacatcaatcattgactgaaattcaattagtgattctgatcatttaatcatttatgatgattcactcactgattaccatcattggcaataatcactaagcaattatcattaataatcactaattattgatcattaggtcaatcaattaccactgatcaatcacgattacttatcattcactgatctccaatcactgatcactctttgattattgttgttgttgcccctcatgccttgtccacgttgcgcgtgtctgttgcgtttgtgaagtgcgtgtagatgggcctgtgctgctgcaactccgacgaaacgatggcgtggaagcgatcggacacgtaattgcacgaggcggcaaattcatgctttcctaagccatcaaatggttgttcgttggttcgattgatctgtccttttgacccacagaatatcccttgaagcaaacngtcaaaggaaagacggacaatcgct

SEQ ID NO: 45064 - DNA, 993 bp, Heterodera glycines
  unsure (1)..(993): unsure at all n locations
tgcatattttggctttgtgcncaccttgtttctcaagccatccctgcttctccgactgttgaaacaaagcggcagagaactgctcttgcaaattgtcgtccggaaatttgaaggcttcggagcgaatggaattataaatgtccttaaattttagaattaaaacatacagaaaaggagcattaattctgttttttaaacaaatttgcgataatttttatagaatcagccatttattttttaaatttttatttgttcatattaaatgcccagcaacaaaaaatattgccaaccgtaaccagtgccggcggaagattcaatgaattggtaatgtttagaaagttgtccaaactcatgcgctcctttacgctcggattgtgcagcgaagtgtttagcattattatggcgtagcaaagggtgtagcaattgtctgaagaaaaagcaaaaaattatattctgctcgtagtatgatgccaatcttcaaaaataggtttttatgctaacattgcattaaaatagaagttaattgcaatttatcaattttgaaactttttttaccaaccttgatgctcaaatatgcccgggttttggacatggtaatgccccgaaaaatactccatgatgcgttcaatttgctgtgattcgcctggcaagcggaaacgcgacaaaaacccacgcattgcctgcaccaatggcagcgaccgaagtggttggagacgcacaaaatgttgtaggacttccaaattgaaatcgtccttctcgccaaggaaatcgccaattgcggactgaaaaaggaaaatttataaaagatattgggctaaaaatcagacattcaatatatttacttttttgattccatcacaggtcagaaagaaatttgcaatgtcttcagctgaaccgttgaccagcccagctttgaccaagtccctcaatccctgccgttggttctcattaaacttcttcttggccaattctcgggcttttcctttgtacttg

SEQ ID NO: 45065 - DNA, 1030 bp, Heterodera glycines
  unsure (1)..(1030): unsure at all n locations
cgagaaattttggcgaaaaaatgattttttttgaaaaacttttaaaggctttgggctcaaaaaggntaatttagctgctgcgtgcccttctcatagaggtttttttgaaaaatgctaaaatatggaaataaaatacggataaaaatgccaaaatatggaaaatatggaaatatggacataatcgcgaaatatggatatggaaacccatcctagaagcttcaaaccaagctaaaaacatgtttttcgtgcgtttcagaccctcaacagtccaggaaaaaatatggatatccatatgattggcatccctaataattagagtctcatcgacaagattatttcaatttgtcttccttcttcttttgatctttatctttcataattcgtcattatctatttgacttcttgtcaaaatttgccgaatgatctacaacaccactaattttatcagtagcatttttgaggaccaatgtgctaagaaatcgcttaaaattttcaactatcaatttatattgttgaaaatgtgaaaagcaaaaatgactgaaatagtgcttatggttttttattaacattaaaatgaagaagcaaaaattaatgtttttcgagcctttaatttagtcctttattaatgaagttttcacaaaattttcaaaatacattccaacaaatgaaaaattcaattttggcagtttttactccaaattttggttcatatttgagtttttagcccataattttatgtccacatttagcgtttttttaagtccatataattcacaaccctatgtataagcaaaaaaatatataatatttaaataaattcttgtcccatcctaaaaattttcaaaaaacccaaaatatttgagtttgagttcgggatagtcagattctgatcatcattctcgaaaacaccccggcggatagtgatttttaaccaaaatataaaagttaaattagggaccacaatcccgcaccattgtaaagaaaatgacatataattatctaaaatgaaaggcaaattaaaattttggtg

SEQ ID NO: 45066 - DNA, 1116 bp, Heterodera glycines
taattaaagaaatttgtttgaaaattttcattattttaattttgctttaacttttggattttattaaataaaaaacaaaataaaaattttattttgtattattttcacttgaaataaattaacatttgaatttttttttaatttttgaatttttaaaatttcccggttggtcccggttcccggtcccggcttctcaggtcccggcaagtcccggtcccggtttttgcaaaaattcccagtcccgtggcactctactctaaattctatggagcagcgagggccaaattgaattttttggccaaaaaataaaaattaaaatgatacaactatgacatagtttggcagtgaattccctcaggaccaataaatacataaaggccccccccccccccccatatagggggaggccgctggggctggcggaattggtcttcattttccacaacaaaagttcatttttatgcataagaaattaaaaaatttatttttattttttttcgaaaaaagggtgcattaaatttaaaaatcaaaaattttcaaactttattacctaaaccaaccatcattttttcttttgcatttttgcactttttactagcgacaacaccaattcaatcgtttgttgttgtgtttgctatgatatgatgtccattatatttgccagtctttcgcaaatatattctcctctgctgggggtgaaaatgtgtgggaagaacaaacagcattgtttatgcccaagggcttacactggggttttgctgtgttgctgggatgggatgtgcaccccaaaattttgaaaaaatcgctaaaaaaattttcaaaatttttttttcttgaattttgtttcgaaaaattctgtctgaaaatgcagaaaaatttttttcagggggccagtgaccggttggaagaaggaaacgaactgctccccgcctccccccccccccctcaaaaataatttaaacattcttggtgttattccatagctccatgtttcataaaaaattatgaaatagtactcaaaaaacttattttttcaaaaaaatctttttttcgtacatcaacaattttaatttacaggctcttcacctcctttcctttggagctattttaaaattt

SEQ ID NO: 45067 - DNA, 907 bp, Heterodera glycines
  unsure (1)..(907): unsure at all n locations
gggaataaataaatgaaaggcaaaaatcggtgccgcattttcccattaatttgcaatttcattttatttctcactttccgataaaaattatgaaaaatgattcatttaaaaaaattaatttgagaaagtcaaagtgataaaggaattttgaaaaaatgccaaaaaaaaattgacggaaaaaggcattaaaaagacataaaatatttcgaaaaaaaaatcagaaatattgtgaagaaataaataaataaaatattggaactttctcgttgaagaactaattttgaaccttaaaattcatttcaattaattaaaaagggagtgatctcgaattcgatttacaggcaattaatcgcatggatacaaatatttgtttccgtatccgccgtttttatacgtgccaagttgaggccgaatccatccggtgatacccgcggatttatccgtatccaaattttttatttgtctaattttgtatttgtaaccaaaagcagacttttcatagttaaaataaatcctgaattttataaaaaatatttattaatcgaaattnttttcaaatccacttacaaattaattatcnctttctcttnnaataaaaactttctnantatttncttaaaataattaaatcctttnntaattaaaattaaatcccataaatccaattttaaaaaaacattttnaaataattnatnanaaaacnaataanaaataatttnnccataaaaatnaataaaaattctttnaanaaacgacatccaaaatnnnacaaatnctttntncactataaaancnnatnnnntcnncttcttcncncnttctcctccaagggccncccctaaaatnncatcccttttcattttctagtaaggatggcatttattctgatcacttctgtggtaacatg

SEQ ID NO: 45068 - DNA, 902 bp, Heterodera glycines
ggggatctctagagtcttcttctaattttggctaagtcatatggctggcctctactaagaaaagctgttaaaccctgagaggattaaaagagagggataaagtgaagatctccgccgttggtcatttaaatctccaaatttgctgaagtaagtgaaaagaaaaggcaaaggagctttgaaataagaaaaagaataattaaagaaaagtgtgtatttatttattatcaaaataaacttcaaagggacgcaaaagtgcgggcggcgggtggcgtgagaaaaaaggacggacgcagggcgaggggggggggggggggggaataactaaccactattctcaacattaaaaatatcattaagtccgtgttaacttgcattgcaatagtgattaaatttacttattctttacacccatatttttgtcacttcatcataacaccattatggatgatcgggagagacaaagtgaatggaatacgacaaattttgaataacatttccctgaattagagagcgaaaaaaatgttgaaaaaggaaaaaaacggaaaacatagacggcaaacgagtatgattatcctacacttacagcgaaataaaaaattgaatttttggtgccagtacattttaataaatattgaaaaatgaagcgcgaaatttataaaacaataatagcgcgagggccataaaaagatcaaaaaatcccgcccgtttaatcggtttatgcacttcggcattttatgtctcgaaatgttcttacaaaagtgccaaaaagccatttacaaattatagcaggtagaatgccattgttgtgcttttcaaaatgtacattgctgcttcttttttctatccatcccattttacccaatttcaaacttacacacataactaagtaacaatttgttaca

SEQ ID NO: 45069 - DNA, 641 bp, Heterodera glycines
caaatactttctctttttggttggtctcatcctttctcgtagaaataaaatggggtataaatgcaaaagaaaaatggaaagagaaagagagagaaattggaagaattttgtattttaaatgaatgccaatgccaaagtcaccactccctttcctttgttcgcttcccctcccccctccccctcgagatgttgtcattaacaggtgccggaattcattatttccactaaatcattagcatatccatcaaagaaagtgccacactcactcaatcggcggtgagtgaatttggcattttcagagagggcaaagggaagcggaggaaggcaaatgggggggaacggtggaggagggggggggggagagggaaaagcccgaggggagagggcgaacggattgaaaaacgaaatgcataaaaaaaggaaaaaacggaaaaaagtgaataaataccaaaatgaacataaaactaattagaattaataatttgtatccataggaggaaactgacgaactgaggttattttacacttgctgatagtaattaactagcaattaatttgatggattattggagaatgaaaacacgcagaatgaaagaaatgaggagccattgtttacatgggagaacgaaagcgttgatgtg

SEQ ID NO: 45070 - DNA, 488 bp, Heterodera glycines
ggagggggccgaaggccctctacgaggccgcgaagcggccgagcgacttccttaagcactatgccaaaggcccgtacgaggccgcgaagcggccgagcgagtaccttaagcgcggggaaaccccaatggccccggctggccccggtgttgaaagcggccccggcgctttcacagggccccttggggccctggttcactctataagggaaaaatgtaacttgaaatgactttttttgaataactctcttcaagttggtcggatcggctccgaacaaaagagtacaactattttttaaggattctctatcgaatggtgaaaaccattttttgaaatttttacgtaaaaaaaagtttcttcagaaaatttttgaaaattttcggaaattttttgaacgggtcacggtcgtcggcttctagcgcgatggatgttaaagatagcgtcttgggcaaggagaaagggcacaccttcacattttggcgcttctaat

SEQ ID NO: 45071 - DNA, 736 bp, Heterodera glycines
tttattctgcgtggatttttgctccccataattgtttgagtaccccaaacggacacttgaaaaaatcgattttttgttttcggggcagtccccccgaaccgatgcgcccagatttatggggagaccgaatccttcgggagtagcttccctatagcctgtactttaattctgcgttggatttttgctccccataattgtttgagtaccccaaacggacacttgaaaaaatcgatttttttgttttcggggcagtccccccgaaccgatgcgcccagatttatggggagaccgaatccttcgggagtagcttccctatagcctgtactttaattctgcgttggatttttgctccccataattgtttgagtaccccaaacggacacttgaaaaaatcgattttttttgttttcggggcagtccccccgaaccgatgcgcccagatttatggggagaccgaatccttccggagtagcttccctatagcctgtactttatttctgcgttggatttttgctccccataattgtttgagtaccccaaacggacacttgaaaaaatcgatttttttgttttcggggcagtccccccgaaccgatgcgcccagatttatggggagaccgaatccttcgggaatagcttccctatagcctgtactttaattctgcgttggatttttgctccccataaatgtttgagtaccccaaacggacacttgaaaaaatcgatttttttgttt

SEQ ID NO: 45072 - DNA, 1280 bp, Heterodera glycines
agcgacaacgatcgcatgcctaaccaactgacaaaattggataattagagaagcaccgacagaagaatgaccttggggtcggtgtaccccgaacgttggcagggcaattcgaacggacaaatgccttagagggaaaagaggcgaaaaaagggggagggaacatcgtcgaaattaaaggcgtactgtgacagtatgccaaattcatctttttgacgtcgttgaaggacaattggaagcgttgtccgatggtgttttggtaatttgggttcaccgtttggaagagtttcctaattcgatcggttcgcgaattttttgccaaatgactgaccgaaacgtcaaaggtggtctcttgggattgggaaaagcgagtgaattggttaaggaagccgagctgaatgtttttgggctgaatttggacgaatttatcacggtcaaagcgcgactgttcatggaaataccgagagaatgagctgagaaagaattgccggattaaaaaataaattttaatttgcccaccgatttcatgggacacaacgaaaggattgtcacaacgcggcccaatggacactttttgggggtgtccgtcgcgcaattggccaacggtcgaatagcaactaattttgttatatttttgttaattatgcccctcattagattaacaaatttctcttcttttattcctttggaaatgacttgccccggcccgaaaaagaaactcagtccgtgccgatcgcttctgagactgtgcacctccttgaaggtcaagcaggtcgctcgtgcccaattcgcaattccctcgtggaccgccgttcgattcactgatcagaaaagggggcggggcattcaatcggcggagaatggcgccgccacccttttggccgatggcgtagggaattgggaaggaatgccatcgttcgctcagtgccgaagtcaaagtgcgtcctttgcgcagcctttcgcttctcatcagacggtggtcggtcagttccgtacaccaaattgtacttccattcagacattctctgctgctgctggccaaatccaattgcattttggcatttcttgaaaaatgaccttccaaagttgcattttttcttttgccattataaacgcccacttcagcagtccctccatttgtccctccgacagtacaatgtctccctcgaacaaatacggaatttggtccgccctttgagtcggcgcttttgccaccgcatcctcaaaatgttccgcggcgcatcgttcgtcccccgcggcacattcctccgccactttcagcc

SEQ ID NO: 45073 - DNA, 1332 bp, Heterodera glycines
  unsure (1)..(1332): unsure at all n locations
ttcagtatcctgcaaagttttgtgcgcttctgatcagttctgaaaaaaagttaagcctaactttttggcctgtnaaaaaggaattaaaaatttttaaaaattttattcatctccctttttgatagaaaaagcatcagagtgcctaaactaacatgtaaataaaatttggtgcgtttcagagcattttctggaaaaaatatttatgaattaattatgcaaaaaataaacaaataatgaactctcttccttaataattttcatgcaccgaggtactcactcggccgcttcgcggcctcgtggtgggccttcgccccccctccgcccttcaaaattttgaaaaaaaaataaaataataggagactcagaattttgaaaattttttataaaactgatgacaagctaatgtgataaaacaggttaattcttttcctttcagtatccctgcaaagtttggggcgcttctgataagtttctgaaaaaaaagataagcctaaactttttggcctgtttaaaaaggaattaaaaatttttaaaaatttattcatctccctttttgatagaaaaagcatcagagtgcctaaactagcatgtaaataaaatttggtgcgtttcagagcattttctgaaaaaaatatttatgaattaattatgcaaaaataaataaaaatttctaaaaatttgatcgtccataaataatttgtaattgatcaggggctcaccaaattttgcaggaatacgtatcggaacactacaaatgcttactaattttcctagattttttaaacccggtgaaaattttttgcagacaccaccacttttgcacttaaaaaaatttcaaaaaactttaaaaattcatagaaaatttaaattcataggtactactgctaaatcaacgcagagacgcctttccttgacctttttaggcccctgcaaaatctggtgcgcttctgatcactactcgaaaaatgagtgattgaattttcactaaaaagttaagcctaaactttttggcctgtttaaaaaggaattaaaaattttaaaaattttattcatctccctttttgatagaaaaagcatcagagtgcctaaactaacatgtaaataaaatttggtgcgtttcagaaccctttctgaaaaaaatatttatgaaacaaaaaaatcgattttttcaagtgtccatttggggtactcgaacatttatggggagcaaaaatccaacgcagaattaaagtacagcctatagggaagctactcccgaaggattcggtctccccataaatctgggcgcatcggttcggggggactgccccgaaaacaaaaaaatcgattttt

SEQ ID NO: 45074 - DNA, 1031 bp, Heterodera glycines
gggaaaaaagactttttacaaaataatacccctgggagaagagagtggaaaacatgatttcgaaattttcaatttcttgtactctaatctactcaaaccggttcagaattcaataaaaataacattcacggtgcgaaaaatggggtatgaaaagtttattggggaaaaaaagactttacaaaataatacccctgggagaagggagtgggaaacatgatttcgaaattttcaattttttgtactctaatctactcaaaccggttcagaattcaataaaaataacattcacggtgcgaaaaatggggtatgaaaagtttattggggaaaaaaagactttttacaaaataatacccctgggagaagggagtgggaaacatgatttcgaaattttaaattttttgtactctaatctactcaaaccggttcagaattcaataaaaataacattcacggtgcgaaaaatggggtatgaaaagtttattggggaaaaaaagactttttacaaaataatacccctgggagaagggagtgggaaacatgatttcgaaattttaaattttttgtactctaatctactcaaaccggttcagaattcaataaaaataacattcacggtgcgaaaaatggggtatgaaaagtttattggggaaaaaaagactttacaaaataatacccctgggagaagggagtgggaaacatgatttcgaaattttcaattttttgtactctaatctactcaaaccggttcagaattcaataaaaataacattcacggtgcgaaaaatggggtatgaaaagtttattggggaaaaaaagactttttacaaaataatacccctgggagaagggagtgggaaacatgatttcgaaattttcaattttttgtactctaatctactcaaaccggttcagaattcaataaaaataacattcacggtgcgaaaaatggggtatgaaaggactctagaggtccccgaaaaaaagactttacaaaataatacccctgggagaaggaagtgggaaacatgatt

SEQ ID NO: 45075 - DNA, 1345 bp, Heterodera glycines
tttgtcagctcctcaggaggctatatttagggaatcgccataaaaagaaaaatgatggcatttttatagacgccggggggggggggtcaatgatcgtcatttgttcttacttttgtttgatttcccatccattctttcccccgcatcatttgatcaaaaattttgggtctgatcagcaggggttgatcacctgctgctgctgctgctggttctggcccttctcccccacttgttcggctcgttgtttgctaaacaacagcaggaggaggtggggacgggcgagaacaccacagcaggagacaatgaatggaaatcgcacggcgccgccgccgggggtgcgcgagttttccactccaatcggcgggtggatgggttagggaagagccatcgcaattcgtttttttttgtcagcattttggatttgattatctttggtatttaaaaaaaatcttatcaatttctgatcattaattaatcaatgttggactaatcaagaaattagttgaatttgatcaattaactgatctaaatctaccttctgatcacttcttcctagactggccataccatttattgcatttatgaatctcaattacgatggctattgtctgatcatgcccaaccatttattagtaccttttatctgtttgaacaaataccttttttagcgaacacacacctctagttcaacgaatactatcgtttctatgttttgcttagtcattaatttattacactggagattagttgaatgtgacactagaccctttgggtcactgatttgattctaattaactgatcaatcatttccgttatttttattcttagggttttttaaattcttggttaggtttttcatcatttgtcaatttcgcgattattgtagtcatttctcgattcctgacaattttgcattattttatgagcccgaatcccgagtttttggcattttttggctcctagatgcgccctcgacattttcaatcagtaaacagtaatctccgtaatttccggcttctttggttccctttctaacaaagcggcacagatcaattatttgtgggcacatttacgtcattccccaaaagccgtaggtcggtcggtcactgcgcgctatggctgctgatccttgcataatcccgtatcccatcaatgatcaaagcgcttcttccttaccaacactgccaccactaattatcccatcgcccgccgcagcattgatcaaaagttaacagacagacagagagagagagatggctttcgttggtcccgctgatctgatgtgtcctgatcagggatcaccaccactccattctcctcgccttttcttagaattaaaaagcag

SEQ ID NO: 45076 - DNA, 804 bp, Heterodera glycines
ccccccccccccccccttcaaaattttgaaaaaaaaataaaataataggagactcagaattttgaaaattttttataaaaactgatgacaagctaatgtgataaaacaggttaattcttttcctttcagtatccctgcaaagtttggggcgcttctgataagtttctgaaaaaaaagttaagcctaaactttttggcctgtttaaaaaggaattaaaaatttttaaaaatttattcagtgtccgtttggggtactcaaacatttatggggagcaaaaatccaacgcagaattaaagtacagactatagggaagctattcccgaaggattcggtctccccataaatctgggcgcatcggttcagggggactgccccgaaaacccaaaaaaaattttttggataaaaattatttaaatgaactgagcatcagagtgcctaaactaacatgtaaataaaatttggtgcgtttcagaaccctttctgaaaaaatatttaagaattaattttgcaaaaaataaataaaaacgaaagactcagattttcgaaaatttttttgagccagctagctcggcgctcatttcagtgtaagttagtcctttaccggggagtatccctgcaaagtttggtacgcttctgctcaattagcaaaaaatatgagtgatcgaattttcactaaaaaagttaagcctacattttttggcatatttaaaaagcaactaaaaaatttttaaaatttaataattttcctgcaccgaaggtactcactcggcctcttcgcggcctcgtggtgggccttcgcccccc

SEQ ID NO: 45077 - DNA, 1280 bp, Heterodera glycines
ccgttcgccaatggatttctgacaacagcggaaacagtcacagctggcacatcaatgccatcatcagcagaagctgcagcagcagaaagggggacgaacggagggacgaaaaagagacagccgaagggggaggggaaaagtgagcaaaaaaagggggattaaagggaaggcgggattttgattttaaaagccaacgaaagcattgaattgccaaattttgaaagggagcaaaagagcgacgcagagatcggcacaacaacaacagcagcagcaacagcagcaaatgcaaccgccacaactgtcgattgagcagcaacaacagtacaaatggatgcaagtgaaaagagcgacggcaacgccccggggaatgccaacttcgccgggaggtaaaaatttagggagggcggaaaagaatagccgaaaacttgggggagggagcaaagaataacatttgacacttcgcgtccccctaatgagtgtatgaacggtcgtaaatctttctgcttgcgaagggaggggaaggtcaaactcagcaccccccaaaaaatgccaaggcaaaataaaaatacgaaggattttcagtggcggaacagcgagaggaacagtcgcgccaccggggacgaattcgcgggactgaaagtgccgtggcgggcggaaaccgaacgaatttcacttatcaacagctaacggaactcgaaaaggtaacgaacggcacaaacagagagagaggcaaactcatgaaaatgcattaaggaattccatacgaacaaatatttgaacaaaacgcgacgggcggagatcgcaaacacattgcaactgcaggaggcacaaatcaaaatttggttccaaaacagacggatgaaagtaaatcgaatggcattttgggaggggggggggaaggcattttgataaattatgggtttaaagtcgagaaatgggcatggatgggactgagcacttttggcacttttttgggtcgtcggatggaaagtccgcaggaaatattgtgctgacaatttaccgatttttttagatgaaaaagcaaaagaaggagcacgactttctgctttcctcctcctcctccaccgccgccgcttcgctttggccaaattcggcggcttttgccaacccccacccgccctcaagcaatgccaacaacagttccgatggtctctctacggcacaactttcgtcgtccgcctcctccgccgaggggccgtcgccgtcgccaaaacggcactgacaaaagcattcattttggtgccgcccattctctctct

SEQ ID NO: 45078 - DNA, 992 bp, Heterodera glycines
  unsure (1)..(992): unsure at all n locations
agatgcgtcacgtcaatcggctgctcggcattttgcagaaacaaaagaaagtggcggcggcgcattagttcaaaaatgatcagttgcgctgtgattttaagggaaaatatacaaaattgaagcgcatcgcttaaaaaatgcaactcccaaaaaaaaagacttttaaaaacncaacccncataagtttaatttttctgaaaaatttttaaatatattttttcgaatacaagccatcataacagatacagaaaaattggttaattttaagtgcaatttgttctaaattgaaaaaattgcctacttttcgattttaattagttatttgaatattttacgcttatttcctgtctattttagggtggttttcttatgtttttttgcctatttcgctatttttgtgcctaaaaatcacagcccttatgatcagtcattgttataatttgccatatttggcggttttttttaataaatttatttaataacaaagaaaacaaaaattttcacacgttttgccattctaaaatagcataacttaattaagttaaatgtcacaactttattttattcatgcgttctccccccccccggcaattcttttttttgtttactccggccgctcgacttcaattgacaaaaatggaaattgcctctctggcacttcccacgccattcattccatcattctgaatttcggcaaatttgcgcatatgacaatttaaatgttttccggcacaaaaataacacacaaaaaatgccaaaagtgaaccccccccccccatcaattagagaagcgaaaaatgctggaaaaggggcagaaaaggcgaaggaaacaattaaaattagcagggaccaaatttaatgggtttataattgtatgggtttcttaatttaataattttttacgtggttccaaattgccaaatagtcttaaattaatgcatgacatttattcttcgccataatggtaattttgcataatataaatttaactt

SEQ ID NO: 45079 - DNA, 1014 bp, Heterodera glycines
tttgtagagcccatcaaacacattgtgctatagggaaaggcagaattatacaataggggcctttttattatgattacaacaaatcagcatggcgtctcactgatatggtatgtttcagttaaggtttagccgatctacaaatttcggcactgtctattttgtaaaagcgaatcaaattcctttggattccaaagtggaattacagaattgcgacggcaaatcctaaatagacaacgacgctttcattataaagctttaagggaggaaaagtaatacgaatatttcaatttcttacttatccgaatagacaaagataggttacacacgaacatttttatagaaattccggctgaaactaaaatccctcttttggtcttaacctatgatttttggcccattatggtgaattaagtatagaaggcgtcgcagaaatacattcatattttctaaattcgggtttcagaaaattaagatttaaaagaggctgaattacagatgcttttcaaattttgggtgtatacgaatagaaagaagttggaaatcagtacttttcacgcctataaaattcgggccgaaaaatattggtgtttgtgactagaaaaatagcagatgcatatcaaatgactacagaaaattacagcctccaagaaaataattgctttgcacaagcaatattttgtagagcccatcaaacacattgtgcttataggaaaggcagaattatacaataggggcctttttattatgattacaacaaatcagcatggcgtctcactgatatggtatgtttcagttaaggtttagccgatctacaaatttcggcactgtctattttgtaaaagcgaatcaaattcctttggattccaaagtggaattacagaattgcgacggcaaatcctaaatagacaacgacgctttcattataaagctttaagggaggaaaagtaatacgaatatttcaatttcttccaggtgggggtagagaaagataggttacacacgaacattttatag

SEQ ID NO: 45080 - DNA, 464 bp, Heterodera glycines
ttttttttttttttttttttgtttttttttttccccccccccgcggcaaaaatattttttttttccccccccccccaaaaaaaaaaaaaaaaaaaaaaaagaagaagaagaatagatttttttttttttttttgccccccccccccccccccccccccccccccccccccccccccccccggggggggggggggttgtttgttttttttttgtttttaataaataaaaaaaaaaaaaaaaaataaaaaaaatattatatttttttttggtttgtcttcgccccccccccctctctctcctcccccccgccccccccccccccgcggcgggggggggggggggggggggggggggagggcaaaaaaaaaaaaaaaaaaaaaaaaaaaaaaaaaaaattttttttttttctcctctccccctcccccctccccccccccccccccccccccccccccccccccccc

SEQ ID NO: 45081 - DNA, 496 bp, Heterodera glycines
actcatattttttgctaattgagcagaagcgtaccaacctttgcagggatactccccggtaaaggactaacttacactgaaatgagcgccgagctagctggctcaaaaaaattttcgaaaatctgagtctttcgtttttatttattttttgcaaaattaattcttaaatattttttcagaaagggttctgaaacgcaccaaattttatttacatgttagtttaggcactctgatgctttttctatcaaaaagggagatgaataaaatttttaaaaatttttaattcctttttaaacaggccaaaaagtttaggcttatcttttttttcagaaacttatcagaagcgccccaaactttgcagggatactgaaaggaaaagaattaacctgttttatcacattagcttgtcatcagtttttataaaaaattttcaaaattctgagtctcctattattttatttatttttcaaaattttgaagggcggggggggggcgg

SEQ ID NO: 45082 - DNA, 1613 bp, Heterodera glycines
  unsure (1)..(1613): unsure at all n locations
atcactcatatcagtctgaacatttaagttgagcaaaccgtacatcgcaagaaaaagcgaagggatcgaaacagcggagaaaggcagcggaatgaccgtaagtacgccctcgtgatatactgtaccaatataaaaataaatgtaaaaaatgccgaaataccgaaataccgtaacccgggcaaccaaaaaagcaaaaatataacagtaattaattccctcatgagcagaacagaggagaaaaaatgttggacggaatttcgatgcaaaagcctctgaaggcgccgctgtccaggagaataacgcccgattttttgcgtgctgtggtgcaagacgggtgcgagctgacgcgttgccaattgatttggtaattcggcacaatgccaaacgatgggaaaagcctttctacttttgaacaaattcacaagaaacaaataataaatgggctaaatttgtaaagaaatcccggggaatgctttttccgcgttttaattgtgaaaagtcagttcgcttttcttcagttatcgcgtcaaattcgatgcaaaatgcggcggaagtgcgggcgctttgctctccgaagcgtttgtccggccgatttcccaggcgcaggaatttctcacctacggacacatcgccccttttatgggcgcttttctcccacatcagtccgtttttggggagttaatccaaaggcatcattcaccgattattgctcatttgtcagatgcgactttatggtgaagaaggaagtgctgaacgaattccgaattccgcccgaattggacgaagcactcaaccgaaaatacaatgggcaaaagggggagggaggaggagaaagggaggaaaaggcagtctcgagaagggcaccaatggtcgagaaaggccaacagcagcagggggagggagaaggtgagcacagccgaagagcaaggacaaccgctaattatggctatcagtttataaacatttgggtcgaaacggatcacgccttagtgatcagaaactccgaaaacctattaattgacgtttttttaaaagtgttaaaaaatttggggcgtaaactgtaaaagggggagccgattctaattgccaatcacacacaaagaaacagaatcagccgatgagaagcagccaaatggaaaagaaaaagtgaccaaagaaactgggataagcggtgaaagcaaacgccagaaacaaaaagcgaaaaatgttagcgcaacgaacccgggggatcggagcaaagtcagacacgtagtgggaagcacaaaacaaaagtaagcattgatcagacaaacaatcaactgacaaatatttatttgaattggaattattttgcatttaaaaccagggtggccaagttttttttatcaaaataaggacaaacgaggctaaaactaagatttggaccccaaaaatttttacgttttgggggcatcttgggcattcacactaaagaaaaggaagtaaaatataatttatttgaaaatcgaattaattaaaagtacttcaataaaaaaaataaagttattcattgtagatttttattttcaaatccaaaataagaacganatatgcacgtcgagccanaaataagaaaaatctttagaataaggaca

SEQ ID NO: 45083 - DNA, 149 bp, Heterodera glycines
ttggccactttttgcaacaaacattcggcatttgagctttcctaatggcgatgatttggacaatttgcttcgtttggtttcaccgacaattctcactgatcttgatcaattgaattcaatcgattccggttatctgtcttccagtgcga

SEQ ID NO: 45084 - DNA, 895 bp, Heterodera glycines
  unsure (1)..(895): unsure at all n locations
gtttccaaaatattgagaaaaacantttgtgtatttagacttccctagacacaaaatatgtttccaaaatatgagaaaaacacttttgtatttagacatgagaaacacaaaatatgtttccaaaatatgagaaaaacatttgtgtatttagaaaacatgagaaacacaaaatatgttttcaaacattgagaaaacatttgtgtatttagaaaacatgggaaacacaaaatgtgttttcaaaacattgagaaaaacatttgtgtgattagaaaacatgggaaatacaaaatgtgtttttataagttttttctttctttttctgttaattaaagattttttttaggtttttcttattatttattaataaaacagttaattatttttgagatacatcaaatcaaaggacaccttttcaagcgttggcattattccttaaggaattcaatatcttcagcggttgcaccaaaatattcattgaccaaaaagtccaatcaaatttcattcaaattagccctacgagatgaccaatgtcggctgcaaccatttaatttcatgattaatgcaaataaattttgcattcaatatgataggagaaatgggatcaattatatcataatttgaaaaggaaatcacttcgcgcggcacttacggcattttgcactctttcagtcagttctttgccatcattttgccacaattctttttccgagatgactgaacagccccaaaggatgaattggataatagtcaacttgagaaaaaacaaatttttagcttttttaaaatttgtttcatttgtgtaagcatgcaaaattcaagaaatttagtccaaatagaaaattgatttcaccaaatttcacacctcatagcgggtacatatcagggatggcacgga

SEQ ID NO: 45085 - DNA, 1365 bp, Heterodera glycines
  unsure (1)..(1365): unsure at all n locations
ttaacttttttagtgaaaattcgatcactcatatctacctgcgaattgagcagaagcgtaccaaactatgcagggatcttccccggtaaaggactaacttacactgaaatgagcgccgagctagctggctcaaaaaaaattttcgaaaatctgagtctttcgtttttatttattttttgcaaaattaattcataaatattttttcagaaagggttctgaaacgcaccaaattttatttacaagttaataaggctctctgatgctttttctatcaataatggaggtgaataaaattttaaaaattttttaattgctttttaaatatgccaaaaaatttaggcttaactttttagtgaaagtttgatcactcatattttttgctaattgagcagaagcataccaaactttgcagggatactccccggtaaaggactaacttacactgaaatgagcgccgagctagcttgctctaaaaaatttttcgaaaatctgagtctttcgtttttatttattttttgcaaaattaattcttaaatattttttcagaaagggttctgaaacgcaccaaattttatttacatgttagtttaggcactctgatgctttttctatcaaaaagggagatgaataaaatttttaaaaatttttaattcctttttaaacaggccaaaaagtttaggcttaacttttttttcagaaactgatcagaagcgcaccaaactttgcagggatactgaaaggaagagaaataacctattttaaatattatctagtcagttcatttaaataatttttatccaaaaaatttttttttgngttttcggggcagtccccctgaaccgatgcgcccagattctatggagagaccgaatccttccggaataaattcactataatcctgtactttactgctgcttttggatgtttgctccccacaatagcttgaggaccgcagcaatccacttcgtgatcctgatgattcccagtcctcagtcccgcattcttgggaatttccggatataagggattactccgcgggatcccgggcagcaacattttgagttccaatcccgcaacgggatctgcactaatttccgcgctctacccagcaccaacgctgttccgggttacccgaaacccgaaacccggtctttttcccgacccgaaacccaacccgatgattttgtgtcgaggtttcttgatcgaaatctgcactggtaagaaggggggaggggtgaatataaatcaggacaagtgataattttcttttgaaacgattgcgaccgaatggaatccaaaaattttgtatttgatttcgttaactatcatccaatttctaaagatatctcttatgaattacttgaa

SEQ ID NO: 45086 - DNA, 863 bp, Heterodera glycines
ctgagtctttcgtttttatttattttttgcaaaattcattcttaaatattttttcagaaagggttctgaaacgcaccaaattttatttacatgttagtttaggcactctgatgctttttctatcaaaaagggagatgaataaaatttttaaaaatttttaattcctttttaaacaggccaaaaagtttaggcttaacttttttttcagaaactgatcagaagcgcaccaaactttgcagggatactgaaaggaagagaaataacctattttaaatattatctagtcagttcatttaaataacttttatccaaaaaatttatttttgggttttcggggcagtccccctgaaccgatgcgcccagatttatggggagaccgaatccttccggaatagcttccctatagcctgtactttaattctgcgttggatttttgctccccataattgtttgagtaccccaaacggacacttgaaaaaatcgatttttttgttttcggggcagtccccccgaaccgatgcgcccagatttatggggagaccgaatccttccggaatagcttccctatagcctgtactttaattctgcgttggatttttgctccccataattgtttgagtaccccaaacggacacttgaaaaaatcgatttttttgttttcggggcagtccccccgaaccgatgcgcccagatttatggggagaccgaatccttccggaatagcttccctatagcctgtactttaattctgcgttggatttttgctccccataattgtttgagtaccccaaacggacacttgaaaaatcgatttttttgttttcggggagtccccccgaaccgatgcgcccagatttatgggg

SEQ ID NO: 45087 - DNA, 794 bp, Heterodera glycines
aatcacataatgatttatattttttacaagatcattttacaagttttaagaattaggcgcagaccatttatgtaaaccaaactagcttataataaatacagtatcgcaaacactgtaaaattttgtaaccattttatcaatcgttggcataattaaattttaaatgtcaccgcaatgcaaaaaattgatctcaaaataacatttggctaataatcaatttaaatattttttatagtataatagtggtgttatattaataatttagaaatattcaaagtaatatgcagcatttagtttcatttatatttgaaatattattcattgattaaaataaattttactaaaaattttattattaatttcaatgatattctagctaacccttgtttaaaaataagtttaaatttgctagttttttacaataaaaacaaagcaaatactttaaaagtataaaattataaagttatacgtccacgaaattcactgttgtcacctatcgagcctagaagtaataaaaatatgataaatgggtttaaatattgcaattaaaatcaaacttaaaaattacatttttattatttattctataattatttattttgtttaattagaaatactatactatcataatgaatataaatctttatttagattaataaaagatataaaatacaaagtttctttaacaaaatgttaaataaaatttaaatttaagcattgttttcattatataaatttaaatttataaatgaaatcgcataaatagccaaaaaaaatatttaaagaatttacac

SEQ ID NO: 45088 - DNA, 1011 bp, Heterodera glycines
aaaatcataagtaagaccaaaagagggattttagtttcagccggaatttctataaaaatgttcgtgtgtaacctatctttgtctattcggataagtaagaaattgaaatattcgtattacttttcctcccttaaagctttataatgaaagcgtcgttgtctatttaggatttgccgtcgcaattctgtaattccactttggaatccaaaggaatttgattcgcttttacaaaatagacagtgccgaaatttgtagatcggctaaaccttaactgaaacataccatatcagcgagacgccatgctgatttgttgtaatcataataaaaaggcccttattgtttaattctgcctttcctataagcacaatgtgtttgatgggctctacaaaatattgcttctgcaaagcaattattttcttggaggctttaattttctgtagtcatttgatatgcatctgctatttttctagtcacaaacaccaatatttttaggcccgaattttataggcgtgaaaagtactgatttccaacttctttctattcggatacacccaaaatttgaaaagcatctgtaatttagcctcttttaaatcttaattttctgaaacccgaatttagaaaatatgaatgtatttctgcgacgctttctatacttaattcatccataatgggccaaaaatcataagttaagaccaaaatagggattttagtttcagccggaatttctataaaaatgttcgtgtgtaacctatctttgtctattcggataagtaagaaattgaaatattcgtattacttttcctcccttaaagctttataatgaaagcgtcgtggtgtatttaggatttcccgtcgcaattctgtaattccactgtggaatccaaaggaagatgattcgcttttgcaaaatagacaatgcggaagattggtagatgggttagacgttaactggatcataccatatcagcgagtcgccatgctgactgaagtaatcataataaaaagtcccct

SEQ ID NO: 45089 - DNA, 1000 bp, Heterodera glycines
  unsure (1)..(1000): unsure at all n locations
attaaaataaataaataattaattttaaacaaaacatttatttataaaaaaaaaattaatttcaaataaaaaaatgtattttattattaataaaataaaaaatatttgaaatgaataaaacaatgaaaacacgaaaaatggngtagttattaattaaaaacaacgttggaaattattaattgaatattcatttaatttgaaattaaattaatttttttacaaattcaaaaaataaataattaaattctttaattaaaaaaataaataaatttaaataatttataaaaaatatttgaaattaataaaacatgtaaaagtaatcaaaaaatgcacagaaaaataatgtacaccgatcggatccgaacttcgcccccccccaaaaaaatgatgctcagaatccccaatcacacggggattctgaggccttaacgatgtcaaaagtaaaatctgttttcaaattttaacccaaatttccaaggaccaaaaaattaaaaatatttttgaatttttaaaaaattccaaaaattctgaaaggtaaaagaaacatcatattcgtgctcagcacctcaaaataccccagaaaaaaaatttcacccccattttggcccacaaaaaaaattttgaaaatttctagggggcctagctcgaaaatttttgaaaatttccgaacatgaagtacaccgttcgatagagcctataaagctctacaaatctgctctaaggaaatttttggctaaaaccgacccttgacgagttatgggtccgggactcaaactgtcccgcttaggccaaaaattttttctatttccggaaaaaaatggacattttttcaaaaaaaattccattcgatagagctcgaaaaactatgtcttggaagtggtcttcgttttaccgggaaaattcgttaaaaaatcataaaattcaaaaacccgaaaaccattttttaggcctaactcgagaaaagtaaagaaaattttcgaaattctttaaatttcagaaa

SEQ ID NO: 45090 - DNA, 880 bp, Heterodera glycines
gctccccataattgtttgagtaccccaaacggacaccttctaagatcgatttatttttgttttcggggcagtccccccgaaccgatgcgcccagatttatggggagaccgaatccttcgggaatagcttccctatagcctgtactttaattctgcgttggatttttgctccccataattgtttgagtaccccaaacggacacttgaaaaaatcgatttttttgttttcggggcagtccccccgaaccgatgcgcccagatttatggggagaccgaatccttcgggaatagcttccctatagcctgtactttaattctgcgttggatttttgctccccataattgtttgagtaccccaaacggacacttgaaaaaatcgatttttttgttttcggggcagtccccccgagccgatgcgcccagatttatggggagaccgaatccttccggaatagcttccctatagcctgtactttaattctgcgttggatttttgctccccataattgtttgagtaccccaaacggacacttgaaaaaatcgatttttttgttttcggggcagtccccccgaaccgatgcgcccagatttatggggagaccgaatccttccggaatagcttccctatagcctgtactttaattctgcgttggatttttgctccccataattgtttgagtaccccaaacggacacttgaaaaaatcgatttttttgttttcggggcagtccccccgaaccgatgcgcccagatttatggggagaccgaatccttcgggaatagcttccctatagcctgtactttaattctgcgttggatttttgctccccataaatgtttgagtaccccaaacggacacttgaaaaaatcgatttttttgt

SEQ ID NO: 45091 - DNA, 813 bp, Heterodera glycines
cagtgtccgtttgggggtactcaaacatttattggggagcaaaaatccaacgcagaattaaagtacaggctatagggaagctattcccgaaggattcggtctccccataaatctgggcgcatcggttcggggggactgccccgaaaacaaaaaaatcgattttttcaagtgtccgtttggggtactcaaacaattatggggagcaaaaatccaacgcagaattaaagtacaggctatagggaagctattccggaaggattcggtctccccataaatctgggcgcatcggttcggggggactgccccgaaaacaaaaaaatcgattttttcaagtgtccgtttggggtactcaaacaattatggggagcaaaaatccaacgcagaattaaagtacaggctatagggaagctattccggaaggattcggtctccccataaatctgggcgcatcggctcggggggactgccccgaaaacaaaaaaatcgattttttcaagtgtccgtttggggtactcaaacaattatggggagcaaaaatccaacgcagaattaaagtacaggctatagggaagctattcccgaaggattcggtctccccataaatctgggcgcatcggttcggggggactgccccgaaaacaaaaaaatcgattttttcaagtgtccgtttggggtactcaaacaattatggggagcaaaaatccaacgcagaattaaagtacagggtatagggaagctattcccgaaggattcggtctccccataaatctgggcgcatcgggtcggggggactggcccgaaaaccaaaaaaaa

SEQ ID NO: 45092 - DNA, 862 bp, Heterodera glycines
taaactttatgtaaacaaaaaaaaaatgcattcccatgaattaatctattaaaaatattcaaattacatttagactatttttaaagccaaaaatgtgctaatagatgaaatcggagtgtgggaaaaagtgtggggtgggcgggataaagacaagggggagaaaaacaaataaaaactgctcaaaaatacgtgaatttctcaaccatttcgctagaaaaatcgtaaaccaaaattatttaaatgatttttggcgtaaatctttttaacccaatgtcaaatgaaagtaaaatctgatttgagatcttttggcatctgtgagaataaaaattaagctttaagtttgactcaattgtacatttattttttaatttcaacacactatcgatgccgatatgaatcgacgataagttttgatcttttacaaagatattaattacaaaaaaaaaggtgataataaaaattttaaaaatttttaatagatttttaggtatgcctattagcttaggtttatattttaaaagttttatcgaacttagcagataacgacaaacgacgtattacgacagctttggcgtttgtcgtttatcttttgtcgctcgtaattgtgattggcccctgctggggtccagtggtgccgaaacacgctgccgggggatttgaaaaatataacacgcaaatcgtctcacgtcaaaacgagattttgtttcggtacgagtttaagagtggaattagcacgaacttagttagaatttcatttgtttcggccttcaacttttattgagcttattgtctctacatacaaatgaataaatactataaaatgtcattagcgtaagcagagagttaaattgtcacgcaattt

SEQ ID NO: 45093 - DNA, 1138 bp, Heterodera glycines
agtttggcgacagaaggtttctgactaaaatgtgagaagctaaataaatgaatgcccatttctaattaacgacgacttacgaaatactcatattcccggagactagcaacgcccggtagcacatagagtgttgccatatatttattatcatcgttctcagcagcaaaacaaaatgccgaggaccggaaggaaaagaagaaggaggtagcatttaaggcaataatatttcctaaaaaaatttaaagtgataatttgttggaaatcatttccttttaagatgcattgctttttcctcttcaattgcgacgcaaaacgcagaaaaaattatgtcagagggttgaatttattgcgtggctattgacttttacaattggtagggcatatagaatatgcaaatacgtaagaattgacagagagtagattttattgtgatggttattgccaagacatatagaatatgcaaatacgtaagaattggcagagagtgggatttatttcgtggctattgacttttattaatggttattgccaaggcaaaaaaatattttacaaacgtaaaattgagtcaaattggattatataatataatgtttgaaaatataaatcatagtcctcaaagtcaaaaccgctcaaaaaggttggaatcggttttagaagggcccaaaacattgagaaaaacgcaaatttgggagcgcttgccatttttcaggaaaaaatcgggtgctgaattgtccactaggtggggcgtgcgttaaggtacttgcggcccgaacatttgcgcctcagacatttgcggcacgacaaatgcggtcgggcatttgcgcatcagacaaatgcggcccatttcttaagggccatattcggacacggaacgccaaattgtcagacgagtggaggtaagaaaaaccattaccaatacatcaagaacaattcacataattatagatcatataacattttcagcgaattcgtaaattcttaaaaacaatgttctccaaaaaattagtgaatttcggcaataagttcgaattcgggttcggaatttcgggaaataaaggtcggtacttgtgtggtttacctgacagatttcacatacaatggaaatgcctataaatgtattaattttacattgtttttt

SEQ ID NO: 45094 - DNA, 1107 bp, Heterodera glycines
tgcggtacgtcaatactcaaacggactcattttacaatggggtttgtgttccgttttcaatccgacatttcattttttgataataccatgtttttgttcctttcccttgccttgtgcttcatatatcaataatgtttttcaggactttcttggagactcgcactcgtccattttcgacgccggcgcgtgagttttgccgttaataattccattaaatttatccctcttcccccccccccatttggctcagttgcatttcgttgaacccgcactttgtcaagctggtcagttggtacgacaacgagttcggctactcctgccgtctggtcgatctgatcactcactgtgcttccaaggcatagaaagacgacgcgcaaaagagggaggacggaggaggaaaagagaaatatgctaattttgactctgcgtttattccatttctcttttttggatgctgtccaatgacttgtttctcctgaatttttttaggaattagagcgcacttttaatcacgttatacgtaaataaagttttgtttggcttttcatttgttttattgttatttttatcccatgattgcgcatattttagccgaaaagtgatgttagatttaaaaatatcacaactatggaaattttgaaagattttgttgaaatttcttaatagagttgcgtttttagaggtttaagaagccattatttttctgatcaactctgttccatgcgcacgaagagtacaaattttgtcagacacaaagtataaaacataacgataatcataattttacaagaaagaattttaaattaaaaggcgaggtaaaaatgaggctgttaaatggaaaagctttgccattcttttcccgatttttaatcagcagatggcgctttaatgaggctgttgttgttcggccgggaggcccagttgaagctgcagttgatgtaattgggtgagtgctgcattcacacgaagaatggcagtgccattatctccctgccccaaatatgttagggcttgccggatacattcaattggagtttctagggaaaacaatcctgggatggagttttgttgtatgccttcgaggagagtgataatacccccgagggg

SEQ ID NO: 45095 - DNA, 1142 bp, Heterodera glycines
  unsure (1)..(1142): unsure at all n locations
tttgatggtcgacaaaaattccggaatgctttttttttttttattttattattnngatcggaataaaaacaaggtatgcagggaaaaatattttttatatttaccagctaaatagagaataataattggggctactccaaaggcttctttatattgaaaaaaattacacaaattgattgacaaaacgtcaagtacaatgaattgcgttaatgattttcaaaaaatttcgacatcacccaattgcgatggtcttttcaatatttattactacaaaatttttaaattttttcaattcctctcaacatacttaaaaatttatttgtaggagataaattatttattttaatttttatcaatgaactgtgaaagtgatagaaaccctcatggattttaggatgaccgaaaaataatttttgaccaaaacaaaaatcatttgtgctttttcatgaaacagaaagaaatgcttaatcgttaatattagaaacaaaatgaaaaagtgtaaaaaattttattcataattttgctaaaaaaaactaaattcttaattcataatattatgacacggatacaacaaagccgtgcaggaaaggtatcaccggctttgactcatgtgctccgctttccaccatttcaacgaatgtatttgaaaataaaatttattattatttaaaaataaaaaaacaatatgtattaagtggtttttgatgtgttaattaagtaaatttaaaagaaaatccgacaaacctcaattcagatttaaattttcaaaaattttgtatttctatttttttcgaaaaattatggcaccgatcaaattgccaatatccgatgatagtttttgcaaaaatgtgctaacacaaaaaactagaagcatatagatttggtagggttctggtcatttcgttaaataaaagaatctttgaaaatgaaaatttgcctgttttaatctcataaagcagtaaattaaattaattaaatggtactttccggttttggggccgcacccaaaaaatttaaaaaatcaacaaaagagcgcgcaaaataaacaaggcgcgcgtaacactaatgaaaggcataaatgcagcaatttctgacaaaatttcgtcacatgatcagctgcgcgctcttttgttgattttttt

SEQ ID NO: 45096 - DNA, 570 bp, Heterodera glycines
ccttggcattctgtcttcaaatgttgtcggcaattcggcggcgacgaccaatgcgaatgattgtgaggcaacagatgatcagcagaaggcgcaattgctcaaaacattcgcaattggtatgtttttcaattatttttaaaatttattttaatagtttatttgaattttgtatatatataaaatttttccataagtgtctctctattcattttttcattacccccccccccctacccggacagatgcgttggtaatgatttatgtgaacacggtgtccaagtcgttcgtcagtccgcgcaaagaggccgagctgttcgaaagcgattctggcgacattggtggactttaaattctatttatttcaaatttgattttaattattttttttaccaccccccccccctccttaaagatttgcgcggcccgcaatatctgatggacatttttgagtttttaattcgctgtttgctcaacgaggacaacgaaagtttgcgagagactgcgcacaaaggcataattaaggtgaagttcacatataataaatactactgtattgcggtccgacttttg

SEQ ID NO: 45097 - DNA, 1012 bp, Heterodera glycines
tctttctctgttttaattgtttaaaatgttaattgccataagtgtcacttagtgattttgtctgtttgctgactgatgactaatcattaacgctttctgcacgaatcagcacttcctccggccacaaaacgtccgaaccgaccaaacgaatttcctttttaaattatggggtaattaagcgtaattaaataggcctaatggcacctctgtcgaagtgtcagttgccgaggtgaagtggaagcggcgaaacagttgggaaattgccatttccatcacttggttggccagcggaaggccaacacaatggcgcgggccgagcccaccaaagggcagccaatggaatttccaatccgcggggagcgaaccgtccaaccatcttttgggaatatgtttttaattaataggttgatgattattttgaaaaagctttaaaaattttttttttatattttttctgaattttcttttaaaaaattcctaacataaggttttttctcgaaaaatttcgttttgaaaaagtttttttaattttcaggagaggagaaacggcggcgtggaaatggctgctcccgtcccaatttcaaaaattagatggcggaaagggattaattttgggaaaaaaaacaaatccaaggtttcccatattgttatcggacaaaaaatttgtcacaataattttcatgttggaaaactcaaaaaacaatgacttttctcgagttaggactcgagaaggctctcgagaagcactacagtgtagtgagccaaaaagcacagtaatcaaaatggtaaagcaacgggacaacaatttgtcgtttgctgtttcatgtaccgttccggacggaactgttcagcgtcctcgccccacacggcacggtttctgcccattgtgaacacatcgacctccaccgagtcgccgacattcaacacgattttttccgagttgagctgaaccccacccggcgacgatggcgtcggtgtacagcgacgggaggacgcgcttaaaagcgaggca

SEQ ID NO: 45098 - DNA, 761 bp, Heterodera glycines
aaagttttttctaggctaaaaaatccattagattttttatctaaaaattctaatttttagttgaaaattcttacaattagaattttttttgtacgagttgccttttgtacgagttgccatgacaccctcaatcaccttcgcctggcaatgggaatggcatagattcgtcctttttgccgaatgtgcaattgcacgcccatttccattgtgcgtcgggtggcggggtaaacgcgtggtatgttgcaagatcttcgagatctttggcaattccagtaacagagcaaccccaaacctccaaaacttctttgtctaaacaaatttggaagtgtacatattgagatagggaagaagaagcttcggctctaatgcactttatgagtccaatcgacttttatgagtcccattaaaatatttatgagtccaatgatttttaataaagttttgaggtaaatttttatttttcaaactttcaacgcacaaatgcgctgtttgagctcctttcttcaaaacaattgggcaaaataaaagtttttcactagaaatcccggctttaattattttacaccggctaaaaattataagttacactttgtttttcgcaagcgattactgctgggaaaagcagtcgaaggcacttcattgatccgaatgacttaataatgcagtttacgccgagatttgggcccgacatttgtgcttatgtctaaaatcgggtctgaacatatatttttctcgatcccagctaaacaatctctgtctat

SEQ ID NO: 45099 - DNA, 150 bp, Heterodera glycines
ggtaatactgaagtttatcccccccccatttttcgaaaaaaataagttttaaaaaaagccgtgtaaaacacatttccttggggttttctgggtcgctgatgagcgatcaccagtctggcattcattttgactaatttccaatcccggacc

SEQ ID NO: 45100 - DNA, 637 bp, Heterodera glycines
ataatttttaaaatcaaaaattattatcaataacataaacaaatatattttcatatgaatttttgagaagtttttcatttcttaggtgtattttttgaaaaaaattttggctcggttcttacgggtgtacttttcgattttattgcatttttgttcacaattttgggcaaaaagccaaaaaagttttttttaattgtaggcttttaggctttaataaaaccctaaaatagattttataaattcgaaaactagcttaataacaacaacaaaaacattttttcgtgcttttcaggtcgcaggaagttcaggaaaaaataggtaaaaactcaaaaattgaatccctattgataacaataccattctaaacaactttttcaaaaatcacttttccaaaattgaatattgtaaagtttttgaaattttagcatttttatggattgatcttgcaccttatttagactccttaaagaattgaaaatctctttgctttttttaattaaaaatatttgggacgaatcgaattttttcctttataaaatcatgacataaattattaaagatacatataatttatgtgatattagagtttgcgtcagtaacgactggtcagactgatcgtcagaactgattttaaagt

SEQ ID NO: 45101 - DNA, 1232 bp, Heterodera glycines
ttggtttggcatggaaaacccattaaacttaagtatccttctcagtttaagttggtccgcgaatggactcagttggaccataaccatttcgaggcccgtctcgacatggaaacggcgagaaaatctttccttttttcctaatcagctgattaattggatttttagctaacccatggaatgcaagaacacacagtgattgtctacacaaaagtgatgtgagaagtgatcaaagcaatcagtcagcagaaaatgttataaattatcaataatcaccgtgacaattatttttattattttaaatacattgcttatttttggaaaaaaaggaatttgctaattggaataaatagaacaaacattaaaaccaatgaagagcgatgcccaactcatccacagcggcccgcgtcgtggcaattcttatcatggataaaatgattatactccgacaaaactgcttattttagacagtaatatctgaatacgaaacccccaaatcagacacactttccgtacatttccattcgagccctttcggtccaagttagcgcgtgtcctcgttttccaaatcctttatttggccaaatcaaataaaagtaacaaaggccgtctcaacatcggttgatgatcactctccccccccccttttcaatgaatttgtcgcgtcttcggctgattcgttctttgctgctcatccaatttcagtctctccactcgaaataattgtttgttcgccttcttttccttccgccgctctctccgttcttccttcaccgcaattttacgaattcgccgctcttccgtcgtctcccccttcggtcgaattacgctaaccatcgaagtgcgcgtgcggacggacggcgccggtggcccgtctctttggtctccgtcaacttccatttcctaaagttgggagtgaatgaattgtccggtgtttttggtggtcattttgtccgtcacctccaaattggccatgcccttctctttggtcgtcctcccccttcgcctcccaatgcctttcatcggctccctaatttcagtcggatgattgtaaagctgaatgaatttgaaaagtgggggaatgtcggatgattggcaaatgttttgtttacggtggaatgcatggagagaatggactcgcaatcccagcggcttctcttcgcactgtccaccaaaatgtcctccgtcggctcggcccttcctttgccaatttccatcgcttttgcataacgcaa

SEQ ID NO: 45102 - DNA, 1016 bp, Heterodera glycines
cttttcagattcgggattaggaattggtcaaattagattattgacagggaccccaaaaacctccgagaacaaatttctacgcgttattatccctaatttgcagccaaaatggttccccttttggtttttcataaaatccaaaatatacgaaattgcaagtagcgccagaattattttctttagtgtattgatatatttcgttttggtttggggaacttagaagcaaatttgagagtttttcaccattttcttttccgttttcagttgatcatatgtccatcaaattgatcgaggccaatgagtccattgcgctcctgcggcgccagttggagtcacgcgacgaggaaattgaacagttgcgacgcgccgagtcggtggcgggcgaacgcgtcgcggacgcgcaacgggaggccattcggtggcgcacggaagcggaacgcggactgcgacgcgtcagcagcggacgaaatttggcggcatccgccgaaagcggagaatttgtcagtttttgaacgtatttttataaaaaagttggaaaattcacaaatttttacccatgctaaaattcttttggatttatttgtacaaattcgataggtgtcatattgttggctttttgtgggttgtcgtcgagtcaatttcctctaaaaaatggtcatatggatacatttggtcatgttacgaaatatttttcaaattttgaaggctggttttgacaaactgttgttgagcgactaccgtagtgcgctgtccaaataccgtacatggtcactgtttgcggacaaacagctgcagaccatgaaacagttgttggaggagtgcggcggatggaccgagccaaatcgttacaaggttttcgttcactctctcctggaaaggccgataagcaaaaaacaggaaaatatggccgtttttcgccaaaaaaacaaacaaatttgaggtcaaatttcaaaaaataatggtaaaatgggctccgggcggtgcagtggtgctagagaaaatttaggcagtttaat

SEQ ID NO: 45103 - DNA, 1174 bp, Heterodera glycines
ggcgaaggcccaccacgaggccgcgaagaggccgagtgagtaccttcggtgcaggaaaattattaaattttaaaaattttttaattgctttttaaatatgccaaaaaatgtaggcttaacttttttagtgaaaattcgatcactcatattttttgctaattgagcagaagcgtaccaaactttgcagggatactccccggtaaaggactaacttacactgaaatgagcgccgagctagctggctcaaaaaaattttcgaaaatctgagtctttcgtttttatttgttttttgcataattaattcataaatatttttttcagaaaatgctctgaaacgcaccaaattttatttacatgctagtttaggcactctgatgctttttctatcaaaaagggagatgaataaatttttaaaaatttttaattcctttttaaacaggccaaaaagtttaggcttaacttttttttcagaaactgatcagaagcgcaccaaactttgcagggatactgaaaggaagagaaataacctattttaaatattatctagtcagttcatttaaataatttttatccaaaaaatttttttttgggttttcggggcagtccccctgaaccgatgcgcccagatttatggggagaccgaatccttcgggaatagcttccctatagtctgtactttaattctgcgttggatttttgctccccataaatgtttgagtaccccaaacggacacttgaaaaaatcgatttttttgttttcggggcagtccccccgaaccgatgcgcccagatttatggggagaccgaatccttcgggaatagcttccctatagtctgtactttaattctgcgttggatttttgctccccataaatgtttgagtaccccaaacggacacttgaaaaaatcgatttttttgttttcggggcagtccccccgaaccgatgcgcccagatttatggggagaccgaatccttcgggaatagcttccctatagcctgtactttaattctgcgttggatttttgctccccataaatgtttgagtaccccaaacggacacttgaaaaaatcgatttttttgtttcataaatatttttttcagaaagtgctctaaagcgcaccaaattttatttacaagttaattttagcactctgatgctttagtatcaaaa

SEQ ID NO: 45104 - DNA, 552 bp, Heterodera glycines
actgatgacaagctaatgtgataaaacaggttaattcttttcctttcagtatccctgcaaagtttggggcgcttctgataagtttctgaaaaaaaagataagcctaaactttttggcctgtttaaaaaggaattaaaaatttttaaaaatttattcatctccctttttgatagaaaaagcatcagagtgcctaaactagcatgtaaataaaatttggtgcgtttcagagcattttctgaaaaaaatatttatgaattaattatgcaaaaaacaaataaaaacgaaagactcagattttcgaaaatttttttgagccagctagctcggcgctcatttcagtgtaagttagtcctttaccggggagtatccctgcaaagtttggtacgcttctgctcaattagcaaaaaatatgagtgatcgaattttcactaaaaaagttaagcctacaattttggcatatttaaaaagcaattaaaaaatccccctaagataataattttcctgcaccgaaggtactcactcggcctcttcgcggcctcgtggtgggccttc

SEQ ID NO: 45105 - DNA, 1129 bp, Heterodera glycines
  unsure (1)..(1129): unsure at all n locations
cccatttttcgcacgtgaatgttattttatcgattctgaaccgtttgagtagatagactagaaaaatgaaaaatttgaaatcatgtttcccactcccttctcncaggggtattattttgtaaagtcttttttccccaataaacttttcaaaccccatttttcgcaccgtgaatgttatttttatcgaattctgaaccgttttgagtagattagactagaaaaaattgaaaattttgaaatcatgtttcccactcccttctcccaggggtattattttgtaaagtctttttttcaaaataaacttttcaaaccccatttttcgcaccgtgaatgttatttttattgaattctgaaccggtttgagaagattagactagaaaaaattgaaaattttgaaatcatgtttcccactcccttctcccaggggtattattttgtaaaaagtctttttttccccaataaacttgtcaaaccccatttttcgcaccgtgaatgttatttttattgaattctgaaccgttttgagaagattagactataaaaaattgaaaattttgaaatcatgtttcccactcccttctcccaggggtattattttgtaaaaagtctttttttccccaataaacttgtcaaaccccgtttttcgcaccgtgaatgttatttttattgaattctgaaccggtttgagtagattagactacaaaaaattgaaaattttgaaatcatgtttcccactcccttctcccaggggtattattttgtaaaaagtcttttttccccaataaacttgtcaaaccccatttttcgcaccgtgaatgttatttttattgaattctgagccgttttgagtagattagactagaaaaaattgaaaattttgaaatcatttttccactcccttctcccaggggtattattttgtaaaagtcttttttccccaataaactttcatacccatttttcgcaccgtgaatgttattttattgattctcaaccgtttgagagattagactacaaaaattgaaaatttgaaatcatgttcccactccttctccaggggtatattttgtaagagtcttttttccccataaacttttctacccctttttcgcaccgtgaatggtatttt

SEQ ID NO: 45106 - DNA, 888 bp, Heterodera glycines
ccccataaatctgggcgcatcggttcggggggactgccccgaaaacaaaaaaatcgatattttcaagtgtccgtttggggtactcacacaattatggggagcaaaaatccaccgcagaattaaagtacaggctatagggaagctattcccgaaggattcggtctccccataaatctgggcgcatcggttcggggggacttccccgaaaacaaaaataaatcgattttttcaagtgtccgtttggggtactcaaacaattatggggagcaaaaatccaacgcagaattaaagtacaggctatagggaagctattccggaaggattcggtctccccataaatctgggcgcatcggttcggggggactgccccgaaaacaaaaaaaatcgattttttcaagtgtccgtttggggtactcaaacaattatggggagcaaaaatccaacgcagaattaaagtacaggctatagggaagctattcccgaaggattcggtctccccataaatctgggcgcatcggttcggggggacttccccgaaaacaaaaataaatcgattttttcaagtgtccgtttggggtactcaaacaattatggggagcaaaaatccaacgcagaattaaagtacaggctatagggaagctactcccgaaggattcggtctccccataaatctgggcgcatcggttcggggggactgccccgaaaacaaaaaaatcgattttttcaagtgtccgtttggggtactcaaacaattatggggagcaaaaatccaacgcagaattaaagtacaggctatagggaagctattcccgaaggattcggtctccccataaatctgggcgcatcggttcggggggactgccccgaaaacaaaaaaaaatatttttt

SEQ ID NO: 45107 - DNA, 845 bp, Heterodera glycines
  unsure (1)..(845): unsure at all n locations
gtattngctctaattatcccccatgggggattatttttcaacctcctcgtagactgggggataattggagactgggggattaagatagagggattatttttcaaacccatcctagactgggggataattggagattgggggattaatggagattgggggataattagagaaaatacggtatccctcaaaagtcggtctctagcagggctgttgcaagtttcgcttttcgcctttcgctttttttgggcctttcgctttcgctttttggctgaaaagcgaaataaaagtacacccctaaagattgggtttttaaaataaataattaatataaacattaaaggagaaaatctatagaatttatcttttaagcttttttatgaaatgtctttaatttggaatttcttcaaactttctgggcgggttgctttctgcaaatcatgtaattataaaaaggattttcctccgcgatcaactggcattccgatttctttctgcaccggctacttcagccgaaagcgagcgtcttttttcaacggcaggattaatcataaatgacttgcgaaaaagcttgacacccgaaaatgctgaaatgttattgtttttgcaccacaatattcaaatttatgatttcaattatgaataatttttggaaaaaaaaattcgccttttcgcttttgttaggcatttcgctttcgccttttcgctttttattttggtttcgcttttttcgcttttcgccttttatttttccctttgcaacagccctggtctctagtgatcatacatgaaaaagggggggggtcgaccaaaatttttgcgaaatggtctggagggggggggggggg

SEQ ID NO: 45108 - DNA, 734 bp, Heterodera glycines
ttcttttttgctgtttttgcttttttctcctttgctcatcaccataaaatgtctaattcgttcgctattttctcgttgtaattattcgttgatttcgatttggcatttttcatctttccatggatttcttttatgatgccaatttctcttttaattggcgacactaaacactgaaaattttattgttttttttactatgagtcaatttcgttttttaacagaaaaaatattttttaattaattaaatatttgtctgctttaatttttaaatatattttttattgtaaatttttacccaaaaaatatataaaaattttaataatattttaaactaatttatttgaatttttaataaatttcacaaaataaattttctgccagttacgtcttttgattttcgttttaaaaaattgaaaattcctttttaaattttattcatcaattagacgttacatattatttctgttagttaatgtatcttccctagaagtattctgtatctttcctttttccgcattcgtcgtctcgcgggtattcatcagatagcaaacaagtcgatttttttagagtgtccgtttggggtactcaatcaattatggggaccaaaaatccgttgcagaattaaagtacaggctatagggaagctattccggaaagattcggtctccccataaatctgggcgcatcgactcggggggggtgccccgaaaacaaaaaaatcgattctttcaagt

SEQ ID NO: 45109 - DNA, 1067 bp, Heterodera glycines
tttgaaaagcgaaacttctgactcaaacaccctcaaaccctagagaagtgtcgttcaaactccggccatttttgctatggtgcgctcttttgccgaaaacgtacgatcccaacgattttttgaaaagcgaaacttctgactcaaaacactcaaaccctagagaagtgtcgttcaaactacgccatttttgctatggtgcgctcttttgccgaaaacgtacgatcctaacgagctttttgaaaagcgaaacttctgactcaaaacacctcaaaccctagagaagtgtcgttcaacctccgccctttttgctgtggtgcgctattttgccgaaaacgtacgatcccaacgagctttttgaaaagcgaaacttttgactcaaaacacctcaaaccctagagaagtgtcgttcaaactccgccatttttgctatggtgcactcttttgccgaaaacgtacgatcctaacgagctttttgaaaagcgaaacttctgactcaaaacacctcaaaccctagagaagtgtcgttcaaactccgccatttttgctatggtgcgctcttttgccgaaaacgtacgatcctaacgagctttttgaaaagcgaaacttctgactcaaaacacctcaaaccctagagaagtgtcgttcaaactccgccatttttgctatggtgcactcttttgccgaaaaaggacgatcccaacgagctttttgaaaagcgaaacttctgactcaaaacacctcaaaccctagagaagtgtcgttcaaactccgccatttttgctatggtgcactcttttgccgaaaacgtacgatcccaatgatttttttgaaaagcgaaacttctgactcaaaacacctcaaaccctagagaagtgtcgttcaaactccgccatttttgctgtggtgcactcttttgccgaaaacgtacgatcctaacgagctttctgaaagcgcaacttctgactcaaacacctcaaaccctagagaagtgtcgttcaaactccgtcctttttgctgaggtgcactattttgccgaaaacgtacgatccctaacgagctttttgaaa

SEQ ID NO: 45110 - DNA, 938 bp, Heterodera glycines
aaatggggtatgaaaagtttattggggaaaaaagactttacaaaataatacccctgggagaagggagtgggaaacatgatttcgaaactttaaattttttgtactctaatctactcaaaccggttcagaattcaataaaaataacattcacggtgcgaaaaatggggtatgaaaagtttattggggaaaaaagactttacaaaataatacccctgggagaagggagtgggaaacatgatttcgaaattttcaattttttgtagtctaatctactcaaaccggttcggaattcaataaaaataacattcacggtgcgaaaaatggggtatgaaaagtttattggggaaaaaagactttacaaaataatacccctgggagaagggagtgggaaacatgatttcgaaattttcaattttttgtagtctaatctactcaaaccggttcagaattcaataaaaataacattcacggtgcgaaaaatggggtatgaaaagtttattggggaaaaaagactttacaaaataatacccctgggagaagggagtgggaaacatgatttcgaaactttaaattttttgtactctaatctactcaaaccggttcagaattcaataaaaataacattcacggtgcgaaaaatggggtatgaaaagtttattggggaaaaaagactttacaaaataatacccctgggagaagggagtgggaaacatgatttcgaaattttcaattttttgtagtctaatctactcaaaccggttcagaattcaataaaaataacattcacggtgcgaaaaatggggtatgaaaagtttattggggaaaaaagactttacaaaataatacccctgggagaagggagtgggaaacatgatttcgaaactttaaattttttgtaatctaatctactcaaaccggttcagaattcaataaaaata

SEQ ID NO: 45111 - DNA, 786 bp, Heterodera glycines
  unsure (1)..(786): unsure at all n locations
taatagatcaggggcttgccgcccacnggcgatcttcgtttcttggtcttctccagcttctgggcgcgcacgatggcggctgccatgcccatgacgccggcggcgccggccatcttgagcagatcacgacgagtgactgacatgtgttgtctccttgggtgcggggatgccgatagcgccggtctgcgccagcttgtcgatagccgctgaatcataccccagcgatttcaggacttcctcggtatgttcccctaatgacggaccgatccagcgggtcccgcccggggtttccgagagcttgggcaccaccgccggcagcttgaccggactgccgtcggcgaactggtgctgctcgatcatgcggcgcgccaggaactgcgggtcggtgaacatgtcggccacgctgtagatcttgccgaccggcacgtcggccgccttgagggtgttgagcgcctcttcgatgccgcggccgtcgcaccattgctggatggcgccgtcgatttccgcgacgcggcgggcgcggccgtcgttgcgcaccagatccgggtcggaggccaggtcgtcgcggccgatggccagcatcaggcggtggaagatcgcgtcgccattgccggcgatgacgatgttctggtcgtcgcgcgtggtgtaggtgttggacggcacgatgccgggcagcgcgccgccggtgcgctcgcgcaccacgccggcaacgtcgtattccggcaccaggctttccatcatgtgaacaaaggctcgtacagggcgacgtcgaccatctgcccctgc

SEQ ID NO: 45112 - DNA, 1366 bp, Heterodera glycines
  unsure (1)..(1366): unsure at all n locations
tgctgctgacgtttcgctcgttcaagatgtgcaaaaaagtncaattctgttaagcaaaaatgaaatgatttgaattcatattttcattttaattatatattttatttttttatttaattcttcattgctctccncgaaagaatttggcccaattttgaacattagccagattttcttctcttgaattcgtattttcgccatttttctttaccattttgtgccatccgattgtcgttgaagcgttcaatccctctgcgtatgtttatgtcgccgttatgattgtgctgtacacgaccaatttgatcaacgcctaattatgattttttaatcggaaatgggcgccttttattgactattttttggcattttctttggccaaaaatatgccaatttgtcttgacccattccaacaaacggatttaaattgaaatttcgattaaatcactttaaaaagagagcaactcacttgagtcaactaaatgagcaccatttgcaacagcagcagaaaagaggaaaaaaacaactccaataagaaaaatgcaaagaaaaagcagctgattcccaaatattcgttgttgagtcgtcatttatttttgtttttttaatttcacaatttgtcggacgggaaaagggataatttaattgctttcgtaagtaatcaacaactaattatgatggtcgatcggtcggtgggaggtgagaatgggtgcgcgaaagatgtgatttattaggctgactaatgagtgaacaaagtaattagatgagagatttcaaaaaaaatatgctgtcctaaataaaataatacgtcaacggataaagtgattggtattttaaatattcttaggtttaatcaattcgaaaacagacatcaaatatgtaataaatagggtcgcaacttttagtgacgaaaaatcccgaaatagttaactaaaatagtgagtaaaaatgccaaaatagtgaagaaatagtgtcaaaaagtccgaaatagtgacataattttcagccaaaaattgagcaaaaataatttttattcactgattgcagttgcaaatgagtaggactgggatttttaagaccaaaaaacccaaaatagttacctaaaaaaatttttaaaattaaaaatttttgccaagaaagtaaatttttgagaaaattttttttcatttcataggagtatattttgaaaaattttagcttgattcttaggggtgtatttttttgaaatttttttaggtcgattcttaggggtgtattttttggtttattgcatttttgttaatgaattttccaaaaaatgtcgaaatagtgacaaaacgccaaaatagtgatttttaactattttagtgacaaaacgccaaaatagtga

SEQ ID NO: 45113 - DNA, 964 bp, Heterodera glycines
  unsure (1)..(964): unsure at all n locations
gatcgcgctgatcagcgcgctgaccagcgctgtggtgcgacancagcgcgccaccaacgcggacgcatcgaaaccggaaccgaataaccaaaagccaggtaaaaaaatgaatttattaaaaataaattaataatttggtccaggaactgtggactcggacaaaggaaacgcggacaaaagccagggagcggacacggatggaaagaacccggaaaagccaaaggaaagccaagaagtggaagaggatggaccaaatccgaaggagtcaacgaaaagccaagaagtggaagaggatggaccaaatccgaaggagtcaacgaaaagccaagaagtggaagaggatggaccaaatccgaaggagccaacgaaaagccaagaagtggaagaggatggaccaaatccgaaggagccaacgaaaagccaagaagtggaagaggatggaccaaatccgaaggagccaacggaaagccaagaagtggaggaggatggaacaaattcggacgaggacgagctcactgaaagacaggaagcggaagttgatcggatgcgtgtccgtgccggtgccacctccatgcatgggcttgacaaacttgcgccaacgccaccgccgagtgccacttctacaaatgccatcgcaatacgagtggctaccactcgctggattagcgatacccattggagaaattgtgataccattcgtcaccaacaaattatgcgagcatcgtacccaatattgttcttgtgggaggggaaggtgcgtgccggtaactacgtacaaggcggacaaatgttgtgacagcaactttgaatggaagtgttgccccgatgtaagtattaagttaaaaagaaattattatncaaaattctgcattaaaatagtcccgggagtgagaaagcagccgtgaaaatttctttgaaaatttgagtgtaaatgccattgtctgttcttgagcccattagtttt

SEQ ID NO: 45114 - DNA, 939 bp, Heterodera glycines
aaagagatagccatttttctgagaattaattcacaatttctgcagctcttagggtaatggaaaaaattttgaagaggctatccggaacggattagcatcggggttacgagatagaaaattgtcctaaaaagagatagccatttttctgagaattaattcacaatttcagcagctcttagggtaatggaaaaaattttgaagaggctatccggaacggattagcatcggggttacgagatagaaaattgtcctaaaaagagataaccatttttctgagaattaattcacaatttccgcagctcttagggtaatggaaaaaattttgaagaggctctccggaacggattagcatcggggttacgagatagaaaattgtcctaaaaagagatagccatttttctgagaattaattcacaatttccgcagctcttagggtaatggaaaaaattttgaagaggctctccggaacggattagcatcggggttacgagatagaaaattgtcttaaaaagagatagccatttttctgagaattaattcacaatttccgcagctcttagggtaatggaaaaaattttgaagaggctctccggaacggattagcatcggggttacgagatagaaaattgtcctaaaaagagatagccatttttctgagaattaattcacaatttccgcagctcttagggtaatggaaaaaattttgaagaggctatccggaacggattagcatcggggttacgagatagaaaattgtcctaaaaagagatagccatttttctgagaattaattcacaatttccgcagctcttagggtaatggaaaaaattttgaagaggctctccggaacggattagcatcggggttacgagatagaaaattgtcctagaaagagatagccatttttctgagaattaattcacaatttccgcagctctt

SEQ ID NO: 45115 - DNA, 1244 bp, Heterodera glycines
cgtaaatggtttggtgtaatctttcatagacggtgactttcccataacaaatgaatgaaattagtagaaaatgaaattacaaaatctgcgtcagggtttttgctgtacgccttttgcagaaatcgcagaaaattctcattcagaatggacagtttttcacgaaatcgtcgctcattttcggaagtcatttctgtaaaaaagaaaggaaaaaatacatagaatttataaatgcttttccattttcaatgaacaaattgctcttatatgcaaagtttagactctttagtttgcaagaccatacaaattacaggaccttaaaaattaaaaaatagactttttttgtgtaattttctggctctaatatgaacaatataaattagagccaggcgcgggattttgtgttttgtggaattccagttcgcaaccccgcaaaaattttggggtttgagggattatcccgcgagacctcgaaaaaattgagtttcatcccgctacaggatccgcaaattgatttttttttgaattttacaaacagaatgccaaaaattttctgaataaatttcaaataaaacgaaaaaagcgcttcgcaaaaaagtcaggtgaagagcaatataaaaactctaatttggtggaatggttaacaaatttgaccgtcgctcttcaaccctcagaccccttctaaaaatcttgatcaacccaccaacccttttcatgtattctgccagtccctaaaaagtcgtgatcggaagcgaaggccgtactaatgtttttatggttgattttggttcatttttcgtgatttaaaccgattaaaaaaccatttttttattttccgcgcctagggactattattgtgatgcttagaggtcattagagattgattgcaactagttttaggcggtttttagcggaccaattctatttgtttagaaattatttgcggcaaaaagaagtgtaaataaaaaagtgaagaatttattacattaaaaaaataacagaaaaaaggattcacaaaatatgaattacaaacagtataaaacaaaaaaaggcaggtactgtaattgtgctactatcgactgtattcccaaagtcaaagggcattatttgaacgcgtttgctgccgttctgctgatctattctacggtgtctcagtgctttacgttagtgtatacggtaataaatggtcgtttggcatactgtaactctctctctctctcattctctttctctctctctctcatttg

SEQ ID NO: 45116 - DNA, 1320 bp, Heterodera glycines
cttcacccgcccggcaatgatccgctcggctatgagttttcgtccgagcgttggaatcacaaccgtactgtggagtccattttggtgtcggtccaacttctgctggcggagccaaacttcaacagtcctgccaatgtggatgctgccgtaagtgattgattcgtccgtcggcacgtttttcattgaccatcatcataatttttgcgtctaaatttccagattttgttccgcaacgacccggcacaatacagggaggaagtgcgacggcgcgtggagagggcatcagcatcgacaccgcgagcgaggtcgtcatcaacaccaccgccggtagcgcaaccgccgggagaacagcagcaggggacgccgccacaaccgccggacggacaggggatgcaaccgccgggagaacagcagcaggggacgccgcaaccgccagcgacaccgccgcaagggcaagaagcgccgcagcagggcgaatggtacctttgatgtgacgtgatgccctctgcgtgatgatattattatatacttatgtatgtgtatatgtattgtattgtatgcatgtgtctgtcgtccgaccatttcattaattaatggtctctctctctctgtgttcgtttgccctgcttttgttcgctgttgtacatattatgtgtattgtcattatccaccaattattgtatatatatgtgtgtacatatgatggtgtatcgagcaataaactttgaaattgccttgatcctttccaattatgtatggattttgggctaatactggagaattagtgtcccggcgaaaaataaattaaaaatttaggtcatattcgtcgtcagcgaccctgaaaaccccaaaatacatcttttcaagttatccttacatgaaaatatatatttaaaaaaatctagttgcttgatgaaaatcataggcaaaatcaatgatttttcgaattctggactcagatccgtaatcagtgtattttttattgaaaattttttgcatgtattttaaaaatgctttttcaaggttagagacattaaaatagcacgccaaaaagatagaaaaagaaatacaatttcatgtttattttataataactagggatgggaattttatgtagagtgacgcgggaccgggaattttgggcaaaaccgggaccgggacgtgccgggacctgagaagccgggacctcgatttttcttcgggaccgggagccgggaccaaccaggaaattttaaaaattcataaaaattttaaaaaatttaatttaattttatttcaattgaaaataataaagaattaatttttaattttgttttttta

SEQ ID NO: 45117 - DNA, 1375 bp, Heterodera glycines
  unsure (1)..(1375): unsure at all n locations
atagataataaataatgtaatattagatttaattgaattgttcatgttantaaaaaatcaaattngagcattgactaataatcatttaattattatgactntaattaatagattttaaatntaaaatcttgtaatgttaaaaaataactaactttattttcaaaaattttacaaaaatattaatatattcacaaaaagtattgaattagaatttttttatttgttagaaattattaatcactttttaatgtttgatgaataattctaaatctaaatcatgacaatgaccgcaggttccatgacaatgaccgcaggttcgaagactttctgatgtttatctttctcataaatatattgttctgactatttaaggcaactttttttaattatttttatataaaaagtatgcctattttttgatattatagtaagaaaaaaataattatttaaattcattaatattttaaataattaaataattgaatgggccacatttttatatttaaataataattaaatttaaatgttttatcattgatactttttttggttcgaccgagcacctttaaattcattaatattttgtaagtgattaaaaaaataaataaattccataatggatcttttgatgtgtttttaaattattttgctttttggcaatatttttacaaataaattttatttaaataattgtgtcttttttgaaagttaatattttcttgtttaaaaaaataaatatcaaaaaccttggttaattaattaataaactaatgtttgataataatctgtatttttattctgaattattttttcatatttcaatgaaatataaatgtatttcatgaatatattaatgaaaatatttttattttcttataaattctaatattttaatcggtttcatgttagggttatttaatcatccttataaaacagtaacagattgcttttgcaaaaattccatatttcgtattcattcattatttttcacattacacatttatatacaagagaatttcaaagtaaaatttatccatttaataaatatatttaagttaaaaaaacgaacaaaggaaaaaaggcaaaatttttaattatataattaaataaaaaaattaaaaaaccttataatgcgattttgaaaagataaattcaatcaacaaatgagaacaataaattatatttgtaaaatttgattaattcaggttccgtaaaatatgatgaagaatgagtcaacattgaggcgtgaaaaaaatacatatggcaaaaaccatttatagtaaattataaatattaaatataaaaaaactattctttgaatcaaatgagcgttaatgagaaatttaattaattgatttaaaaaattaaaagaatt

SEQ ID NO: 45118 - DNA, 1095 bp, Heterodera glycines
tttggcaaggtttgttgatataaacaataattttgaatttgaatttgtttatggtttttagagttcacgcgaggtcagtgccccgccgtgccccaatttaaacaataaattttataattacctttgccatttgccctccggcactgacttcctccttttgttccttccctttttgaatttcttttgtgccattctcccgtccccttctcctttcctcatttttctttctcttccccctccattctcacacatttcatttcccttttcctcatcagttttttttttcaaatattttccctttttccttcgttcacttaacaattaattaattaattaattaattaattgttcgttttccgttgtcaattaatcaaatcgtttgaatggcacttaatcaatcaaaaaattataattatgtataaacaaatgatgatgatatttgaggacatttgtgatgatttgaatttaattaaaatacacagagttcacattcattcgtttcttcttttcttttgtttatctttttgatttggtcacatcggagggatttacaatgtgaaaatatatttacaaccaattaaataatagggcaatttcctcttcatttcctacctaaataataaactgaaaattaacaaaatccggttaaaacggtgaaataatccaattttttaacgttgccattggtaaaaacgaaaacagaaacaaattaattgaaaaagattaattgtttaataaataaacaaaaaaataaatatcaaattatgatgggtatctgcaggaacggtaacggggggggggggggggctatagcatttccatatattgagtttattattttacgttttgttgctgttctattctaatttttataagaaattctgcaattctttctcaatattacaagcgaaaaacatttaatgtcgccgcccacaaaaaaagaaaagattttccggcgacgacaattctctgcaacaattagtgaaaacagcagcaatcgacgagttcactttgtgaaaacttttttggaaagcgacggctttgttacactgacgaaccgcaattaaaatttgccatttaatggggaggatcaaa

SEQ ID NO: 45119 - DNA, 884 bp, Heterodera glycines
  unsure (1)..(884): unsure at all n locations
aattcgcgtagcaacagcgaatgttcggaattgaatttttacgaattatttcgaattttcaaaatctccaatttcaaaattgttcattataaaattattattatttgccagttaaaaaattatgcgaataaacacagaagaaacacagataagcatgggacaaattaaattattaatttttttacatattcattctaatttcatttggcaattatcgggtattcatataggtacgaatattgttcgttataattggttgacgttgcaaattctgtaccggtgccacttggttattgtttgaccaaaacacggattgatacgcttttcggtacacagaactgtaggcaattaaattagttaatttatttgccaaataaaaaatagaaaaatttaagtaaatctttaattaaaaaaatgttttggacctggtaaagaaaagaaccggcgcactgctgcaatgccccaatacatagaagatataaccagcgggacgagcaatgtggtaaagcgtaaatgcactcaaattgaaccacccgaaaacaaagttgaagcaaatactcatcttnaaaaataaattttttaaataattaaaaatattttataatattgaganntttaaaacccaaacatactgcaatggttaagatgagattgatggacataattaaagttactgaacgaatcaaccgttttccttgtaagtccgttaaagctaaatgtcaatttggtaaatgaaattgtcataactttattctaggactttttacatattaataatgcacaggtttttgagaaattccataaaaaatttacaaaattttagaaggttttttttgttgtatttttgggtaagattttgccaaagaattaaaaaaacatttttt

SEQ ID NO: 45120 - DNA, 1528 bp, Heterodera glycines
cttcacataaataaagcagtccgtcgagcagcgtgtactttgtggacgtttccttcaaattttgcgcctgtcttggatcgttcgggaaaattttcttcttcaaaaatgcatatatgtgcttcatttcactttcttcggaggcatggctccatgcttctcttttctccacaattgatgcttcaacttcttccgctgtcaatacttttatcattccaattaatgctttgtcctcctccagtggcggttcggcgattccttcattgtttggttgaaatgagcgcgataaaaggtctgcaatcacattcatttttcctggctggtattctactttcaacataaatctcgaattcaattacatgagccatttgtcgactcgcgcatttccagtctccgccttgcttttgaacatgggcacaagagatttgtgatccgtgaggactctcgtcggcagcattgttataaactgagcaaatttctttgctccgaatctcactgctaacgcttctaattcagttgcggcataacggctctcatatttactgcattgtcgagaagcgaaataaattggtctcaatttcatctcatcgtcgtgttgacataaaatagccgaaattccaactttgctggcatcggtcatcatgataaagcaacgcgatgggtcattttacgctttttcaaagttggggaagtacaaaattacgtctttcaggactttttcttttaggctttttattgcctctttttccacttcaccaatggaaaatttgacattttcctgcaggagtttaaaaagtggtgttgcattgtaattggctgcactttttcgacgtccatttttattccttctcgagttagaatatgcccgagaaatggcaattcgttggcacagaaatggctttttgaaagcttcaatttaagctctgcctcacgaattcgctcaaaaaccagtgcaaagtgctgcagatgagtttcgtatgaatcggaggcgattaatacgtcgtcaatatagacaaagatgaaatcatttatgtacccatcgaagagatggttcatgaatcgctgaaaggttgctacagcattgcccagtccaaatagcataactgtaaattcatgtagcccaaattcagtgacaatgccgtcttttcaacggaatcttcatccattcgaatttgccaataacccgtcatgaaatcgagggtcgtaaaaaaattccggcctccaagcattagaagggtgttgtcgatgtttggtaaaggaaaactgtcttttctggtgaccgcgtttatggccctgaagtcgacacaaaatatcaacgttccgtcgcgttttggcacgagaacgatcgggcttgaccatggcgaatgggatgggcggatcacacctcgttgcaaatagtcttgtaacatggccgcgactttctccctgtaggcatatggcacaaaacgcatcttacagcgaattggttccgcctctcccgtgtcgatttgaggtttgatcaggattggttttgtcaattcggcatcactaa

SEQ ID NO: 45121 - DNA, 893 bp, Heterodera glycines
aacccgctttacacggtagacaacgagacatatctccacctttttcgagaaaatttgctcgaaataatccatcaagcccaagaaaattcaaaagttaacagggaaaagatgaaagagtactacgacaaacgaacaaatgtcagcaaaagagacaagcacaaagtcggggaccgatgtatggtcctttacccaggagcaaacgcgcgatccccgcacaaaaagttgctttggaacaactacggtccatacaaaatcgttgaaatgagtacttcttcggcaaaattggtacccgttgacaaaacagcgtcagaacctataaatgtacctttggaacgattggtcaaagttccaagtgaaatcccgaacgtttcaactctccctaagggcaagaacatgtataagaatactttgaaggctattttatgtccaaatgattggtctgaaaaaggtggccagaacgacggggaaattctagaaagagagcaaaattcaccaaaaacagtgtttcaattgaggacaattgaaaatttagacggcggaatggagacggacgacttttgcgaactgagttggctaatgagttgccaagggaaggaccatgaaaagtgcgacaaattgacgtgcagtgaacttgacccggtcgtggatgcctcgtcagagctcggaatgacttccgttcgttcgccattacaagcgcttttgactgcatttctgttgaaatcaaacgccgcagtctcagcttcatccggtcgcgatttggcagagctcattctcgactctgaacctggcatggagttggtgatctacgaaggagaaagacgggacaatgtgcgaagcggcaatttcccaacaaagcgaaagtgtcgaggaaatttggacaattggtgcaaaaa

SEQ ID NO: 45122 - DNA, 775 bp, Heterodera glycines
tgctgttaatgcttaatgttcattattctgtatcaaactatacaaaaaaattttagaccaaaaaaaagcgaaaaaatttcaaaagagtacgcttttagactagcgccaaattttctttaaaaaatttttctcgcatttaaaaaaatatatctatttgaatttttttttttcttattttaggagtgaaaatggtatgggggaacggcggggagggaaacaagctagctgctgctcccaagaatgggccatcgccggtcgtcggagaaagggggcagggaggagacggacgcccagccaattcattcattctttcatgccattgttcgcttctcttttttttgcgtggactcaagccgccggaaatgttttttatgggaatttgtgtaggggaacaaaacaaaacaaaacacaaataaaataagagaaaatttgaaaagaaatgataaggaaagagaagagaagacgagagataaaaatgtaaagaaaaatggccgtggagagaaagaacaaaaagagaaaatagtaaataaaaggaagagagagagagaaaaacaaagaaaatagaataaacgaaatagatgggagaaagggcgagagaaagagaaaacaataaggaaaaggaagagagagaaataaagaaaaaaaatgagagaaatttgaaaataaaaaagggagagaatgacgagacgaaaaaatgtaaaagaaaaatggaagggctctaggaaaatccgacacaagcggcagggacggtcccaggattttggcttgggggggg

SEQ ID NO: 45123 - DNA, 714 bp, Heterodera glycines
atggaaaaaattttgaagaggctctccggaacggattagcatcggggttacgagatagaaaattgtcttaaaaagagatagccatttttctgagaattaattcacaatttccgcagctcttacggtaatggaaaaaattttgaagaggctctcaggaacggattagcatcggggttacgagatagaaaattgtcctaaaaagagatagccatttttctgagaattaattcacaatttctgcagctcttagggtaatggaaaaaattttgaagaggctctccggaacggattagcatcggggttacgagatagaaaattgtcctaaaaagagatagccatttttctgagaattaattcacaatttccgcagctcttagggtaatggaaaaaattttgaagaggctctccggaacggattagcatcggggttacgagatagaaaattgtcttaaaaagagatagccatttttctgagaattaattcacaatttccgcagctcttacggtaatggaaaaaattttgaagaggctctcaggaacggattagcatcggggttacgagatagaaaattgtcctaaaaagagatagccatttttctgagaattaattctctatttcagcagctcttagggtaatggaaaaaattttgaagaggctatccggaacggattagcatcggggttacgagatagaaaattgtcctaaaaagagat

SEQ ID NO: 45124 - DNA, 979 bp, Heterodera glycines
  unsure (1)..(979): unsure at all n locations
aaaagtcccagaaatagctatttttctttccataccttctgntagagctcgagctgctctttccantgtcttatcccggtctcgatccgtgcgactcnnacaaagtttatggagtgaaatgtgaaatattgttttcaccaccaaggcattttttctgaaaacccggattcaaaaatctggggtttggtataccgtttttagaaatagcgtagaaaacagcttcgatatcaagaaaccaagtcaagtccagaaaggaatattttaaaacgatttcgttttgttttggcattatgataccgaataactttcggaaattatggaaacaaaattggagaaattcgaataattttttgactgcaaatttttttccttttttgaattgggttcaaaaaaattttaagagaatttttgattattaatttgaagtcttgaatttatttgacaaatccaagacttaaaactgggagaagcaaggggctgtggctggggcctaaaatttgggccacattggagaattaattctgatttctgaaaaagtcccagaaataactattttttctttccataccttcttgtagagctcgagctgctctttccaatggtcttatcccggtctcgatccgtgccgaactcacaaagttatggagtgaaatgtgaaatattgttttcaccacaaggcattttttctgaaaaccggattcaaaaatctggggtttggtataaccgttttagaaatagcgtagaaaacagcttcgatatcaagaaaccaagtcaagtccagaaaggaatattttataacgatttcgttttgttttggcattatgataccgaataactttcggaaattatgaaaacaaaattggagaaattcgaataattttttgactgcaaatttttttccttttttgaattgggttcaaaaaaattttaagagaatttttgattattaatttgaagtcttgaatttatttgacaaatc

SEQ ID NO: 45125 - DNA, 864 bp, Heterodera glycines
tccagaaaaaaaaattaaaaattattttatgtggcgtaaagtgaaaaagtaccgaaaaccttcggtccatttgttttgctgtgcaatcgcgcagcaaaaagaattctgacatttgtcaaatgctttaacttttagcgtgttcgcgttctcaccaacaggtcagtcattgtcaattagcagctgcctaatttgtaagtgaacatcaaattattgtcgatttgttttattggctgacttatagatcaaaatctgaatttttatacaattttccaagaaaaaacagaccaaaccgtaaatttcaaggattttcaagccctgatagtctaaacagcattaaaattaagaaaaacagtcttttagtttattaggagcattaattctgccgtttggataattgatgattttttcaaaatttactgactgtcgaatttcaaaacaatcactttctatcacttattatgatgctgtttagcgattaaagattgaaaaaacttaaggcgcaaatgtcggggcatggtttttagcacagcttgatgcttttaaggttactttatcatgctttatttttgcatttcggattttttgtgcttaatgcttaggcgccctatttttgaggcgcaaatgtcggataacctttcttacttactactgctgttttttgttaattaactgtcatttttcactgctgtccccatatctttcgaggttcgacgactcggacgacgtgcgctcgatgagtcagctgcagaaggaagtccgcgccattcaggacgcgtccaccggcgcgacgccggacgtcgtccgatattatggcctctcgttccatgaggtgagcagaatgtaaaacatttttctgacccattt

SEQ ID NO: 45126 - DNA, 800 bp, Heterodera glycines
aaaattggacaatggaaggaatgggttaacattttacaaatcggcaatgttttttctcttcaaaaggcatttggtccttttgcgtaaattaccgtactcattttccccatttttggattacggtaagatactgtggagtggggctgcattcccaaccaaacagttaaatggtgttgggcgattcgcccagtggtccccgcccgcgttgctcacttcgtgcgcctccgctcggcccctgccctgctcctcctcctcctcttcgtcctcctcgctctcttcctcctcctcctcttccaactcctccccattctcgtcttcttcctcctcctctttctcctcttccttttttatcgttcctcccaaatgggccaacattttctccaactccgattggagctgcaaagtgtcactgttcatttgtcgttctcctttcttctgctccttttcattcacttcgctttttcgttgcttctcttccttcacaaacattgagctgaaacagaaaagtgaagaagaaatgacaaaagtgagtatttgcaagaaaagtcgaaatggcaaagaaaaatgccaaaaaatgaattcttttgctggtcgattaagtgaaaaggaaatgcaaaaggaagggaagtgatgcgggggaggggaaggccgtataaaaggcgaagagttgggggattggacgacggatgggattggccggactggaaaggaattaggaggaggacaaggcacatttggcgatcgatcgccgccaaaaggaaaagttgtgggagcagaaggaagatgaatgggggcgggga

SEQ ID NO: 45127 - DNA, 1387 bp, Heterodera glycines
aagtaaaaatcgtaattacgctcaaaaagcttctcaaacaattttagcgcttccaattccttctacaatcgcctttatacatcccattatgagcgctaaaattatcagagtgccgaaaatcgcatgtgatctaagcctagcaaaaaatggtgtaggtaaaaatcgtaattacgctcaaaaagcttctcaaacaattttagcgcttccaattccttctacaatcgcctttatacatcccattatgagcgctaaaattatcagagtgccgaaaatcgcatgtgatctaagcctagcaaaaaatggtgtaagtaaaaatcgtaattacgctcaaaaagcttctcaaacaattttagcgcttccaattccttctacaatcgcctttatacatcccattatgagcgctaaaattatcagagtgccgaaaatcgcatgtgatctaagcctagcaaaaaatggtgtaagtaaaaatcgtaattacgctaaaaaagcttctcaaacaattttagcgcttccaattccttctacaattgcctttatacatcccattatgagcgctaaaattatcagagtgccgaaaatcgcatgtgatctaagcctagaaaaaatggtctaagtaaaaatcgtaattacgctaaaaaagcttctcaaacaattttagcgcttccaattccttctacaattgcctttatacatcccattatgagcgctaaaattatcagagtgccgaaaatcgcatgtgatctaagcctagcaaaaaatggtgtaagtaaaaatcgtaattacgctcaaaaagcttctcaatctattgtatcgctttcaaccgccggccccccaaaaagtccaatttttttgcaaaaaattgtcccaaaattgcaaaaataggtatttttaggaaaaatctgttaacaaattgcaaattttcaaaaaaaaaattcctcgcggctcctaatggcatcgtcgcccatcccccttctggctgttgcctaaagtttttttgaaaatgagtgccgcaaaaaatggtggtgaaattcgatgttgagacgggtgcgcaaaaatttcggttaaaccccctcccccttgtcaagtattttaaaccagggcttccacaattaacaccaagcccgaaaaaataagattttaggctcaaaaataagaacattttacaacattttttcaaatcagttacttttacaatttattcgatcaaaaatgtatcaaattttatatttttagtctcacattatcaattttaacaattttggggaggaaaatgcaaacttgtaaatttcagtacattagggatcaaaagatcaaaaaaatttgcgtaagaactttaaattttttgataagatagtgacattatgccataaaatttcaaaattataag

SEQ ID NO: 45128 - DNA, 1325 bp, Heterodera glycines
ccccccctcaactaatagagaaaaattttaatgatgtaccttttaagcggcacaaattattacgagagcaaattttgtgatacatttaaatgtttttttttattataattaaaaagtgggaaagggaaattaataatttcattttaaattttaaaatgcggctttagctgtgcacaaaaattgtttaatttattaaaccatttaaatattgctcttgcctttgaattgtttaataatataaaaattttaactagaaaaaataatttaattttttttaattttaatttttttcttgaaaaattcctcttttcatttttgcctaattgaaaataaaactcctatttaaataatttgtgttttttaatcctatcagtcgatttgtatggcaaaatttgagcgcattaaaaataaatccgttccctggtaataagttactgtaaaatttacttattttaaaattatttaattttctctgagatttgagttggcaatttgaaattttaacactgacattttgcaggcattttctagtgatgggggacaagagtgcttaagtgtaagcagaatgcgtacgcgccgagaaaaatgccatattttgatttatgccgttgcattttccacatttgagaccgcttgaaattggtcagtaaaaataattcaaatttccaacatttttgtttttgtagtcattttgcgattattcttttaagctgctgatggtgccaaaaatttaattttgtgtgcaagtggtgccaaagtcggtcagctgctgatggcacattatcacgtaattatcatttggcacttatgaaatacgtggctttaatatgttttcgaaacaactgaaaattcaattttttaaatatttgtttttggattttttttgcagactgaatcaatttttttgataatttcttaagaattattattttttatagtctctgagttcgtcactttttaaagtaggtttaaactttgaactttatatctaatgaattaatatttgctctgaaattaaacataatttttgctataaatttattaaaaactgaaatttgcaggaatttcgctgatttgttaaatgatttggaaaagtgatggtggacaagagtgcttaagtcaagcagaatgtgcaccgagaaaaatggcggatttggatttatgccattgaattttcccgccattttacaccgtttgaaattggtcagttataggccaaaagaattaaagtaataatttaaattaaaaaatagtagtaaaaatatttttgttattaacctttatttaattactttcaattattcagtcaatttctgatgcgcaac

SEQ ID NO: 45129 - DNA, 1062 bp, Heterodera glycines
  unsure (1)..(1062): unsure at all n locations
cttgcatnngcgctgcaggtcaaaaaactggtttataaaaaaaaaatcttccaagaaatccttttgaaaaatttaatccaaaaaaacttaattacggatcaaacttacggaaaaatcaatcccaaaaatccgtaatgcgtaattaagctcagccctggtcctggcgcactcccactgcgccaatcttataatctgtgcgaaatcccattttattttttaaactttttttcagtggtcattgtgtgcaatattttccatttggctggtgctcagcacattggccgatgaagaaacatttggccaaccgcaagtgtactactcaatgatttcacgctacaacagcgacattgtgataatacttaactacgtgctgttggcacttgttttactcaccatgatggccaacattgccatcatggtacagaaccggaagatgcagatgcgcagtcggaaacggtaaacaaaacaatacttgaaaaattgatcagaggcctgttcaagaacaatcttgacaaaaaaattgttatcaataggggcctagtcgtttcctaaaattgccagtttggataaaaactgcaaaaaaaatctaaaaaaaaaatatattttttatttcataaaatttttatgtcagtttttgaaaaaattataaatataatataaaaattttaactatatcgcaattatctattattgtactgcttaaaaaatactggtgagaaaaaattaattttgtaaatgtcggtatgataattaatactagttgttttctaaaagtctgaaacgtccatttggcactttttgaggaaacgtacatttagtagcttttaggaaacgcctattaggcactttttagtaaatgctctggcaaatttataatcatttctttgtcagatttgccaatgccacggtgtcgccatcgtttagtcatgcccaaatggcattcggaataaacttccgcaccagcaccagcaccactttcacggatgaccaaaactcgtatagtttgagccgtgcctatcagctgaacgagaacattgtgacgctgcagcttttcctcccact

SEQ ID NO: 45130 - DNA, 932 bp, Heterodera glycines
tgttgtagcgctgaataaagcattaatagtgtgtttgaaaccgcacgaaaaatagttattgacaaaaaatggctatctctgaaagtcacgattaaatccctacggtgaattggacaccatcttttgtcttctgttgtagcgatgaataaagcactaatagtgtttttgaaaacgcacgaaaaatagttattgacaaaaaatggctatctctgaaagtcacgattaaatccctaccgggaattggacaccatcttttgttttctgttgtagcgtgaataaagcactaatagtgtgtttgaaaatgcacgaaaaatagttattgacaaaaaatggctatctctgaaagtcacgattaaatccctaccgggaattggacaccaacttttgtcttttgttgtagcgtgaataaagcactaatagtgtttttgaaaacgcacgaaaaatagttattgacaaaaaatggctatctctgaaagtcactattaaatccctaccgggaattggacaccaacttttgtcttctgttgtagcgtgaataaagcactaatagtgtgtttgaaaacgcacgaaaaatagttcttgacaaaaaatggctatctctgaaagtcactattaaatccctaccgggaattggacatcaacttttgtcttttgttgtagcgctgaataaagcactaatagtgtgtttgaaaacgcacgaaaaatagttattgacaaaaaatggctatctctgaaagtcactattaaatccctaccgggaattggacaccaacttttgtcttctgttgtagcgtgaataaagcactaatagtgtgtttgaaaacgcacgaaaaatagttcttgacaaaaaaaggctatctctgaaagtcacgattaaatccctacccccaggaagcatcaacttttgtcttttgttgtagcgctgaataaag

SEQ ID NO: 45131 - DNA, 1028 bp, Heterodera glycines
aattaatgaaaaagtcagaatttcgaaaaattttaaaaacaacaagcgttggcattttttcaggttaagttagtcctttacaatggagaaggcctgcaaaatttggagagattatatcgattttagtgcgctaggttcgatgaaactttttaaaatataagcctaaactttttggcctgtttaaaaaggaattaaaaatttttaaaatatttattcatctcccttttgatagaaaaagcatcagagagccttatttaacttttaattaacatttggtgcgtttcagagcactttctgaaaaaatacttatgaattaattttgcaaaaaataaataagtaatgaaaaagtcagaatttcgaaaaattttaaaaacaacaagcgttggcattttttcaggttaagttagtcctttacaatggagaaggcctgcaaaatttggagagattatatcgattttagtgcgctaggttcgatgaaactttttaaaatataagcctaaactttttggcctgtttaaaaaggaattaaaaatttttaaaaattttattcatctcccttttgatagaaaaagcatcagagagccttatttaacttttaattaacatttggtgcgtttcagagcagtttctgaaaaaatatttatgaattgattttgctaaaaaaataaaatagtgaagctttaaaaattaataaaaaattttaaattcagaattactggagttagcatcatagcagtgcttttccttgtctttttgatgccctcgcaaaatctggttcgcttctgatcagtttataaaaaaaaagttaagcctaaaatttttcgcatatttaaaaagcaattaaaaatttttagattttttattcatctccctttttgatagtgaaagcatctgagtgcctaaaataacttgcaaataaaatttggtgcgtttcagagcagtttctgaaaaaaatatttatgaaattaattatgcaaaaaacaaaataaataatgaactctcttccttaatatttttcctgcaccgaa

SEQ ID NO: 45132 - DNA, 684 bp, Heterodera glycines
gagatatccattgttgtgggataacctttaaatataaaaatcttctgagaaataatatggcgattgtacacacccctcggtatcatacgcaagcgtctgtggtgaggtataaaatttctcaaaaaaagagatagccatttttcggggatagagtataaatttaaaaattccctcaaaaataaaaggtctattgcgcaccgccctccctatcatgctcgagagcatttgtatgtgtataaaatttatcaaaaaaagagatagccatttttctgggataacctctaaatataaaaatcctctgtgaaataaaatggcgattgtgcacagccctccgtctcatacgcaagcgcttttgtgaggtataaaatttctcaaaaaaagagatagacatttttctgggatagagtataaatttaaaaattccctcaaaaataaaaggtcttttgcgcaccgccctccctatcatgctcgagagcatttgtatgtgtataaaatttatcaaaaaaagagatatccatttttctgggatagagtataaatataaaaatcctctgtgaaataaaatggcgattgtgcacagccctccgtctcatacgcaagcgctttaaggggtataaaatttctcaaaaaaagagatgccccctggtagatagagtataaatttaaaaattccctcaaaaataa

SEQ ID NO: 45133 - DNA, 1031 bp, Heterodera glycines
gtgaaatttttgatggcaaaaaccatgtattagatttgtatagtgtagtatcttgtttactgtagtttcgataccattcaattgtttgcgtactgtcgaatatattccaatttcaataactgtaattttgtttatctcattccttaaggcataaatcggtgtctgttgctaataaaaattattgttggaattgttagtacgcagaaatttccaaggacgtccttgaaaaagtatattagccagcgcctagttatttggcgccaaggtcttaatttttataggttgatcaaaataatttatacgtatattaaaaaatgcaaatattttaaatcagccctatctgacaaatgaagagcttgtcggcaccgccggactcaaaatgtacttattattcattcagctatgtactttaaatatgggacttagttttttataggatttcattttttcaatttcataaattattttacaaataagatttcgtaaattatgaaattttgaacaaagtcttcttaacaaattacatttaaaaaaattaaaatttttcctcggcggtgtctacaaaacccctaattttctcaaaattgactcaaaaaacaaaatttggtcatttttggacaaaatctattaacaaatcgaattaaaaattacaaaattttcccggtggcgcctgtcggcaccacaaaacacagcttttgttcccattgaattaagaacacattttataattcaaatttctatatgttgaaagcttccaatattaagtcagttaaaatttttagatttttggaatgttgaaattcagtaaattggaatttttttttaaaattttatgtatttcctgttttgacgggggaccatcggaacaaccctacttaattggaattgaaaaatttatgacaacttccgctatttttttttattatgtcaatgacgtgtacattctgtcaatttttttgaatgcgcaaatataaaattataaaaaaaaaacatgtattattatttgtatatttattttaaatttttttttt

SEQ ID NO: 45134 - DNA, 998 bp, Heterodera glycines
atttgtgtagttttaaagctgcatccgatggcgtttcagattttgaaaatttcaaaattttcgagctaggccccctcgaaaatttttcgtttttgaattttattattttttgcagatttttcccaggaaaacggagaccactttcaagcaaccgtttttcgagctctatcgattggtggcatttttgaaaaaatttcaaaattttccggaaatagaaaaattttccggaattgagctccccatttcagtttgaggcttataactcgtcaggcgttgattttagcggaaatttgtcttagagcatttttgtagaaaattttaagctctatctaatgtactttatctcatgtttttaccatgagtttaaaaaaagttataaaattaattgtgattttgaaactcaaaaccataggggggaccccatggttttgcatttcatgaaaaatttttttgctcctaaattagccaaaatgcatttttatggcctaatttatggtgctgaatacgtatatacgctttattttgcgtttcagactttttggaaggtggttaaaattttttgaaaaatcgtcaaaatttgagccccggaaaatcctgtgaaatttcgaaaattcataaatctcttcgtttttggtcaaatttagtggaataaagctttaaaaatagagaaaaattgggagaattttatgagatttatttggaatttctatcttccaaaataaaaaagttattccagaatttctggaaaaattcgatttttcagaaaaaaaatcagaactcccttctgaaaaagtattttataaaaataatatactcaaaaaatccgcaattttttgctctattttataaattttaatttagcttattatcacttttttgaaaaaagttatagaaataaaagtgattttggcattcgggaccaaaggggtgtaaccatgatttttgagtggaaaatttttttcaccataaaatcttccgaaaaataggattttaggggt

SEQ ID NO: 45135 - DNA, 1263 bp, Heterodera glycines
tttttttgaatttagtgaaaatccgtaattaggttctctccttaattgttttaaataattaaacttatcacttatgaatatttttaaagtttttaatttttaaataattttgttacatttgtgaaatttttgattatatgtatagcattttgtttaaatgatataatattattaaaaaattaaattaaattctaattaggcatttttaaacaattaaattttattctacaaattgtttaataattcacatttaaaactgagaatattaaaaaaaattatccctgtacatacaataaactgaaatctgagcaaaaggcagtcaataccacacaaaaaaacttctgatcagtaatgagtaataaatgcttcatctcttcccctccccaaaaaatattacgtgaatgagtgatcaattgctttccactggcattaaactcgcatttggccaacatatccaccgaatcccccgaggggctatgtgttggattaagctatggatggatgaatcacacaaatccgcacttcttcaactgacgattggatggatttggtttctgtctcggctcatctccgaacctcctctctcccatcaatccattcatctttctgtgccacagggggacgaagagatgaagccgcttcatccattcactcattcattgccttggcccccatcgggccaatgctttggcggcgaacaaatgtttagttgagtgggtctccctcgctccctccctgctgctgttgcttgctcagggccaacatttgctggcatatccgaggagcgtatgatggcccatgaaatatctgcggaaatgcctcttccaaaacacacccatcccaaacttttataatggcaatgatcaaacaaatgatttgcttttgaatttttacgtttgatcaagttttttaaataaccctcattaaagcatttaatttttttgaataggttatttcggcttttaaatgattgggactacaattgaagaaatttttatcttctattttagttttaaatttttctgtttcaatcgttttttttttgaattaaaaattttatttaaaattattctcaaaaacaatttttttaaatttaatatttcattttttaaaataaaagataattcttaacattttctaaaacttttttttctaaaatttttgttttctttgaatttaaccgcaatcactgaagagtaacaggtgttcttcccatttcccattgctcccactctcccaccccattaaaataaattttgatgt

SEQ ID NO: 45136 - DNA, 1660 bp, Heterodera glycines
atttgagagctgaattaccgcggctgctggcaccagacttgccctctcatagatactcgttaaagggtttaaattgtacccattccgatgaccggcctcataagagatcggtctcgttatttctcgtcactacctcctcgcgttgagagtgggtaatttgcgcgcctgctgccatccttagacgtagtggccatttctcaggccccttctccggagtcgaacccttatcctccgttacccgtcatcaccatggtagtcagatacactaccatcgaaagttgataaggcagacacttgaaagacacgtcgccggtacaagaccgtgcgatcagcttagttgttctgagtcaacactggacgcccggagggcgcttggttttgtggcgaacaaatgcgctccgctctggggagattggagctttggtgcatgtattagctctagaattaccacagttatccaagtaagaagtcaaggtcaagtaaattatagctggtgtaatgagccgtacgcagtttccctgtctggcaggttaaacttacacatgcatggcttaatctttgaaatgaacacatcagttcaggcaggatcaaccagatagctgctagcgagcgttgccaagcgccgctattacagccgtcttgtaaagacggatagtttcagcagaaacaactccgttcagcgcaagcgtgcgcatgggcagcgaaggagacagagcaagtggtaatgacacagcgctggccaggcatccgagcttcccggacttgggaagaaccatctcgccgctggacacagctccgagggcagtgcacaggcactcacacgagcactccggatttcccggttaggacacttcctcaggccaaaggccttcgggcgcttatgtctcgtgttttttcgaatgcaagcacactggtccccaggcaaggagttccgatccacgaactcatagggcttgtcaaccatggcaatacgccactcactcgtataccaacaccacccaccaactttaggttcagcatccccagtgctgagttccccacagcatttgtgccttaggccacatttacacaagtcaattaactcgccaaatttctttaacacacagacgagctgcatgtttattcatttcgacagctgccaatcgctggagaaactgaggccacgacaaaggtggcaccccagcagcagccatcaccgttcaatgccgagcacaagcgcaagcaagcacttgaacccagacggccgcgctccccatagcgaaatcgcatcttttttccagccataatatcgcaaaaacggcccaaccaccacagtcacccacgccaaccaaccaacgcaaagcacatacgactaggaactttatacaaattttaaaaaagtaatattttgtatatgcatttaatcaaatttctactttctttataaatgttagctaattagtcagcgtctatttattttctgtaaaaatttgcctctttatttaaaattaaattatatataatttcatgaaataagacactaaatgtatagagaatgaattaacgtggtcgattggaataaatggacaaaaaagcaaagtcaaagacaaaaccttaaagcaataggcgattggaataaatggacaaaaaagcaaagtcaaagacaaaccttaaagcacta

SEQ ID NO: 45137 - DNA, 1447 bp, Heterodera glycines
  unsure (1)..(1447): unsure at all n locations
cccgttcgaggccgcgaagcggcctaaaaatcccacattttcttttaaaattccaaatatcttcataacccatagcttatctaggtagcgaagctcccaaagcgcgcaagcgctttttcccagctaaatagccgacggttcacgcacccgctagttactatatatgttatattgacaaggagtttcgtctgcaaaaacaaaatctcccggccgaaggccgggagcgccctgaaagtagtggaagggtcttacaactttttgaggcgcatccgggaaaaatataggttttccggtccaagggccaactgagtaccagggactgatttctcattttttcgtgcgtttgacggcccataactttttttctaaatcccgattcaaaaactttccgctggtaggaacctaagttgaagtgttgtctaaaagtcaaaaaaaattccaggcctctacctatagtaggaagggctgcagaaaataggagaaattcagtaccaactttgtccacttcagtcccaggtgaataccgcgtcagcgtttgatctgagcgagggggctccagcggacttattgtagagctttgaaagctcgatttttccaaattttaaaatttcgaaaattttcaaaaattttcgagttaggcctaaaaaacgtttttttggtttttgaattttatgattttttaacgatttttctgggaaaaacggagaccacttccaaaacatcatttttcgagttctatcgactggtaatttttttggaaaatttcggttttttcccggaaatagaaaaaaattttgggctgagcgggacatttgagtcctgggcccataactcgtcaggggttgattttagcgaaaaattgtcttagaacatttttgtagagcttttaaaatgctatcgaatagtgtattatatggccggaaattttcaaaaattttcgagctaggccccctagaaattttcggaaattttttttgggttgaaaaagagggtgaaaaatttttttctgggtattttgaaggtgctgagtacgaatatgatgtctattttaagtttcagaatttttggaattttttaaaaattctttattttttggcaattttttggccctcgggattttggcctaatatttgaaaattcatagctcacttcaatgtgggactattttaatgaaataaagctttaaaaatggagaaaaatatggagaattttatactatttatttcaaatttatatctcaaaaaagaaaaaacttattccacaatttctacaaaaattcnaattttcanaaaaaaattcaaaactcgnttctgaaaantcactctagaaaaataaaatactacaaaaatccccaattttttnctctattaaagaaattttccttcacctttttatcacattttaacctatgtgggaaaataaaagtgattttgggattcgggaccaa

SEQ ID NO: 45138 - DNA, 937 bp, Heterodera glycines
agaaattcttcaaaaagtcgttcctccgcagattcggggaccgttttcctattgctagagacatcacgcgctcaccataaaaatgtcgaaatcatttttcgaaaatttatctagttcgactcaaatctgctaatcgatttcacggtgtacaggatgtttgtcgaaacataactcgtcaggcctttaagatagacctgccattgctattcctcgcaaattgtgcagtctagtcagcccaatcgattgctattcgaatggtttggggtcgttggcccaaacaaaagttgtgctacttcttgcaaagaagacttagccaactgtaaacagcaagccatccaaatgcttcaatgtaaaaaaaaattacatttggatgcaacctttatttttcctcgcctctcttttcgaaaagaaaagctattagcaagcgtgtttggaccaattctaaaacaaatcggggtaattaatttaatctgactttataagataaatgggaatttaagcgaaggattcatgcaaaataataatctatagaaattctctaaaaagtagttcctcgcagattcggggaccgtttctataaagctagagacatatgcgctaaccataaaaaagatgaatcattttttgaaaaatttatatagttcgactaaatttgcaaatcgatttatggtgtacaggatgtttgtcgaaacataactcgtcaggcctttaagatagacctgccattgctattcctgcaaatatgcagtctagtcagcccaatcgattgctattcgaatgggttggggtcgctgggacaaacagaagtagtgctacttcttgcgcataagacttagccaactgtaaacagcaagccatccaaatgcttcaatgtaaaaaaaaattacatttgggatggaaccttttattttacctcacctctcttttcgaaaagaaa

SEQ ID NO: 45139 - DNA, 1401 bp, Heterodera glycines
taaatataaaagtcgaaagcgcttagtgtaaaagactcccacccgataatatagtaataccaaaaatcaaatagaaattcgttagtttttttgatactctctaaaaaatacaaatgcaaaagctgcattttatggttgtcatgctgtaagctactttttaaaatgtctagtgctaattgcaaataatagcttaatggttggctcccaaacatgcaaaaatttcaaatgacaccaggtttttgctggatttggttttccaataaagcaaaagatcatgtcgcgccctaatcttgactggtacggggtttgtcgggacgaaattgacccagaccaatctcggaaattaaaaaatatggggttttcccataaaacccgaaaatgcttttacaaaactaataaacaattcaaaaagtagtagtacaaacacacccgagtcgccggggaagaagggctgaccaagcaaaagttcagcaagcactgaaaatttaataaaaccgtagaaacaaaaactttttttaatttttagtttttacctgtgcccgcggaccaaacatctgaaaaaattgcaccctttttatgtgttggtaaaaaatatatgctaaaactacaataatatttggtttgcttgtaccaattttggtcgtataatcggtggcgccaaaaatcagttctggcgcgcgataatacctgaaatttagcagaaaaaatagctaactattttgatttttttgttacgcaaaaacccaaatcttttccctgtggctctatctcaaataaagctgaatcccatccatttttgaaaaatatgagaaattttcggaaaattcattttttgcaattataacgccaaaatgttaactgaccgtgaacaaatgtaggcgacgttcggctcaccctggaccaacgtttttgcggacccgaaatcacaaagctaaaaagtagtgaaaaattaaaaataatttttttttaaatgccccactttcaatactgatgtttgcggattgagcaacaaattctgcggttttatgtcccgatgacaaatgccaatgctgtgaatgtaactaaaaaattgaagggggatgatgggcaataaattaaaaataaaaatgaagaaaaaaatgtaccccaatgcccggaacagttgatacatgtagatctgaaaatgaatcagttaaattggttaaaaaaggaaggtttttatgattttataaattggatatataattgtacccaaacacaatttcagggtaagcaaaaccttggaactaattagcaacacgcaaaattgggaatttataattaccgaattcttgacgaaggtcaagttccttacaatttcgggtaagtattttttaaggattaaaataaagcaaaaatgtaatgaccaagaaaagtctaaac

SEQ ID NO: 45140 - DNA, 705 bp, Heterodera glycines
tttttattttttcgaaaagataatttatttttaaattttacataaaattaagtattctaaattgaaactcttttaaatgtttgataaatatggctataaatcaatgatgcactaaaaatccaacgaatatgccctaaaatataccttaaaaactgaaaaaatgttttttaacctcaaaaaaatgacgaaaattgtgtaaaaatacaaaacatacatcaaaactttggctaaggagcgttttttggacaattgcgaaaaaatttgattttcaaaatttatataggtatgcaatttcgaaatgtttaatatatgctaaaataaaatttacatttttggccataacttttttgaaacttaatcaaatttttgaaattttgcaggctaattgaggacagttagggctatctaatgtgattaagaattaaatttttagttggataaaaaatcgccaaaaagtcacaaaaaagtcataaaaaacgcaaaaaagtcacgaaaagggttttgaaaaaaatagctaaaaagtcccaaaaaaatccaaaaagcatgaaaaaatgcaaaaaagtcgtgacaaattaggcgatattaaattatagaataacattttgatcagatttttagtcagttaattttaaaaataggtacctaaaataggcataaaaaagtgattcttccaacaagtacgaaaaatttcatccaggtttcatt

SEQ ID NO: 45141 - DNA, 929 bp, Heterodera glycines
ccacgacaaaggtggcaccccagcagcagccatcaccgttcaatgccgagcacaagcgcaagcaagcacttgaacccagacggccgcgctccccatagcgaaatcgcatcttttttccagccataatatcgcaaaaacggcccaaccaccacagtcacccacgccaaccaaccaacgcaaagcacatacgactaggaactttatacaaattttaaaaaagtaatattttgtatatgcatttaatcaaatttctactttctttataaatgttagctaattagtcagcgtctatttattttctgtaaaaatttgcctctttatttaaaattaaattatatataatttcatgaaataagacactaaatgtatagagaatgaattaacgtggtcgattggaataaatggacaaaaaagcaaagtcaaagacaaaaccttaaagcaataggcgattggaataaatggacaaaaaagcaaagtcaagaacttatcctacctaatttcatggtggcaacgaggcatttgactcccttaagagagccttccttctcatgtacttgtacctaaaatgttgttggcacaaaaagtaaagggggaaaaagaagacgacatcactcacgatgcaagcggctaacctctcaacatgagcgcagctgtaaaagtctgctctactgtctaacaaccaccctgacccagtaatctgagccgtatacaagccgattttgcgctcccaacattccaccatggtacacgagtgctacgcctttggcaatgcgcgacgaattaagcacgaactatcccgcctgatgctgtggcattcgtgctgcaccgcaagcggcgcataagtattgcctccctacaccgattagcgagaatattgctatcttgactaggcgcgattctgacttacaggcgttcatccataatccctc

SEQ ID NO: 45142 - DNA, 1574 bp, Heterodera glycines
cattttttatggtactgcctattttgcttttctcaaatttgttttttcactatgttatacatattctcaaattccattaagtaggttaaaaaatcgataaaaaagtttcaacttatggtaaatgttaaaatgctctcagaagttcatgtattaatttagcaactttctttctcattaatttctgattcatctttatccttatctctcatgcttgcttaacaaaattcttaatatttctcctaacgccaatttagcccaaaacaaatctgctaaatattacttaatcggaatcgtacgaatattcataaattgagtctttgatcaaaaattacgaataatacaattccaaaaattaaggatatgaaaaagttatatttaataaaaattgtaaaaaagagattcaacgcaaaacacgataagttttcataaacaaaatattttatgtctttaaaagttaataaaatcaagtaatatttttagaaaaatttttaaataaattctgcttacatatttatactaataaatgatttaatgacatcttttaccaatatattaaaataaatgttttttcttttttgtcgataaataattatattttaaataaacagacattaaaatggatcatttattttatcaaaccattcaattgttagttttttgattattaattattaatttccttttgaattgtaatttaattacaaatatttcgttgcatcgtttatttattcaataaaaaggataaattaaaaatcttaagagtaaaacctgttagtttaaattttgaaataataaactttatttaattgatataatatataattattatttttcgtttaaaaattctcaaaatttatatgaattttttgttttatcgtcaattacgctcaaaatgagagtttcacaggaccatttcgatttttattaatgatacgattttttatacaatttttattttcatttattaattttttacattaatgcaatctttttttgcttgctttattaatgtgctttcgaaatatcattttgaaaatgtttatttctttgtttattaaaattatttttgtaacaacttaatatgattcttaagaaaaaatggtttatgaaaaaatatagtttgatattgaaccttttctcgcagaagaacaaatttaaatcaagaatatttttttaataatttatttatttttattccttaaaggtataaatgaatcctttaattgattccgttaactttcaaggctctttggtttagaactactaaaaactaaataataattgtataattggtgaaaatttacaaaatatattatgaaaactaattaaatttaaaataaacgaacacatgttaaactacccgtttttatagctaaataaattgattcgaatacaaattataatccctatactttaatttcatatatgatataataattgtaagaataaagatatttaaaaaaaattaattgtgattgaatatgaaaagttaaaataagaacctttttatttttgagtttatacaaattaacacaaaaaaggacaataattgttaaatctaaatttatttatat

SEQ ID NO: 45143 - DNA, 1387 bp, Heterodera glycines
taaccctttttggtagaaaacacaatcactttacttgttttctgctgacatgagcaataggcccatcaagtgacaaatctacagggacagcatggtctaaatggggacaaataggctttggctgtgcgatttcttcacccaagtcttactcctcgtgctgcgcccaataagcactttgtcatcccgaatgtcataagtcgttgttcggccaaacaaaattcccatcgaattgggcgacatgttcggaagtgaagtgggcactcccgttattgcaccaacgaatacattctgccaatcattcgtctctctttcagtgatcaatgctgatcgggcaaactgtcgttcctcaacatccaacggcaacaagtcggccgggtcaatcccgacaagtgagccaaggtcatagatacgctcgagctaaactttccgttgaaacatttattttgcgatagttccgtgattacaaggctttcttcttgcgtgtcctctttttgtggggtttggtcaattaacaaccgcacattcttcagctctcgccagtgttcctcgacagctttcaaagttcggctgtgatgaaatacctgttggttctgctccaataattggtcaatgtgcaattggagcaaatgttgttgaacatttgaagggatttgccggatcaaatgttcttcctcatgcgaaaagggaattttggattgaattgctcggattttctccttgctgatctgttccatcctttttcttgtcaaagtgcttgtctgttcgttgtaaagcatgtcgtaccatcgctcttcaatttcagccaaggaatagcgcttcgaaaatttcatctgattatgaaccacattcaggtcggaaacctgaaaaaggcataaattgatggggaaaaaacgcaaaacgccttacatgagtgaccgcagcaattagcgcaatatctggaaaatatatcatgtctttttagcattacaacaaaaaatcccagaaaaattcagcgatgccgtcgtggataatttagaaatttccggcttgctaataaaatcgactaaaatccaaattagtttattaatctgagttttcgagagggtaaattcagaaagatgaccaccacccgttaattacagaccatcctcgacattccatcgtttaagtgattcaacggacgaaggacatatcgggacaacccttgctccctcgccatttggcatttgaacgtttgtctctgggaaatcattcgtcatggcattatttgctccttttcctgctgctgtggtcactttcctcagtttgctacccgttttcccggaacaaatggtcgatttccttttacgcggtgcttcttgaacacaaaagcaattttcatagtacaaaattcattttaccttgcggg

SEQ ID NO: 45144 - DNA, 898 bp, Heterodera glycines
aagtgtacaacaaatatgtggcgccggtccctcccgagacagcgacgattgggtgtttaacaaatgagacgaacctatccattggtgttaacaaaaacagtgctaaaagggcaattaagtggcgattgaaatttaaaaaaatatttgtggccatccaaagaaagacaccaaaagaaacactttggaccaaggcaaaaaagagtacatacacaacaacaattcggagacaaaaaatatctgccaggaaaaaagcatcgattcagacaagctttttggcctcgaaaaagcccttcaagtggcgcatttgccaagcaccggtcaaaaggaggacaatcgtttgtccgacggaccaccaaagcacgcgactctgaaaccgaaaaaggcaatttaaagcgtgaaggcaggaaaaagcgaatggtaaatattttggcaatccgttcactttcttgtccccgttcttacgttggtactttcgctggtctgtcggaaacgctcttcgcgatagcgctggtaattctgctctttggtgatttgttccacttggtccaacaattgccgcacacgcaattgaagttcgttcaatttgtctttggctgccacctcaagttttttttttgaaagggattattaagtgactcgaaaaatcaaagtaaaaaaacaaaatgagattttttgggccctttacattgtagccccaacagataatattaaaaatattatgaacccgaagaaacaaaaattgctatttccaaccaaaattcgttcaaatttactggcaaaccattttcccaccgatctcgatgtcgacttgcgcgaagcctttttctcgtcagtggtggtcgactgtgatataattttttgattttgcgaaaaatgacctatggtaaaaaccatcaaa

SEQ ID NO: 45145 - DNA, 1314 bp, Heterodera glycines
gatgccgccggactctacaaaagacatttaccggtgtaaatttaaaattagcgcgcaaaaatttacgccaattacgctatttggcgttatgagaattttgtctaacactgggcttgacccatagtgagaaagttataaacgaaaatgatcagcaattacttatgtgattggtaattgcctaaacgctgcgattttatatatttcaacttctttagactttgagctgctctaaaaccccggataacaaattttcatggttttttatcacaaaaaaattttgcaaaacaaaagggccctcccttattgtttttaataaaattcaaaaggttcttctttaaagtagcgcccaattttcataccaatttaaatactaagtattatttatttgtatttatttttaaaggaaatggttaattttatgaataaattacgtggtgaaaacgaccaaacgatcaaacaacttcgttccgttattgccgaattaaaagatcaagtggccaaccagtacgttcgcattgacgaattaaaagatcaagttgccgaccagaacgtgcgtattcacgaccaaaaaaaggttttcctcacaaaatcgctaagagtttattggattcttgaaatttaggagattcgaaaactaagggaagacaaccaaaaaaatgcaacatttttccgttctacaaaaggcttgttgtgtgaaatcaaagggcaaaaccgtcggatcaactcagcaatggcaatgttcagagaacaacactttggttctgagacttgccaggaacatccatttccattggtcggaaaatttatttttgcttttataataatagcatcttatgtgccctgataatttgtgtcggtgtcggataatgtcacttccaaatttaagggggggggggcttcaatatcccactatgaaaaaagcaatacagccaaaacttcaaaaatagaagaatttgcacccaacaggactggtcgttcaattcggtccgcggcgtggtgaccgacttgaccaacaaacagcgttgctctctaattgaagcattccgtgctcgcatcatttccaaggaagattggatggtttgggacgatgtcggcggacgggaaattgagtttatggaggcagaaaaaatgcgcattgtgagcattgaggaggacttttacaagacggacccgaacagtggtgaacgcgtcacgctggcgaacgcggcaatgtttcaaaacatttggccaatccgttgcggaatgaaaaaagttagtggttttcactggttagatttccgaaaatttgggtttattttaaaatgaccatccttt

SEQ ID NO: 45146 - DNA, 1387 bp, Heterodera glycines
  unsure (1)..(1387): unsure at all n locations
attcaatctaactaaataaaccactaattacacaattcttcccataaaatttaaagctatctatttgcatataaggtcaatttaatatttcttttgcattttatttgataattattatattatctatatttccataattaagcaaatagtttaattcgaaagtaaaacaatgaaaatattattgaggtctgttaacattcttaaactgtgtaaaattagctgacaatgataaaattgaataaaattaataaaaactaatttattaaaatcattaaatttgataaatctaatccaattactttgttgtttaaacaactaaagaaaattaaagcatttcgttttatttcagtaaatgtaaaattaatttaatacattaacattaaaataaatttaaactgccattgaaagaagtcaaaaaatgagaatataagtaaaaaagcttgtcactctgtgcatgttttatttcatttttcttacctttttcttaatttcagtcgtactgtatcatcaatgaaaaaacggcttgacagctaatttttgctaaatatttaaagaatacaacatagttaaaatttaatacaacaaatgcaatattttgaagtgttttttagagatgattttttaattatgaattatttttataataaattctctgaatttaatgctcggattaaaccatggccaatttcgataaactaaatggtgattagtttacctttgtttgaagttattttattataattattttatcagtatgacatattatttttcagaataaaatatttcattattgttttttacttatttgaaatttaattccagtatattcttctattactaatgatttctaacatattattatgtaatttcattttaacatgtaattgattaagtttggtctaggaattattatggacaatctttatctaattctcaattatttttttaagcaattcacttctcatttttaaattattattgtccaagcttttcatagcattcataataattattttcttcaattaatgctttaaatggttaaaacagattgtaatgaatctggcaatttatattatgacattttttaattattctatttcatacaatataaaaatttttgaattttatttatcgtttttatcaggacacaaattttgattaatagattaattataggtttctattgatattataatatattttgatcacgtcaccgaaggacacttggatgaaactgatcttaaatgngttggaatagaacaatctaatctttgcttcattntatcgcattactattaattattttatttttatctctaacattattaanncataatttatttatttataaaaaataaattatttgttttttataggaaaatgtttt

SEQ ID NO: 45147 - DNA, 563 bp, Heterodera glycines
attcaaaaattccattttttttctaacgcggcgcctatcgcggtaagggatgaactccgtctagccattccgtatcagcaaagttcaaaaatctatctttttctttgttgataaaaccagcaaaacagtatcattcaactttttttttctataaaaatggcctttttgtctaaaatctattacatatgaaatcgcacaaaaaatccaatttttaccgctggtgcctgtggcgccgccggtgaattttcttaaaaactgacttaaaacaaaaattggtcacttttagacaaaattttcaaaaaatcacactcaaattcccaaaaaaaaatttcccggcgacgctaaggcaccgccggatccttccgcaaaggaattaaggaaaagcgcaccgcaaaaaaaaactgttttaaaaagcaaaaattcgtcaaattcggtgttgaaagccccctcgcaaaattggccgctgattccccccccccccaagggcgtaggcaggggcggggatgaggtggacaaggccccaccccctgaaaccaaaaagtaaaaattttcagaaatttttt

SEQ ID NO: 45148 - DNA, 1240 bp, Heterodera glycines
  unsure (1)..(1240): unsure at all n locations
aaattatatagctatttttctcctcaaaaatcgccgaaatcgaccattaaaattgtctcttttctctatttttttaattgtttttgttcgttgtgcgctatttttatataaaagtttattttgccattttccctatgagatttaacaaatttataagcgctttgctggtggcgtagaagcattttcggcaactgtgaactttgcggtgctaaaccaaggccacctgccacctaacactaacaaatatgtgaaccccccaacaaacagccaaggggcggccgagacagggttcagtggtcgttactgtggacatgccaccattagaaatgaattacatataagtaaaataggttaaatggcaaaaataaaccaaaaaaaagaaataaaagcaattagacagacaacgaataaaataattataaaaatgaagaaaaacacagattttttttttttggtcgttttcgagagtgagaaatagggcgtcggaaatttttttgttttcgtttttgtgtttgttttcgtatttggttttttttctctcttcactatcggcagtaattatatggctgtaagtttttcgtaagtttggcattcgacaaaaaaaaaacgaagggtcaaaacgattcatttctaattgattcccattcccatctcagtgccgttgaccaacaaaaatagaggaaatgaggcgaaatgtggacaatgacagtggtgcaaacaatggcgcgaacatcagcagcaacccgaaaattgcccgggatgcggaaattgctcatgttgtggacactggaaatggcgcaaatgacgcgcttggcgacggaatggacattgggcactgcccaaactgctcgtggcattgcaatgtgtgcagtaagcgaatttttctgttctgcattcaatttcgttcaaacatttctttgattcagtctgtcattaccgcctaatttgtttaatttactatcaaaaaccacaaaacggtcaaatttttatttttttttccctgttatcaatttaatcaatgtttttgggctgattttccactaactaattcaatttgctaccaaacaacaaaataatggtcaattttttttctcttctctattttttttcgtcaaaaaaaaacattgccgccaaaagttcaattccctattgaaaactatacagtacaacaatgcgcggtgcggagaacattgcacnnttgaacgctatatcatacttatcttttactgtaatcgccgat

SEQ ID NO: 45149 - DNA, 1184 bp, Heterodera glycines
cgacgcaattgggagatggatttacagaacagatttcctttatttttgaggaaacattgggactttgcaccaaaatcacgtcccatctcaaaattaaagaaaattcatctcccgttttttgtgcagcacgaccaattcccatcggcgttaagcaagaagtggacaaggaattggaccgtctcatcgatatgggcgtcctgaaaaagaccgactacagcagttgggcggcaccaattgttgctgttcggaaagcaaacggaaaggtacgtttgtgcttcaatttcagcacaggactaaatgccgcattggaaccacaccaccatccactgccacgacctgaacaactttttgcgcagctctccggcgcgaaagtgttttcgcaaatcgacttcaaagacgcatacttgcagatcgctgttgatgagcagtcacgcaagtttttaggcgtaaacactcaccggggtttatttgagtgcagtcgtttagccttcggaattaaaagtgccccaggcatttttcagtgggtcatggaccaattgagtaacggaattcccggagtgcttggctacatggacgacttcatcatcgcctcccgttcaatcaaagagcattatcgaacgctttatcaatttttccaacgaattcaggaatttggtttccacattcaactggggaagtgcaaattcctcgtccagcagatcaaattccttggccaaattgtgacaccaaatggaatcaaaccggactcggagaggacaaaagcactgcaagacatgcctccaccacacgatgtctcaactctccggtcgtttttgggtgccatcaattattatgggaaatacatcaaaaatttgcacgaaattagtgcaccattagactcattgctcaaaaaaggagctaaatgggaatggacacgggaacatcagaaatcatttgatgaagcaaagtctgtgttgctgtcagacttagctcttacacactttctcacaatcatcgtcaccgccgacgcgagcaacaaaggaatcggagcgacaatttcccaccggttcaacgacggaaaagagaaagttttccaacacgcagcacgaactctcaccaaaacggaacaggcctattcccaaattgagaaagagggacttgggctattttcgccatccaaaaattcatcaatttatttttggacg

SEQ ID NO: 45150 - DNA, 659 bp, Heterodera glycines
  unsure (1)..(659): unsure at all n locations
tcaaagtcggagttgtgcttttcagctgaaaaatgaaattaataaatataatnagggaaaatttaaaaataaattttaatacatttttaaaagaagggaaaaagtgacggtgccatcggaaaaagtaaacgaacagaaaaaaagttcggcacggagccgaagcattcataagaaatgcttcatcccaaactgagaataaatttggttgttttgaagaaacagcacaaaacacacagtttcgtcgctgtttaacaaaaggtagagagagaatgggtgaaaggagcatggatttggcacgggtgaatagtttaggagggacccaagtgtggggcggggggaagagaggggtcaaagtgccctcgaggggaatgctaagaggggtaggaacaaacggaggatgatgaagaaacatgggggaaaggggaagaacaaccgcaaaagagcaaacagttggagggaaaagcatgaggaaatgcgcaattgaacaagaaaaattggaaggacgaagaaagtggaagaaaaggggagggtgcggatgaaaatgggataaagcaatgctaaattaagccgagacgagaggagggcacacgcccaaacaattgtaattgacggacatcccattcaagaagttaaagagtttaattaatcttctgcgacct

SEQ ID NO: 45151 - DNA, 1347 bp, Heterodera glycines
tttctcccctctctctctctccctttctcccctctatctctctctcttttctctctctcttctctctctcactctctccctttctcccctctatctctctatcccctctatctctctctcttttctctctctcttctctctctcactctctccctttctcccctctatctctctatcccctctatctctctctccctctctctccctcactctctccctttctcccctctatctctctatcccctctatctctctctccctctctctccctcactctcttctctctctcactctctccctttctcccctctctctctctccctttctcccctctatctctctctccctttctcccctctatctctctctccctttctcccctctatctctctatcccctctatctctctctccctctctctccctcactctcttctctctctcactctctccctttctcccctctctctctctccctttctcccctctatctctctctccctttctcccctctatctctctctccctttctcccctctatctctctctccctttctcccctctatctctctctcttttctctctctcttctctctctcactctctccctttctcccctctatctctctctccctttctcctctctatctctctctctatctatctcttttctctctttttcgccctgttaaatgtccgtccgtttctttttgttgtctttcattgtttatttttgtgtttctttgttttggattaattggttctgctctgatccctctcttttgagcgtttggcggcgattgtttggagtgtgtgttttttgttgttttgttttgctaaatgacttttctcccccttcccttcccctcccatctttctttttttaaagacactttaacattgctcaaatggtcggtgggggggggggggggtaattaaaaaataaattaattgtgcttttccacttaatatcccccgcctttcttccctttccctctgtttggcctggcttcacctttctgatcgaaaatgatctccgcacatgcgttttgctgctgattgtccacttcgcagccgtacactgcgcccgttttctgaagtcgccgctgcgccgtctgagcaaatggcgcaccgaccaaaagactgaaaaattaaattggcacattcatttaataattgttgccatttgtgacgctgttttcataaacttaagtgaatttgtgccgtctttggtctctgtaggcgaagtccaaagaatagccaaacgccgaatgggcgccgggccgacgatggatttgcgcttgtcggaagtcaaattgaaagtgaaacgacagaaagaaagtgaagc

SEQ ID NO: 45152 - DNA, 1041 bp, Heterodera glycines
tattatatatatataataattaacttaaccatacaaacatctttaagctttcatacaaaaaaaagcctaattaagctgcctcaggacataattttgcttttttgcctaattagctgggccaattattggaaaatagttaattccaaataatttgaagtaattctccgaaaaattcaatgtcattcaaatttcgggccgtgagtcttttctgccaaaaatttcaaatttcataaataaaaaatgaatttattttttaaagcatatttatcattaatgattcagcagagtgtctgtttcttaatccgcttatcctccgcattctgagaataatttagcgcaacagttgaaaaggagaggagcggattttttcttaaatttcaatttttctcctttaataagcaattcagaaatgagcaagtgttacggacaaataaattgaagctgcaaatgaagtgccgacttttcatagcaaaattccggaggatgggacgcataataaaattgtgtttatctgatcttccgcaagtgcaatctcattaggagggaaaatggcatttttacttgaatgccacgccctcccctcccgcgttcaggaaatggcattttgaaaattggcatttgtaaaaggtgcgccatgactaattgccatagacgaagacgcttcaccgctggaggtcgagcagcgatttgcagaatgggggtttgggatttttttgcattcggccgacttgccatagaaagtggcttaattttgttattgctttctaatggcactctccttttggtatgtgtgtccttggcattccgttgaactttaagcagattgttgacatgagatgccaatgttggcatgggattgtttcgttgtgtgggggtgggaatttaaattggcattcaaagcttcaaaaaagtccattcagtgaccaacaagcatttgaaaatgacaaattattcactatatgtcatggaggaaaagctaatagttcattatctttgtagtcttcgaaacgaattccttacgtttttggcatttcattaaaa

SEQ ID NO: 45153 - DNA, 1009 bp, Heterodera glycines
  unsure (1)..(1009): unsure at all n locations
cttacgatantttgaaacgcaaacaaaaaaaattcttgaccaaaaatggttatctcttttttctcatttttttaccgcaaacttggtaccaacagttgccttctcttgtctggccctatcaaacaatcttacgatatttgaaacgcaaacaaaaaaaattcttgaccaaaaaatggctatctcttttttctcatttttttaccgcaaacttggtaccaacagttgccttctcttgtctggccctatcaaacaatcttacgatatttgaaacgcaaacaaaaaaaattcttgaccaaaaatggttatctcttttttctcatttttttaccgcaaacttggtaccaacagttgccttctcttgtctggccctatcaaacaatcttacgatatttgaaacgcaaacaaaaaaattcttgaccaaaaatggttatctcttttttctcattttttttaccgcaaacttggtaccaacagttgccttcttttgtctggccctatcaaacaatcttacgatatttgaaacgcaaacaaaaaaaattcttgaccaaaaatggttatctcttttttctcatttttttaccgcaaacttggtaccaacagttgccttctcttgtctggccctatcaaacaatcttacgatatttgaaacgcaaacaaaaaaaattcttgaccaaaaaatggctatctcttttttctcatttttttaccgcaaacttggtaccaacagttgccttctcttgtctggccctatcaaacaatcttacgatatttgaaacgcaaacaaaaaaaattcttgaccaagaaatagttatcacttttttctcatttttttaccgtaaacttgaaaccaacagttgccttcttttgtctggccctatcaaataatcttacgatatttgcaacgcaaacaaaaaaaattcttgaacagaaatgtttatctcttttttctcattattttaccgcaaacttgataccaaaagttgccttgttctggtctggccctatcaaa

SEQ ID NO: 45154 - DNA, 914 bp, Heterodera glycines
gctgggaacatttgtatggtacacaatttctcgtacaaaagagatagccatttttctggcatagagaataaatttaaaaattccctgtagaatagaatggccattgctctccgcgcccctctgcccatgctgggaacatttgtatggtacaaaatttctcgcaaaaaagagatagccatttttctggcatagagaataaatttaaaaattccctgtagaatagaatggccattgctctccgcgcccctctgcccatgctgggaacatttgtatggtacaaaatttctcgcaaaaaagagatagccatttttctggcatagagaataaatttaaaaattccctgtagaatagaatggccattgctctccgcgcccctctgcccatgctgggaacatttgtatggtacaaaatttctcgcaaaaaagagatagccatttttctggcatagagaataaatttaaaaattccctgtagaatagaatggccattgctctccgcgcccctctgcccatgctgggaacatttgtatggtacaaaatttctcgcaaaaaagagatagccatttttctggcatagagaataaatttaaaaattccctgtagaatagaatggccattgctctccgcgcccctctgcccatgctgggaaaaatttctcgcaaaaaagagatagccatttttctggcatagagaataaatttaaaaattccctgtagaatagaatggccattgctctccgcgcccctctgcccatgctgggaacatttgtatggtacaaaatttctcgtaaaaaagagatagccatttttctggcatagagaataaatttaaaaattccctgtagaatagaatggccattgctctccgcgcccggcggcccatgctgggaacatttgtatggtacaaaatttctcg

SEQ ID NO: 45155 - DNA, 1060 bp, Heterodera glycines
  unsure (1)..(1060): unsure at all n locations
taccaaactttgcagggatactccccggtaaaggactttcttacactgaaatgagcgccgagctagctggctcaaaacaattttcgaaaatctgagtctttcgtttttatttattttttgcaaaattaattcttaaatattttttcagaaagggttctgaaacgcaccaaattttatttacatgttagtttaggcactctgatgctttttctatcaaaaagggagatgaataaaatttttaaaaatttttaattcctttttaaacaggccaaaaagtttaggcttaacttttttttcagaaactgatcagaagcgcaccaaactttgcagggatactgaaaggaagagaaataacctattttaaatattatctagtcagttcatttaaataatttttatccaaaaaatttttttttgggttttcggggcagtccccctgaaccgatgcgcccagatttatggggagaccgaatccttccggaatagcttcactatagcctgtactttaattctgcgttggatttttgctccccataattgtttgagtaccccaaacggacacttgaaaaaatcgatttatttttgttttcggggcagtccccccgaaccgatgcgcccagatttatggggagaccgaatccttcgggaatagcttccctatagcctgtactttaattctgcgttggatttttgctccccataattgtttgagtaccccaaacggacacttgaaaaaatcgatttttttgttttcggggcagtccccccgagccgatgcgcccagatttatggggagaccgaatccttccggaatagcttccctatagcctgtactttaattctgcgttggattttgctccccataattgtttgagtacccccaaacggacactgaaaaaatcgatttttttgttttcggggcagtccccccgagccgatgcgcccagatttatggggagaccgaatccttccggaatagcttccctatagcctgtactttaattctgcgntgaatttttgctccccataattgtttgagtacccaaaacggacactgaaa

SEQ ID NO: 45156 - DNA, 855 bp, Heterodera glycines
gtttttatttgaagacccaattgaataataataaaattaattaattaattaagtttttgttgcgctaatatgatttggcacgggcgatcattgaacactccatttggtttttttaaatatttttgtttatttattcatctttggatgtttacaatatcctccttctcatcctttgactaccataaaaaagttttctttcatcattctttacaaatatttattttccccgaatgatcaacatttaaatcattacttttttatgttgcatatttttgccacagggaattagagttcgtcatttttgaaattttaatactaggattcgataattaaatcctgggttggattcagaataagaaaatctgttttcgcggcctcctgtgattttgatgcatttttcgaaaaattgcctgatcaaggtcgaaaaatcatttgaaaagtcctgacagggtccggcccacagatccggtctctctaccggaaaaccctattttttcctgctgatgctgaagaaaccgacaccgcgtccacttacgaagcctccgccccaaccgccgccaacgccgcgtccgcaaccagcatcgccggctcaacggccgacgccgcgtccacctaagaagcctccgccccaaccgccgccattaccgcatccgccaccggcatcgccggcgcaacggcggcgccgcgtccgccgcccaatcttccgtcggcgcgtcccactcacccgccgatgcagctggccggtgccagaagcagattctgagccaatttcaaagataatcgcattttagccatcaaacatattttgaccgatctgttgttttggcacattgccaaaatatggaaattcaattt

SEQ ID NO: 45157 - DNA, 1021 bp, Heterodera glycines
agcaaaaatcattttttaaaattttattccaaatttaaaaatcaataaaacgcttttttgaggcgcgctttttccaaaaaaactttttgggaagggggggaggcaggcgccgccgtgaaaatttttgaaaatttgattaaaatttgttgacagattttcaccaaaaaatcatcaaattttgtgatttttgtatcatttttctaatgagaaataagagttttggcgcgccgctgagaacagtttttcatcaaattactaaattttgcgattttgggccattttctaagaaaaaataggagttttgggggcgcggcggtgccgataggcgccgccgtggaaaaaaattggaaattttgatcatttataaacagtttttcactgaaaattagccaatttataggtaaaattttgaaaaattttatgggactttaatccaattcttaggggtgtaaaagtcgcatttcgcgccaaaaagcgaaatgcgaaaagcgaaatgcgaaacgccaaaaaatgcgaataatgcgaaaggcgaaatgcgaaaagcgaaacctcggcccatccctgttttgtacgtatttaatgcttttggttccgtcggtcactcagtttatttattttttttcttttcggttcaagaagtgtaaaagagtgtttttattatatttatatttagttaaaaattacggtttttatttcaataatgatttttttaattcaagtctgaagttttattaatcgggattttaaagtttttgtttattttaaatgaaagcattatttttttttattttttttccgaaaatttattattgtaatcttataaaattatttatctcacaataatttttttgacttgcaaactgactattttaatttgctttttcatttagaataatattttaactttaaatatccagtttttaaaagagaatattcagaaagaaaataaaggaataacaccgacacatattaaaataataaaaagaattcgtaaaaacggggcagttaaccaataaaccgg

SEQ ID NO: 45158 - DNA, 1133 bp, Heterodera glycines
  unsure (1)..(1133): unsure at all n locations
tgaaaagttaagcagccaaaaaatgcctggacatggatggacctaagcaagttctgaattgtacaatttgtatttcaatntagcaattcgaattatttttattttattcattttcncaatgaatcatcatcatatgtaaatcattcgctccattcatttacattctctcatttcgtattaacacagatttatttgtgttgggctactcaatcattttgaattcattatttttttttatttattactttactgaaccaaaataaaaatttattcttttttctttctttgaacaaaattttttttgacacaaaaaattcttcttaaaatgacctttcgcccgcttcaactttgtgctgctgcttcgcttctcatcgcctgcttcccccacttttgttctttaagtttttttttttttgcattttttgaatttaatggaatttttcccaattgaaaagctttgaattgcgtcatagaaacaaagggatattttgaaataccattcaataagacagaatgcttcagcggcgctatttttgccaccaatgcaattgcactgtcggtaaagaaactctagaaccaaaaaaattctcaattgacagtaaaatatttaaacgcttttggaaataataaaacaagaatttttgcttttttgaaaattacgaatttttattgaaattttgtaagaaatggagaaattttgggctattaaaatataagattttgggactaggtcgtttcgtcgctgtcgtttcggcgcttttggaatataactttttttcgttgttaactaaatccaacattgttggtatgattcgaaagtccttcacatgctctattatccttataaaaagtgaaaagattttattgcctgtaaaaaattaattaagaaaaactccaaaaatttcgaattttttgttaattttcatgataacttttttggtaattgtctaattgtttctaaacataaatctttcgaatgatgatactatgattgctagctagattggttaacaaagaaaaaaattatagtccaaaaacatgggctggcgctaggtatgtgcgagagtctcggttcacgattcccgactcgggaaatttctcagatttttcgcttctcggtctaggttcccggg

SEQ ID NO: 45159 - DNA, 1240 bp, Heterodera glycines
  unsure (1)..(1240): unsure at all n locations
ccgacacatcggagcagccaaccgcgacgaacacagcagagacgggagcacatttcattgcgaaactgatcaattcattaattgatgtgtcatttgacgctaattgggtgctaccaatgccaataacaatttttatttttgctgttgtttttaaattttatcaaaattcattttcatatttgcttgtgtaccacctggaacggatatggattaaaatagatgctaacagccgtgagatttcgttttatttttagctgtttataaccggctttagttgtaagaaatctgctgggctcctatttatcacttgttaaatgcaatgccgacaaaagttaaattaaattattatcattctcttacatagaacgaatgaaggcatttttggctcaccatttttgtatttattttctttttgttgtctgttgttcattgttgtgtaaaatataagtgttataaatgttatattcctttttttgcaaattttccacaaccttagttaattggttggcttttgtgagttttattgaaaattaaaaactgaatttgtttttaattctctttgttcgatttgtttggagatgatttcccgtcgcttcttcgcctcatcctttggcgctgatcgttttgttcctacgactaattgcattgatgggaaagcgtttgacaagttccaggaacacttttcgcgcattgacaagcttgtggtgatgacaggcgccggcatttccactgaatcgggtgggaatggcacaacaattaacacaatcaagcgatttgcactctgattctcttgtgctctcttttccacattctctctctctccactcactaattttcactaattactaatggcatttcgccgttttcctctcttccgtcatgatacagtatttttatatttcccctttaggcattccagactacaggtaagtcgttgctacaaaagtttttttgtttcaaaaaattgtaaacatctattcgggtggtatctaagaaaagttcaaaattgtttttacatgttaaatttcaaaatcgacaggtgggaagttaaattaccaattagttaattaccgatttacaggtccaaactgtcgggtcgctatcgcgagcatcggccgatcacttaccagggtcggtcatttcttaccgtacaccaaatttcactcttttttggcactgtcatactgtatgttaggcgcttagacattcttgagattgnaatactgaaattntgtcatct

SEQ ID NO: 45160 - DNA, 875 bp, Heterodera glycines
gtgcttctgacgggcgctttttaaacgccaattcgccatagccttcgatcacttcggccatttcttcggagtgctataggattttgcttagggcgggggaaggggggggggaatggcaattttcattttgccaatgtttgttctgtcctcacctaaaaaagctcacggaaaatgcgtcagtaatacatacagtattcctaaaatattaaattctgtagcatgaagtacggtgttacaattggtctaaattatatttttaaaaacccattgcaaaatttgctagttcattttttgaaagctttaaaagtttcaataaattttttaaaatttacccaactccccaataaaacaaaaattctgtaattgtgattttaattcatcaaactaccgtatctcttttttcatagaaaaaatctggtttactatcacattttccactgacccattatttttcagttacgcctaaaaaatgcaaacatttttgtgcagaatatcaccgttgggcgccgggtgccaagaaaattttcagaaaatttgtggcactgcagttacatttgaatggttgtttcaacgcttggtggagaagtttaagtgcccggatgagccagagccccagtggattgtggagaaaatgaacgaaattggggacagaggtggacaaatgctacttttttgttggccagtgccactccggcatggatataacaattttccttggatttaggattttctgggctttattagcggagggtataaaaactgttttctttcggccaatttttcggttttttttttgtcttttttctaagaaatttgcgaattttattccctttgggcgcgagggagtgcgtaccccataccgttatctccccccc

SEQ ID NO: 45161 - DNA, 1369 bp, Heterodera glycines
  unsure (1)..(1369): unsure at all n locations
tttttgttttattttgcccgtttcaccaatgcttccccactgtaatgagtcatcgattctcggtctcgccccaattcttaatatctcgacaatgtgcgcaaaaaattgtttaaaataaattgtcattgtaaccctttaaaaaactgtttttttccgattactgatcaatttgagagtttattacacaaaagcgcgccaaaatgatcaaaaaatgtcctcccctctcttctccgttccgcaaaaaattttgtataatggagcaattaattaattgactaattaattaatgttaattgtgcgcccgaaaggagggtgaaaaagaagtaacataccattaactgctgaacattttcaattagcagcaaacatttggaatgcttaataagtaggagcggtacaatttttatgttctaaaacccaaaaatagtttactaaaaaagaaaataggtgccaaaaaatacaaatttaggggtgtaagatagtaaatttgtttttattaataaatttggggcaaaacgccaaaatacgtctctaatagattttttcaaaattattttatgttttttcataagttcattcattaacggaagatgatttttgatgagattgcataaacattttgtcggtgatgtgttctttattttgaataattgggcctgtctcagcggtgtctaattagggcaactaattggaccaaaaacctgctgttcactccaatcacgttgatcatcatcatcctcttcgattaatccgataacatactatcactttgatcacaccctccctccctgataacctgatccaattaatcaccactgccctcttctaacacgccgatcactttgaacaccagtttccccgcttttctgatcactcctttctcctatcacttaactgatcaattttctcccatctgatcactatactcatcttccaagattaatctaattatcagctcctaatcactttatcagctcttaacacctgtccaactgatcagtcatacttaactgacggaatttttaaaaatttatatttatcttaaatcaaaaaaaaacatttttctcagtccaatcagtgataattagggttcggaattatatgcacatggcatatttttttatttgcatatttgtgcatattttggcatttttcaaaaaaacctctaatagaacggcccccaacagacaaattgggcctttttgacctcaaaaagcggaaaattttccaaaaaaataattttttagcaaaattttcacgaaaatattgaataaataaattttctcaaaaaataggttaatttatggtcaacaataagcaaaaaaagcaaaattttactttttggggttgatttttcgcanaaaatgag

SEQ ID NO: 45162 - DNA, 948 bp, Heterodera glycines
ccataaatctgggcgcatcggtacggggggactgctccgaaaaacaaaaaaatcgattttctcaagtgtccgtttggggtactcaaacaattatgcggagcaaaaatccaacgcagaattaaagtacaggctatagggaagctattccggaaggattcggtctccccataaatctgggcgcatcggttcggggggactgccccgaaaacaaaaaaaatcgattttttcaagtgtccctttggggtactcaaacaattatggggagcaaaaatccaacgcagaattaaagtacaggctatagggaagctattccggaaggattcggtctccccataaatctgggcgcatcggttcggggggactgccccgaaaacaaaaaaatcgattttttcaagtgtccgtttggggtactcaaacaattatggggagcaaaaatccaacgcagaattaaagtacaggctatagggaagctattccggaaggattcggtctccccataaatctgggcgcatcggttcggggggactgccccgaaaacaaaaaaatcgattttttcaagtgtccgtttggggtactcaaacaattatggggagcaaaaatccaacgcagaattaaagtacaggctatagggaagctattcccgaaggattcggtctccccataaatctgggcgcatcggttcggggggactgccccgaaaacaaaaaaatcgattttttcaagttccgtttggggtactcaaacaattatggggagcaaaaatccaacgcagaattaaagtacaggctatagggaagctattcccgaaggattcggtctccccataaatctgggcgcatcggttcggggggactgccccgaaaacaaaaataaatcgattttttcaagtgtccgtttggggtactcaaacaattatggggagcaaaaatccaacgcagaattaaagta

SEQ ID NO: 45163 - DNA, 1018 bp, Heterodera glycines
  unsure (1)..(1018): unsure at all n locations
aanaagatggttggaccaggcgactttgaagcgcgaaaacatccgcggtttgcaacgagttgtccaccttgatttccatctcaccgccagcgcgtcaattctcgccttggactaaaaaataattaaaaatgtttaaaatttaattttattatttatataaatcgaaagcagagacctgcatgggattttgcgggctcacagtcctcaatcccatattattttttgcaaattgctggatggatggggtaaaaacggttgaatttcaatttgatcctccaaccaaaatctaacagattatatcaggcccctggtaaatccgtccatttctaattcaaaatttgtgttcataccgccttggccaattgccattgtccattcgggtcgcgctggaaggtgttcagttgccaatccgcggtcccacaattgttgcctttcagctaagaaataaattacgataattgatggtaattaattaaaaataaatctaggtaattattgggcaatatttagacggtaatttaaaaaaaattaatcccatttttacaatgacgcgcgaagttcccggaccttcgaagatcaactgctccacctgttgtccatggggtaccttaaagagtataaaaattcaaaaaattattttgaaaatcctgggacctcaattttgaacaggaatggcgttttcgtctccgaaattacattggccagaatttcacagtaggtcatgggaggcggcggcggttgtggcgcttggggcgccacctgctcaaatggggccaacaaagggaagaggaacaggggaaaaacggtcgtggcaattagtaatagcatttgaaattctaattaaatttaaaatttctaattaaaaatatatttttaaaatttttaattccttaaataataattttttaaaggctatgtgcaaagtttaaaaaagttgagttcacaactctgttttttatttaaacaagggaagaacaatcgtggcaattagtaatagcatttgaaattctaattaaat

SEQ ID NO: 45164 - DNA, 1409 bp, Heterodera glycines
  unsure (1)..(1409): unsure at all n locations
tgcaggtcacatcatctgacaaatatttaaaaataataataaatttccttttaaaataaaatatttttaagtttcgtgcctttcgcactttcgtcaaaaaaccgtttgcttttgcttcgtctgtataaaccaattctgccataaaattgtgccaattttttgtgtcgaacagacgcaaattggccgacgtcgcagccaatgcccgcgacgacactccgccattcttcgctatcgtacacatccaattcaaccgtatgtcgtctttccgatacggtagtgatttggtcagcggcggaggacgactgatggtaaattgtgtggaaattgttgggcagcaaaaaaaggaacgaaatgatcagaaaaacggtagcacaactgatggacaagagaacaaagcgaaaagtttgagacaaattaagcattaaatacataattgattaatatctaaaggataaaaaaagtaataaaaatgcaaaaaatagagagagaaaatgggcggaaaaattgaaatgataaaaaagaaaaaagaggcgattttagaaaaaaagagaaaaaaaagattaaataagatttcttaaagcatatttatttaataagtttaaaaatttgtaaaaaattttaataaaataaacattttttgagaatgcaaaaaatgtttagaaaatggaaaaaagaaaaaatgaagaggaaaatcgctcacagaataaattttgtgtttgctttttgtgtattcttagcattattttctcaaatgctcgcggaggagaagaagaaatgattttgaagctttacgtttttttatgagccatcagaaaatattttaattaccaaaaattgaaaagggataattagcaaaaaaaaaaaatgatcgaaacggacgggacgaatatccatcccaacccggcaattatgtagtttttcaaatggcctaattacctcagcttcaaaatttttcacaggcaaaaggtaaaacaggcggaaaaggctaacagaagaaaagtgaacttgtgaaagctaatcaaatattaattgaagaagcaatttcttttggagggccgtggcaaatgaaaataaaatattattccaaaatatattttaattgttacatcccaaaaattaatggctttgtttcaagaatgagtcccgactcaattttgacaaaaactcatgaaaaaggagttcaaattaaacaattccatcagaaattttttttcttacacattttatgataatcggagccgccactttttaaagatatgaaatgataaatgaattttttttatttccgactanactgtttaattttctaataccacacaaaaaggttcccaatcttctcggactccgtttgccgctcacttttggcacttttttcttttcggcacttttttgcatatttttggcacttt

SEQ ID NO: 45165 - DNA, 981 bp, Heterodera glycines
catccatagcctgccggttctcggcacagcaagcactaaataggtgtttgactcacttcaaaaaataattcattacacataagtttcctacagtcactttataaccacatattgccaatctaatttcttgcagattgaaagccatccattgcctgccggttctcggcacagcaaagcactaatagggtgtttgactcacttcaaaaaataattccttacccaaaagttttttacaaccacttattgccaatctaatttcttgcagatttaaagccatccattgcctgccggttctcggcacagcaaagcactaatagggtgtttgactcacttcaaaaaataattcattacccaaaagttttttacaaccacttattgccaatctaatttcttgcagatttaaagccatccattgcctgccggttctcggcacagcaaagcactaatagggtgtttgactcacttcaaaaaataattccatacccaaaagttttttacaaccacatattgccaatctaatttcttgcagattgaaagccatccattgcctgccggttctcggcacagcaaagcactaatagggtgtttgactcacttcaaaaaataattcattacccaaaagtttttttacaaccacttattgccaatctaatttcttgcagatttaaagctatccattgcctgccggttctcggcacagcaaagcactaatagggtgtttgactcacttcaaaaaataattcattgcccaaaagttttttacaaccacatattgccaatctaatttcttgcagattgaaagccatccattgcctgccggttctcggcacagcaaagcactaatagggtgtttgactcacttcaaaaaataattcattacccaaaagttttttacaaccacttattgccaatctaatttcttgcagatttacagccatccattgcctgccggttctcagcacagtaaagcactaatagggt

SEQ ID NO: 45166 - DNA, 213 bp, Heterodera glycines
agcttgatgcctgcggtcttgtcatataacgtatatactagcgggtgcgtgatcttcaaaatatttagctgggaaaaagcgcttcgcgctttcccttcttagctacctagactgtgaagcgattcaaattgatcgaattggttggagagatttttttgaatttttaaaaaattattatggggtttttagtccacatcgaggctcaagacgggc

SEQ ID NO: 45167 - DNA, 648 bp, Heterodera glycines
  unsure (1)..(648): unsure at all n locations
ataggatagaccccccccccccccccncgcccttcaaaattttgaaaaaaaaataaaataataggagactcagaattttgaaaattttttataaaaactgatgacaagctaatgtgataaaacaggttaattcttttcctttcagtatccctgcaaagtttggggcgcttctgataagtttctgaaaaaaaagttaagcctaaactttttggcctgtttaaaaaggaattaaaaatttttaaaaatttattcatctccctttttgatagaaaaagcatcagagtgcctaaactagcatgtaaataaaatttggtgcgtttcagagcattttctgaaaaaaatatttatgaattaattatgcaaaaataaataaaaatttctaaaaatttgatcgtccataaataatttgtaattgatcaggggctcaccaaattttgcagggatacgtatcggaacactacaaatgcttactaattttcctagattttttaaacccggtttaaaattttttgcagacaccaccacttttgcacttaaaaaaatttcaaaaaactttaaaaattcatacacaatattaaatcactctttactatccataaatcaacgcacacaccccttcccccgtcctttttacccctctccaaaatc

SEQ ID NO: 45168 - DNA, 1303 bp, Heterodera glycines
caaaggaaagatctcaaagtcaattaatttttattttctttattaacctaaaagtcgaaaaatttttactcacagcaataatttgcttacaattagtttatttattttttatttatttattttttgataaaatgatccatttaaaaattaatagaaaataagaattaattcaatgtttggccatcaatttctcggatattgtgccaacaatgaaagggcacgccaaaggcaattttcaagtgggacaaaatgccaaacggccaaagcagcaaagaaagactaaaatggaaatcaaaaattaaattcaaaatggaaaaatgggaacaaacgcggccaacgttcgaaaatgcactaaaattccatgcgaaagcgaaaaaaagggggtggggaaacggaaagaatgggggccatgtcaaataaaagaataaaatttaaaataaaatatcaaaataacccattacaaacacaaaaaggacaacttttctctaaaaacaatgattgattaatcgaatttttgacattgccaattttttaaaacaaaaacatcggccaaattggtcaaaagtgactaatgcccttttattttttaatttaataccaaatttattttacagtaattgtaaatggtgggaagcactttcacccgaagtgatgtccaaacattctcatctgatattggtcaaaggcatcattttccgtcatttgtgagtcgaccaaaacaacaaaaataaatccgacggcgaaagcgaaaaagccgaaaatgataacggaaaaggcacagcagccgaatgccaacaatttgcgcaatttgttctttgaacgtcgcccggaaacggattgaaaaatggcgaaacgatcggcggattggcaacctttggcaaaatgggactcacaaatcagcaaaaatgtaattgacatcggacaaagaaattccgaatttggccattcccttaaccggttctatgtattcgacttgctcccggactctcaccgcggcactcacattggctgttatggccaaggcatagaatggtcactttgtctttggccattggaacgaccacagcggccgaagtcggctgggatggttcagtgccgcccgcgtcattctcttttgtcgctcttttggcatttttacacgagggtaaaaagcagccttttgcagtgttttgctgctgtccgtcgttggcattgttgcgcggtgccgtgggagaggaaacataactcggagggggcgaagacggacaaaagtcgacgggagggacggacgggggcacggagtgatgctcacaatcagtcatcg

SEQ ID NO: 45169 - DNA, 949 bp, Heterodera glycines
  unsure (1)..(949): unsure at all n locations
gttcagggcctttctaaatgaaggacaccagaggcccccctgttgcgcaaaggcactttctatgtgttggttcatatggtgactattttttacagacaaaattattggtttcagaacaattaaaattaaaagctgttttaactgagttattttagaatgtgagagtttttgtatacggttcagggcctttctaaaatgaaggacaccagaggggagattgttgcgcaaaggcactttttatgtcttggttcatatgggactattttttacagacaaaattattggcttcagaacaattaaaattaaaagctgttttaactgagttattttagaatgtgagagtttttgtatacggttcagtgcctttctaaaatgaaggacaccagaggggagattgttgcgcaaaggcactttttatgtgttggttcatatgggactattttttacagacaaaattattggtttcagaacaattaaaattaaaagctgttttaactgagttattttagaatgtgagagtttttgtatacggttcagtgcctttctaaaatgaaggacaccagaggggagattgttgcgcaaaggcactttttatgtgttggttcatatgggactattttctacagataaaattattggcttcagaacaattaaaattaaaagctgttttaactgagttattttagaatgtgagagtttttgtatacggttcagtgccttcctanaatgaaggacaccagaggagagattgttgcgcaaaagcactttttatgtcttggttcatatgggactattttatacagataaaattattggtttcagaacaaattaaatttaaagctgttttaactgagttattttagaatgtgagagtttttgtatacggttcagtgccttcctaaaatgaaggacaccagaggggagattgttgcgcaaaggcactttttat

SEQ ID NO: 45170 - DNA, 1224 bp, Heterodera glycines
caaagaaaagggccggcggatgctaaattggggtctttctgagttttgcggaggagaaagaattatgggatcggcgttttacacttggcgaagaagtgaaaaaagaggggagggcgtgcggaaggcgcagtcggtggaccgacgtttggtagccctttctgttgagcaatgctcggaatggctgtaggaagggggaaggaggcaaaaggaaagacggagaaagaagaaagggagggatggaggggaaaaagacggagaaaaggaggaagggacggagaggaaggggaatggctggaggatgcatttgggttggctgagaggtgtgcttgctgctgatggatggggatgaataaatgaatgcgttgtcgggttttgcctggagagtgaaaaaggtgagtgagtgcggtggtgtttttctcctccgtttttctgcccatccgccgatttgactgatccatccgttccccccccccccccctccgtccatccttttgcttatacaattccatggatgaatgtgaaatgaatgaacccttttccttattttgagtttgccttcagtaaatatccaggtactttttcactttacgcaacataaattttaaatttatttttgtatttttctgggacaattattgtccaaagccgattcaaatagacgggaatataataaaaaaatagagattcacagccatttagtgcatttgaaccgtttttggacaatatatgtaaattttgctgaaaatttaattttcgacttttgttcgagttcgggtccgggattctaaataggtggaaatgaatgtcatattcgtgatcaaaacgcccccgaaaacctcagaaaaatacaaaaaaaaacatttttttttatgtggcgtaaagtgaaaaagtaccaatatccattacaaatattcaccagaagtattttttaagtatcattctcatatatgtattgtatctatcattttatgtagattttttttttatttaggttttcttaatatctaatccttaaatattggtttattactttaaagacatccaatttatttcaatgcatttcctgtcaaactttttgccaacttagcaatgatttcgagaggtaaacttttctataaatatgatacttcaatttataaatactaggtcgttgcataaaaaagggcgctttttcaaaatgacttattgtaagacttgattaacgtttgttatgtcttttttgtg

SEQ ID NO: 45171 - DNA, 1099 bp, Heterodera glycines
aatagtgaagaaagagaaaaggtgaagagaaatgtggagggaatggaatatcggtggagagggagagggaaaaagagggggagagagtgaaggtgaggtaagaaagagggaaagggaaaacgagtaaagggtagaaagagaagtgagaggaaaagaaagaggggaaatggagggtgaggccttgaaggagccatttctgttgtaaataatgacgaatttcagttctagcctctatgcagtctgaaggatcccgatggctaaaataaaggatatgacaatgctaaattttcgataatttgcccaaaggatggagagagtgggccatgtcactcatatatcatgggacacaaaaaccaaattatggccaaaggcgtcaattacactatgccatttgaggagagagcaattcaatgattaatgtgaaaggaatttaaaagacggaatggacaaaatgattgatgggacgagaattaggaggatggaacaattttgaattttttcaaaaattaatggagagctaacaaaccgacaatagtctctcatagtccctttttaattaattaattaagctgtttggctttgttttgacttgctaattgacagagccacaaaacagctctccggcggggatggactcgcggcattatttatacggattgaaaccgttagacaaatgagttggcatgggtccaaacggcgccaaatttgtgcgcattggggtttggactgccaaaaatccaatcacattggcggcggaagagcgcctcgggggaaggtcatcgcatcgtccgccccccccccctccccccctcggccccgtccgtctcaacccgctaaagcccctcgggtgccgaccagtgccacttgggaaaaggacaaaaattgaaaggggagagaattggcgaagtgaaggtcaaattatgcctgatttttgaatttttggtccgggacttggaaaaaatcaaattaaaaatgaaaatgagcgatatgataccatgcaaagttagttataagagtgacaattattggctaaaaagcgaccaaattccctcaaccgttcaatttgatggccaaaaaacggattaaaaaacccattccg

SEQ ID NO: 45172 - DNA, 1140 bp, Heterodera glycines
  unsure (1)..(1140): unsure at all n locations
cagaaagtagaataaaaaatggtaattcgcctgagggcataaaaatggaaatgcgtcgcccgaggcgtgaaaaaatgacctatttttactccccacaatgccctaagcacaatttgcgcggcgcaacaccactttctttcgcgttcattcgctttctatgtatgtattcaaaaaaaaaaatcgagtgcaataaaaatgggcaattttttgttgtagaagaatttatcctttttgcaccctctgaaatttttaaaaaaataattttttatgttattttatgcgctgaacacgaatcgtaaaacgtgtgatagccagggattctttttttatgtaagaaaaatcgcaaaatatgtaaataaaatatgtataaaaaatgctaaaatatgtatgaaatatgtacaaaaagaaccaaatatgtacttaaaatatgtaaataaaattttttaaatggtgttttttggaaaaaaatcttcgtaaaggggtgaaataagtacaaaatgccataaaaatgacctaaataggcttagaagcaccctttttactatctcttttttgaaaaaaacgatttttaggggtatattttaaaaaaaaattttaaatttttcatatgaaatttctatcacttctcaaaaatcctaaaaatatgtacaaaaaattgtgaaattttggggtttttttggggacatttaatgaaaatttccttaaaaatcctcaaaaatttcaaaatatcttcgaaaaaatgcgaaaaagtccaaaatatgtataaaaatatgtacatatgtaatatgtagaaaaatcccaaaatatgtaattaaaagtctcaacttttgttcgcaaacacaaaaaagaaagtgtttttcctactaattaggctatggagaatccagaaaaaaaacatgtatttacataaaaaaagaatccctggtgatagctaaaaatgaacggcagattcgtattcagcatataccaaaaaaatttttanattattcttgcatctaattcgatagctataataattttctatattagccagncaatttaaaaaatcttgtttactannagtatatgatganaaaacaaatgtttaccggaccctgtcaagattttcccggaaatcctaatcttggccctggtaatttt

SEQ ID NO: 45173 - DNA, 922 bp, Heterodera glycines
  unsure (1)..(922): unsure at all n locations
ttgaaagagctagaaccgaagaaaatttttttaatttaagcctaaactttttggcatgtttaaaaagcaattaaaaattttattcatctccctttttgatagtaaaagcatcagagagccttatttaacttgtacataaaattttatgcgtttcagagcactttctgaaaaaatatttatgaattaattttgcaaaaaataaataaacagttaaaaactcagaatttctaaaaaaatttaaaatcaattacaattgtcattttttcaggttaagttagtcctgtaccggggagtatgccaataaaatttggtacgattttattgctttttgaaagagctagaaccgaagaaaatttttttaatttaagcctaaactttttggcatgtttaaaaagcaattaaaaattttattcatctccctttttgatagtaaaagcatcagagagccttatttaacttgtacataaaatttgatgcgtttcagagcactttctgaaaaaatatttatgaattaattttgcaaaaaataaataaacagttaaaaactcagaatttctaaaaaaatttaaaatcaattacaattgtcattttttcaggttaagttagtcctgtaccggggagtatgccaataaaatttggtacgattttattgcttattgaaagagctagaaccgaagaaaatttttttaatttaagcctaaactttttggcatgtttaaaaagcaattaaaaattttattcatctccctttttgatagtaaaagcatcatagtgcctaaactaacatgtaaataaaatttggtgcgtttcagaaccctttctgaaaanatatttaagaattaattttgcaaaaaataaataaaaacgaaagactcagattttcgaaaatttttttgagccagctagctcggcgctcatttca

SEQ ID NO: 45174 - DNA, 909 bp, Heterodera glycines
ttacaaattcaaaaaataaataattaaattctttaatgtaaaaatttttttaaataatctacaacaaatcttcagattagttaaaaacattgaaaataacgtaaaaaatcatagaaaaataatttacaccggccggattcgaacctaccgcccccccccccccccacagaagatgactcagaatccccaatcacacagggattctgaggtcttgacgatgtcaaaagtaaaatctgatcacgtattcgtgatcagcggcccaaataacccctaaagacatgtttttggaagattttgggtgaaaaaatttttccactcaaaaatcctggtcacccccctttggtctggaatcccaaaatcacttttatttttataacatttttcaaaaaagtgataaaaatgccaaataaaatttatttaatagagcaaaaaattgcggatttttgtagtattttacttttacagtatgacctttcagaaccgagttatgaatttttttctgaaaaatcgaaaatttccagaaattctggaataacttttttcttttttgtgataaaaaactcaaataaatcccataaaattctcctgatttttctctatttttaaggctttattcctgtaaaattgatcaacccttcgatttgttatgaattttcaaatattaggtcaaaatcccgagggccaaaaaattgccaaaaaataaagaatttttaaaaaattccaaaaattctggaactgaaaacaaacaccatattcgtgctcagcacctcaaaatagcccagaaaaatatttttcacccccatttttgacccaaaaaaaaattctgaaaatttctagggggcctagctcgaaaatttttgaaattttccgggcatatagcacaccgttcgatagagcttaaaattctct

SEQ ID NO: 45175 - DNA, 966 bp, Heterodera glycines
atacgcggcaatttccaagtgaaatttaaaagactgcaaacggcaagttcttcttcagaatgcacttaaatgttcgagagcgcatccgggttatgagccggaagaattggtgagaagggaagtgagagggacggaggaggggccgagcgaaaggccgacggtgcccggatgggtgattggccagtgagagaggaaaagcgacggtgctaagcgagtgcaaatgcaaattacccatcattggacagcataaactcgtcttgacgtcgcctccgacatggcaataaaagccaatggggcaaatgttctgctgagtggctgagcagaagccaatctgtccttgttggtctcgcaaaggcgtgcccacagcacatggatttgctaggcgataaacaattgagccgattaacagtcatttgattaccttggcaaatctgttcgcaatcaaaccgagatagaaaattgttttcgttgccctgaagccctttgtacgtgaaactttggcactgtgccgacggtgcgaagaaaaaccatcggaccaaattggaagggccaacgccaacattcagaggctgttgacacgcatcgacggcagcttaatgagaattgaaatcatcagaatttcgaaaagtcgagtcattaatcgtgcgtgccgattggccatcccgtgcctggtttgttgcagcagatcgtcgttgtcggactgtctccgacatggcaaaattgctggcccgggcaaggagcgcctggcgcggtgctcggcttgcaaaacaaaaattggccggttccaaaggcacacggattgatcgatggcattcctaaaacattcaaagagcaacttacttgcaattcattttctgtagtttggcctctttggccaattttaattgatttaaaaatgttatttggtgagtttttgtgagtggttaatgctttccgtttgcttctccgtttacgctttactttcct

SEQ ID NO: 45176 - DNA, 353 bp, Heterodera glycines
aaaaaatcgatttttttgttttcggggcccctacccgaaccgatgcgcccagatttatggggagaccgaatccttcgggaatagcttccctatagcctgtactttaattctgcgttggatttttgctccccataattgtttgagtaccccaaacggacacttgaaaaaatcgatttttttgttttcggggcagtccccccgaaccgatgcgcccagatttatggggagaccgaatccttcgggagtagcttccctatagcctgtactttaattctgcgttggatttttgctccccataattgtttgagtaccccaaacggacacttgaaaaaatcgatttttttgttttcggg

SEQ ID NO: 45177 - DNA, 830 bp, Heterodera glycines
  unsure (1)..(830): unsure at all n locations
taaaaagcgatgggttaantatgagaattgtctgaccatttcgccgtgggtgtcaatccacaaacgaccaacaatgatgttgtgcacagtcgtgaccaccttttgaaacgtaaagtgcgcctttccgtcccgaaaggacacgtgggtatggccagtgggaatcacgctcatatatttgccacgaaagcgtgaactgaccataaattccttcgggttgataataaataatatggagagagaaggcatagaaccaaaaaagtgtgtccacctggttcaaatgccaattcactccttcaacgtgatgggcagcggcgggcgggtggtgtgagacttgctcgaccagcgaccgccacccgagatcagccctccgatcgaactcgaaagtttcgcccagcaacgggttgaacggtttcgtggtacgtacagcggtggctgaataacagctgacagcaaatgcggcgacataggcgagccgttcgcaaatgtcctgtttttcagcagcccgatcaagcaaataggaatattccaagtcttccgtaatacgctgaagcattgagagtggttcgttgaaattgacctgtaaagcaacgatctttcaaagagacaaagccacaaaaataccggaattggaattcgagtcaattctttgccaatgcaattgcgcataatactccacaaactaaaagacgaaaggacattcaaacagttgattttttaaaatttatttgcgatatatttataaaattattccaaaagaaatcacttaagcccatgcgattgcggcttcggtcggacggacgaccgtcttggaaccactgacagtccaggga

SEQ ID NO: 45178 - DNA, 755 bp, Heterodera glycines
  unsure (1)..(755): unsure at all n locations
gatttccgcgaatttatgcagtataaccgaatcgaacgctgccgaatgcaagcgggagaaactccgggttttgccaaaacaaaaaacagtcactttttgngtctccccctaccccccccccacccatttgtttattcattttaattgtcaatttactagtccaagtacctcaactgaatggaaacccaaaactcaaaaaaaaaaattcgaaattttctccgcttaaaactgaaataaaattaaaccatatacaccaagtaccttaatctggaaagccaagtaccttaaacagtccaagtacctcagcagaaaaaatattttggccaaaaattgtttctaagtgtcaaaattctttttggactaaaatctttaggactttttattcgatctttcgtattttattgataagaccatttttagcgtcagcttgagcagaatggcactacccaattggacaacagcggcaatgaaaccgaaattgcgtcgggcagtatggacacgggtaaattaattgaccttattttcaacgtaactgatacgattggacattttaaactcatttagcacatttggaggacacttttctgatgagcggtgtgcttggccacgaacgcgagtcggacccattgagccgaactcaaccggtggaagagggaaaaggcgagagggaggaggagagtaagctgaactccacctacccgttgccaccccccaggaagagggaagcaaaaaacccaaaaatagcgagggctaaa

SEQ ID NO: 45179 - DNA, 195 bp, Heterodera glycines
taattaaatttcaaaaaatcgtaaaaattaaaaacttgacttctccagacattcaatagctcattcgaaagctctttttaagctctacaacatctatgtattggttttttaagcccgactaatttccttaaagttttggagaaaagcaagtactcgacgaaaaaatcatagacaaaatcaatgattttgcaaaat

SEQ ID NO: 45180 - DNA, 945 bp, Heterodera glycines
atggcacgcagagagggaggattctgttggaacctcctcgtattaaccggagtttgtcccctccggggagggagctttggaataaacagcgaaaatgggtgggaagggaaaggggacagaggaggagcagcagaagtcgagaaattgagggggggattagagccatatttggcaaaaggggatgatgaagaagaagaaaagacggaagagggagggggcaaagggaggggaagagagagggaaaggggaggagagggggggggagagtcatcggtgaccgatgcgatgataatttgctgatgagacgaccattccctccctcgccgtcctttgccaaattcagctttcctttgaccgctcttccgcctccttttgcccatcatttcatttggcgcatttagcagagattgggcgagagagcgaaagacaattgcgtaaggccaattcatcactcgaaaattgagagggggcgggaagggaaagtgccaaagtgccatatgccaatggggggggggcaaagggaaataaaagggaaaagcgaacgacgggcgaaagagtgccaatggaggcaaaagcaaaagtcgaagagatcagaggaaaagccaaagggagggaaaagtgaagggacggcaccagggcaggacgtaattacgtattatggaaattacggccttcttggagttacggattacggatttttccgtaattttgatccgtaactggcttttttagattatttttcgagacaatttcttgtaagattattttttataaaatgaatttttttttctatttttattaaaaggctacccaaactccgatttaatctgacttcttcttgggtattttggagtattatttaacatacataaaggggggggggggggaggctgacaaaaaggaaaaaagggaaatgacgaaaaatttgaatatgttttaacaaaa

SEQ ID NO: 45181 - DNA, 1058 bp, Heterodera glycines
aaatcgggacttctagcttttcatttttaaaaaagcctaattgattgatgcacaaatatcgcattaagcaacgctttacttcatttataatacaaaatatgcacacgaaatctgtgacaaaaatcagtcatttgatgggaagtttacattttgtgaaaagataatgatcagataattccatccgagtggccattgattgtgtttagggctcatctgctgttgatccactgtttgcgcattgcttctgttctcagcccggtctgtttctcgacatggacgcagcacaatttgaaggcaacggtctgaaaacaaagggacagaaattgtaagagtacccccgaatataaaaattggttgacaactcgtccatacccaatttcgtcatctgcgaagccaatggtcaccaaattcggatgaggttcgttgttcaagcgcgtcatacgcaaccaggacaccacgtcagcttcactgaactccgctggacagcgcacaatcttcacgaaggacaccacgccaccacctcgtttcgggtgcacattggtcaacatcgtcagcctctcctccgtcagcatgttcaccatttgttcccttctggtgtagatgaattcgaacgaagtgaacaccatgtagttgaccgggactgacgccgtattgaaggactgaaaagcggaaatgaatgtgatcatcagaacaatgattaaaagggcacagagaaaaaaacgaaatccgtccgtccgtcgatcaatcgatcgatcatcccacacacccaccatcatcaattcgttgacgaattggtcccatcggttgttccatttgagcaatttgtacaccaacggaagacggtcgacgcgcgtcgtgtgcagccacatgtacaagtcacggctcgatgtttcaggagcagcagaattgtcaacggtcggacgttcaggcaaaactgggctgacgatttcgacaaggtttgggcagtcgaagaggaaggtcggcgaaatgtgtttgcgcatcaaggccagttgcttccactgcacgttgaccaacgtgccgagcccgttcttcagcaa

SEQ ID NO: 45182 - DNA, 992 bp, Heterodera glycines
  unsure (1)..(992): unsure at all n locations
gatgtttgtcgaaacatactcngtcaggcttaaagatagacctgccattgctattcctgcaaatatggagtctagtcagcccaatcgattgctattcgaatggtttggggtcgttgtcccaaacaaaagttgtgctgcttcttgcaaagaagacttagccaactgtaaacagcaagccatccaaatgcttcaatgtaaaaaaaatttacatttggatgcaacctttatttttcctcgcctctcttttcgaaaagaaaagctattagcaagcgtgttttgaccaattctaaaacaaatcggggtaattaatttaatctgactttataagataaatgggaatttaagcgaaggattcatgcaaaataataatctatagaaattctcaaaaaagtagttcctcgcagattcggggaccgtttctataaagctagagacatatgcgctaaccataaaaaagatgaatcattttttgaaaaatttatatagttcgactaaatttgcaaatcgatttatggtgtacaggatgtttgtcgaaacataactcgtcaggcctttaagatagacctgccattgctattcctgcaaatatggagtctagtcagcccaatcgattgctattcgaatggtttggggtcattggcccaaacaaaagttgtgctgcttcttgcaaataagactgagccaactgtaaacagcaagccatccaaatgcttcaatgtaaaaaaatttacatttggatgcaacctttatttttcctcgcctctcttttcgaaaagaaaagctattagcaagcgtgtttggaccaattctaaaacaaatcggggtaattaatttaatctgactttataagataaatgggaatttaagcgaaggattcatgcaaaataatgatctatagaaattctcaaaaaggtagttcctcgcagattcgggaaccgtttctatctgaggtagggacatatgcgctaaccataaaaaagttgaatcatttt

SEQ ID NO: 45183 - DNA, 635 bp, Heterodera glycines
atttttttagtctaatctactcaaaacggttcagaattcaataaaaataacattcacggtgcgaaaaatggggtttgacaagtttattggggaaaaaaagactttacaaaataatacccctgggagaagggagtgggaaacatgatttcaaaattttcaattttttctagtctaatctactcaaaacggttcagaattcaataaaaataacattcacggtgcgaaaaatggggtttgaaaagtttattggggaaaaaaagactttacaaaataatacccctgggagaagggagtgggaaacatgatttcaaaattttcaattttttctagtctaatctactcaaaacggttcagaattcaataaaaataacattcacggtgcgaaaaaaggggtttgaaaagtttattttgaaaaaaagactttacaaaataatacccctgggagaagggagtgggaaacatgatttcaaaattttcaattttttatagtctaatctactcaaaacggttcagaattcaataaaaataacattcacggtgcgaaaaatggggtttgacaagtttattggggaaaaaagactttacaaaataatacccctgggagaagggagtgggaaacatgatttcaaaatttt

SEQ ID NO: 45184 - DNA, 763 bp, Heterodera glycines
gccccagcagcccacgccaccgccgcttccaacgaccgtcgctcagtcgccgtctccgccattcgctcaaatgcttccgccgaatctctctaacattactcccgaagttgtccattttccaaggattgagttttgatttggttttcttcaattcgcagatggctgcccaattgttggcccagttgcaacagcacaatccttctctaatccaaaatttggtgatgggccaacagcaacttcaccatcactcccaactcggcccttttcgtgccgatgccgactctcttccgcctgccactttcgccaggtcggcttccctcagcaacgggcctttgtcacccctcgggggcggctgttccgctgctccctctccgctgccggcgcctccccgagggctccaaagcagcgtggcgagcataagggcatcaactggacgggcgccggcgaggaggtcattttccggcaaaagcggagcacagaatgaaattgggacattacaccagcgacaaacaatggaatggcctgggagcagtggtgaaaaagggggcacgacggcgagcagtagcagcaacactgagaaggacaagacggaaccaatttgggtgatgaggtaacggagggaggcggggggggggggaagcaggcatacagagagagagagaagagagagacagagatggggagagaagaaaaaaagaaagtgagagatagagagaaaaagagagacaaacagagaaagagagagactagagtcgagagaaaa

SEQ ID NO: 45185 - DNA, 376 bp, Heterodera glycines
gtttttggggtagtgtttgtgaaatgatgtgtgtagatttatggggagatagaatagttagggaatagtttgtttataggatgtattttaattgtgtgttggagttttgttaatgataattgtttgagtgaataaaagggagatttgaaaaaatagattttttttgtttttggggaagtaagaaggaatagatggggtgagatttatggggagagagaataattagggaatagatttaatatagtatgtagtttaattgtgagttggatttttgatgaggataattgtttgagtaaaaaaaagaggaaattgaaaaaattgatttttttgtttttggggaagtgcttatgaagagatggggtgagatttatgggga

SEQ ID NO: 45186 - DNA, 949 bp, Heterodera glycines
ctcaaagagcaaatttgctttttctcattagcatatcacccacaaaaagtaatatctatactttttctaattaacatatcacccacaaaaattagggaatattcaaaacagtttaataaaattccagaaaattcaaaaataattttctagggtttttaatggcaataataagtccaaataaattgtaatttacccattttctgactctttggatacataattggaatagcaaaattttattgttatgccttttttaatatctcaaggaccaaatttgctttttctcattagcatatcacccacaaaaagtaatatctatagctttttctaattaacatatcacccacaaaaattcgggaatatttcaaaacagtttaataaaattccagaaaattcaaaaataattttctagtggtttttaatggcaaaaataagtctaaataaattgtaatttacccattttctgactctggatacataattggaatagcaaaattttattgttatgcctttttaatatctcaaggaccaaatttgctttttctcattagcatatcacccacaaaaagtaatatctatagctttttctaattatcatatcacccacaaaaattagggaatatttcaaaacagtttaataaaattccagaaaattcaaaaataattttctagggtttttaatggcaataataagtccaaataaattgtaatttacccattttctgatacttgataattggaatagcaaaattttattgttatgccttttttaatatctcagagcaaatttgctttttctcattagcgatatcacccacaaaaagtaatatctatagctttttctaattaacatatcacccacaaaaattagggaatatttcaaaacagtttaataaaattccagagggattcaaaaataattttctagggtttttaatggcaataataa

SEQ ID NO: 45187 - DNA, 1387 bp, Heterodera glycines
  unsure (1)..(1387): unsure at all n locations
aaatttatggcgaatacaaataaaatgcaaaaaatcctctttaaaggtcaaaacataaacgaaaaaataagaaatatcgtcgacacaaaattaaatccaccaaaaataaaatcgctcaaaatatgtattaattaacaaaattaaaaatgctgaggtcaattgcaaagataacgtagtacaataattgggcggggatgtgctcgaacgtctttgactttgtccgagggttgcaattgaccacagtgtaaaaaaaagacaaaggcacaacgatcgagaaaactcctaatcaaaatcaattcaacaaattaaaacaatccaattttatttaagtctgaagcagatcaataatatcaaaataaaatgggagaccacaattttgaagatcagaagcaaaagtacaaaattaccaattgcatacaattacggaagaatgtcatcggggaagtgaacaattaaccaaaataatgagaacaaaatgccaaatttaaaatatttaaatcaaaaacgaattgtctttatagcacattaacactactttgatcgaagccctgacatttcgctttttgcttgtttcttggcagttattgatattaaaaaaaatattattatatttaggtttttgtatgatatattatcattactattattatttatttaacgaattgaaaattttaaattaaggattaaaaagttttcacaaattagtattataccgatcaaattaaacgccatcataatagttttattaattaatatttcaaaaaatcataatattttttgactaaacaaatgatttaattgatttaaaaacttttttaataataaacttattcttcataaattatagtcaggaaagtaaaaaaaaaattctatatattataaaaattaatgttatccaatgaatcacagccacttcaaaatgcaccaggtcaagatgattcagaaaaaaatatatttgatgaactaacttactcaaaaaaatcgatagtatctatgaattcaaatgtcattgtaaacatcgtactttaattttcgtctatttatgatgtttattttttaataaattaaatagtaaattaaaaaattacaagaaacgaaaaaatcttcaaataaaatattaaaaaagaaaagaaatgcaaagaattaaagttaatgtacaaaatgccgcggacgatttaataaattatagtttaacaaaatcaaataaatacgctgaaataatactgacaatatttattcaaaaaaaatatattaatcaaataaaaagaataatatatatattatttattcgcatttatatgattataatttactagaaatgttanaaatgagtcatatacagggctcgtatcgtccatgctccgtttccnaggacgggtatgccgat

SEQ ID NO: 45188 - DNA, 985 bp, Heterodera glycines
  unsure (1)..(985): unsure at all n locations
taaaaaaatctaatttaaaatcgaatgtgttaataattttttaaaaattataaaataaattccttcttttatttaaaaataaataagaaattaattttatattaaaacatttaattaaacaaacaatattaaattaattaaaataaataaataattaattttaaaacaaaacatttatttataaaaaaaaatttaattcaaataaaaaaatataatttattattaataaaataaaaaatatattaaataaataaaacaatgaaaaaaatggtagttattaattaaaaacaacgttggaaattatttattgaatattcacttaatttgaaatgatattattttttacagataaaaaataataatgaaattatttattaaaaaaaaattttaaatttacaaccaatcttcaaattaattaaaagcattgaaaaataactcaaaaataaatagaaaaataatgtacaccgtccggatccgaacctgccccctcccccctcagaatgatatctcagaatccccaatcacacagggattctgaggtcttgactatgtcaaaagtaaaatctgatcacgtattcgtgatcaacggcccaaataacccctaaaaacatttttttaaaagatttttgttgaaaaaaaattttcactcaaaaatcctggtcacccccctttggtcccgactgccaaaatcacttttatttttgtatctttattttaaaagatgataaaaaggtcaaataaaatttatataatagagcaaaaaattgcggattttttcagtatttaaaatttcaaaaacacctttacagaaccgagttctgaatttttttctgaaaaatcgaaaatttccagaatttctggaataactttttttgtttttgcggtataaatttcaaataaatctcatanaattctcccgatttttctctatttttaaagctttattatagnntaatcgatggcaccatcaccgaggtatgaattt

SEQ ID NO: 45189 - DNA, 828 bp, Heterodera glycines
  unsure (1)..(828): unsure at all n locations
ttttctccccataaatggttgagttccccaaacggacccttgaaaaaattgattttttgtttttggggcagtccccccgacccgatgcccccagattttaggggagaccgaatccttcgggagtagctcccctatagcctgtactttaattttgcgttggatttttgctccccataattgtttgagtacttcaaacggacacttgaaaaaatcgatttttttgttttcggggcagtccccccgaaccgatgcgcccagatttatggggagaccgaatccttccggaatagcttccctatagcctgtactttaattttgcgttggatttttgctccccataattgtttgagtaccccaaacggacacttgaaaaaatcgatttttttgttttcggggcagtccccccgaaccgatgcgcccagatttatggggagaccgaatccttcgggagtagctcccctatagcctgtactttaattctgcgttggatttttgctccccataattgtttgagtactccaaacggacacttgaaaaaatcgattttttttgttttcggggcagtccccccgaaccgatgcgcccagatttatggggagaccgtctccttcgggaatagcttccctatagcctgtactttaattctgcgttggttttttgctctctctttctgtgtttgcgtccccccgtcggtctcttgttcttctcgttttttttgttttcggggccgtccccccgtcccgttgagggccgttttttgtggngtctcgacttcttcngggaacccttacagaatagcctgtactttaattctgcgttggatttttg

SEQ ID NO: 45190 - DNA, 1464 bp, Heterodera glycines
taaaaatatatttttttttttctaaatcctttaataggggggccaattttgtgggcccaaaatttccccccggcgtccagaaaagtattttttcataaaaaattaatcaattttaatttttcggggagcccttttggccgtttttaagccttgttaagtcgccttttgggggttttttggtgactaaattccccatccccaatttattaattgagaattgaactttaaaaaaaagggtaagaaaatctttccaccaccctttgaaattaagaaacttgtgtggtgtccaggtggcaaaatccctttttaagacaagtgattaattaacaattatattttattaagctaaaagtctgaaaatagcgaaacaattgccagcggtgaagccaatatttgcagatagctttaataaatgtcttagtttaattactgccgtcgtaaaactgaatgttatttcgaaatatttttgggaaaatattgaaaatgacttggatatgactcagataaaattgctgaacgaggaggaaataaatatttctgaaataaaagtggagaaaaaagttgaaaattcgctgagcaaaatgcaaaaaacaaatgcattttttgaccaatcgtcggaaattgccaaccttaggacggaatttgagcaaaaaatggagaaattatgtgaaagaaccaaagaaaatgccaaggaagaaaaggcgaaaatggaaaaaacaaaagcaaatgcagcggatgaagggcatagactcggaacggaacttcactttctgtccaaatttggcactttcatttcgtcgccatttttccgttgatttccttaaattgagtattttttttacactgatcattagcgctataaattatatgcattaaaaaatgccaaatatgcgcataaaatatgcactaaaaacccgaaaatgcccaaatatgcactaaaatttgccttaaactgccaaaaatggctttttaaccctcaaaaaatatcaaaaaaattgtctaaaaattcagaattgactttaaaaacgccaaaacattggctaatgaacgttttttagacaatttcaaaaagttttgaattttaaaatttatctattatgaaaatttgccaaaaatggccgaaatttgccctaaaaaagcaaacccccaaaatatgctttatatgcactaaaacgttctccaaatcaaaaaattttaacgtagaaatgatatttatgagcataaaatatgcaaaagcttataatttatagccctaataattacgcttattatttcacaaaaagtttttggagagagatgtcataaatgcaacagaaaatgacttttgcccttcttctgatgttgtttgttgggtaaaccttcgccattttccacgctccataatttctctcattttgccctcaggcggcggcggagcgtttctccgagttgatgcaaatgataaaaaatatatataattaatat

SEQ ID NO: 45191 - DNA, 624 bp, Heterodera glycines
aaattcattcaaattaatggaaaaatttccttgacctttctaagaacatcaaaaatataaaagacttgatgaaagcaatagttcaatcggacccttttctccttctcttcctcttccctttccctcttctttcttcttccgcctccttccctccttcttccccttttccttccaattcccccctccctcgtctttcgccctccctctcttcctcttcctcttccctttccctcttctttcttccgcccgagaaaaaggaaagggaagggattctctctcaccaaatggaagtcctcttcacttagctcattcatttccttccatttgcttcttccttttgttgttcctctcgattcggaaagggaaatcgtcgaatcgacttactggcggactcggccaaggcaaagaaagggccggccggccaaactggcggttggtcgctccccccccccctttttcccacttttccctttctgctctgctgctgatcggtcgtcgccgtgaaagagaatagtacatagaaatgagtgatgaatggaaatgggaaggatggaagagaataagagaaaatggtgggagaaagggaaacgaaagggggaaggaagggagagggaggggagggag

SEQ ID NO: 45192 - DNA, 1188 bp, Heterodera glycines
tctacaatcgcctttatacatcccattatgagcgctaaattatcagagtgccgaaaatcgcatgtgatctaagccttaaaaaaatggtctaagtaaaaatcgtaattacgctcaaaaagcttctcaaacaattttagcgcatccaattccttctacaatcgcctttatacatcccattatgaacgctaaaattatcagagtgccgaaaatcgcatgtgatctaagcctagcaaaaaatggtgtaagtaaaaatcgtaattacgctcaaaaagcttctcaaacaattttagcgcttccaattccttctacaatcgcctttatacatcccattatgagcgctaaaattatcagagtgccgaaaatcgcatgtgatctaagcctagaaaaaatggtgtaagtaaaaatcgtaattacgctcaaaaagctcctcaaacaattttagcgcttccaattccttctacaatcgcctttatacatcccattatgaacgctaaaattatcagagtgccgaaaatcgcatgtgatctaagcctagaaaaaaatggtgtaagtaaaaatcgtaattacgctcaaaaagcttctcaaccaattttagcgcttccaattccttctacaatcgcctttatacatcccattatgaacgctaaaattatcagagtgccgaaaatcgcatgtgatctaagcctagaaaaaaatggtgtaagtaaaaatcgtaactacgctcaaaaaacttctcaaccaattttagcgcatccaattccttctacaatcgcctttatacatcccattatgaacgctaaaagtatcagagtgccgaaaatcgcatgtgatctaagcctagaaaaaatggttaagtaaaaatcgtaattacgctcaaaaagcttctcaaacaattttagcgcttccaattccttctacaatcgcctttatacatcccattatgagcgctaaaattatcagagtgccgaaaatcgcatgtgatctaagcctagaaaaaaatggtgtaagtaaaatcgtaattacgctcaaaaagcttttcaaacaattttagcgcttccaattccttctacaatcgcctttatacatcccattatgagcgctaaaattatcagagtgccgaaaatcgcatgtgatctaagcctagaaaaaaatggtgtaagtaaaatcgtaattacgctcaaaaagctt

SEQ ID NO: 45193 - DNA, 621 bp, Heterodera glycines
atttacactggaaaatgccttttttgtatttttttattttgatcagccataactcgcttcattcccaactaaagtgaacaaatgtggtatctaaaataagaatttgaaaaggggaatctttttctaagcgaatgctaagcaatttaagtcatatgaaaaaagttgtgagagtttcaaatttttatcacgttataactcaagtcctaaactgctgatttcaccaaaatgcgaaaactaatcattttctattgattctaagtgttcaaagtgattttgtagcctataaaccaaaattgttagaattagcgaatttgatgttttttcatgtgttagagacatgaaaatagtacgccaaaattagaggaaaagaaatgcaaaattttcatcatcccttaactttaaaataggatagaaattcattaaaaccttatagaacattcgatgcaaaatttttatgactatcgatttgcaaaatttaaagaatgtaaggcgaaaaaaaagttctatagagcgaagtgaatgttgttttttacatcattaaaatgaagagatagtacgccaaagagagagaaattataaagaaaaagagaaacgacgagatagtacaggcttttctctgca

SEQ ID NO: 45194 - DNA, 1363 bp, Heterodera glycines
  unsure (1)..(1363): unsure at all n locations
acaccaccagctgaatttgtgcgaagaaagctaaccggtttcaacgcaattaattactttttgcttaattagccttacatttgctgcttaagtccgggtaagggtattcgccccgggcggtttcaatctgacaaaatgtaaacagcagaaaatcaattgatcaagcaacacaaatgatgaataaaatgaccagagaaatgccaagactccacacgtcggtccgaatgtcgtacccgtcttgactcgctgttaagcgttctggctaaaaccaaagcatgttaattatctggtaattagtagttaattgtgttaatttgccactagtaatagccaatttatagagacagatttcccaccgacatatacggtctgcagccaatgtccttcgttttagcaattgagtccttaaataaaaattcgttttcgcgccgcaatgtgttcaaaatgcctcaaggtatcctgagattccaaaatcgcacagttttatttgaccacgaatgttcaacaaaatgttcgaaggcttaacatctaaagcgagtgcaattaatgggatgatcactgatcagttaaacatgcttattccctgggtgaagcaactaagcccaattctgtgagcttgcacatatttttggcatttattctaaatctcttttttgaacagccaactctattaaaatttatatttaaaaaggcaaaaatattatgtaaattacgattaattcgattttctctgaaaattcataaattttaacttttttattttttctctaaaatgatttttaattccaatttagaactatgtacgtgattcttcacttaagtttaacataagaaattttgagaaattgcaccctatatttgaaaaaatatgtgtatattttcaacccaataactttttttaagacgagtcgtagaccatcgtccaaaggtaattcggcaaagaatttattgaattttttgtccatcttttttttctcaaaagcactcaaattccanataaaactttttttttctcagcctaattattcagggctgccaaaaatatggcacgaaaagtggccaaaatatgcgcataaatatgcaaataaagtcgtgacatatgcatcaaatatgcacaaaaaaaacttgaaaannttaggggtgtaaattaatttaaaaaattttattcctcataattttaccgggttgtttttgcaatttcaaatcaaaaatttctcaaggttttcggcagtgaaactcactgttggcccactctcgcacccattcagatttggatttaattttaggcaatcaaattttttttccgaagggatattcaaatncggaaaatatttgacgaaaaatggcaaaatatgcagaaaaa

SEQ ID NO: 45195 - DNA, 1099 bp, Heterodera glycines
  unsure (1)..(1099): unsure at all n locations
gtgcctatttttatttgttttggcgttttgacttttgatatttgaccttcttatattcattctcattttttcattcgtgtattattctcctcaattttgtcctttttttggtctcctccggaaaatttggttttaataagggaggtttggttgccaagggtcaaagaccttcaagaaagtcaaattgaaaatttggatcagttgatcaaccagtttaaaaatgttttcgctttgcacgaccatgaattaactcagacgagtttggttgaacatgtcattgataccggagatgcgacgccaataaggagcagaatgcggccagttccgtatgcttatcgagaaaaagtttctgaaatgttgagggactatttgggtcgaggactcattcggccatctaattcaccgtgggcaagtccaattgtgcttgtgccaaaacgagatggaactttacgattttgtatcgattacagagcaattaactcagtaactaaaaaggacgcctttccacttccaaacatcgattacattttaatggcgttaggcggaaaacgctatttttcaactcttgattttatgtccggttattggcaaatcagaatgcacgaaaattcagttcaaaaaactgggttcatcacagaatttggactccatgagttcactgttcttccatttggtctgtgtaatgcagttgccacttatcagcgttttatgacgaatctttttgacggaatgataaatgatttcgtttcatttacgtcgatgacattttggttgcatccgagacttgggaagaacatttggtacatttaaaggaagtatttgaacgcgtcggaagagcagagttgaagctaaaaatcggaaagtgtcattttgctgcagaagaattaccgtttttagggcacattttgaccagaaatggtataaaaatggatgccgataaaactcgcacaattatcggtcttccgatccctgcaaccaaaaaacaattgcagtcattccttggtttcatgncttatttcaaagaatttatttncggttttggttcgttggcagcnccacttatgattgataaaagaaaatacaccatttgtcatgggtg

SEQ ID NO: 45196 - DNA, 947 bp, Heterodera glycines
tacccctgtggccgtcaaatggcactttaccaatgccaatgccaaactcggcacatttcgagtcaattttactaatttgctgacattattcccattaaatcagttaaaatacttgaaaatttcttctctgttcatgtccttgctcgccatcgtcgttattttctgttcactatacaaatgttgcgttccggcaccgcgtaattaatcttctaattaatagggttataaattgtatgattttgcatattttttctgcgcatatgctatgaagaaaggggctaaaaaatagcatttgtgtgttaaaattttttgatttggtgaaggtttttagtgcatatacctaaaagcagattttgggggttttcgagaataaatgcatattttgccatttttgcatttttagagcatatttcggtcattttttgcaaattttcataagaaaaatgcgaaaaaaacgaaaaatacacccctaaggatcgacctttttggtaattaaaaaaaatatagccttgaaaatcaaaaaattttgaattttttgtaagaactttttttataaaaatgttgatataaaattttgttttagcatataataaaaatttataaatttggaaattaatatttttgcagttgtttaaaaaaatgctccttagcccttgttttggagttttaaaagtcaattcttaatttatacacaatttttgggattttttgagggttaaaaaccatttttggcagtttttaaggcatatttgggcatttttcgggtttttagggcatatttgcgggatttttagtgcatatttttgcgcatatttggcatttttttagtgcatacaacttataaccctagtaattaataattaattgctttgaattgatccgtgctgtcccggcagccaaaaagtggttttgctaatggctaattacgttggcacttttgcccattc

SEQ ID NO: 45197 - DNA, 937 bp, Heterodera glycines
cgacggaatgccaaaatgaaaatgtcgtcaaagagacccccccgggcatcgggcgcagaagaaacgcactatttttgacattataataacagctgtaaaaaaggaggaagtgatgagacaactcagagaaatcaggggatgctacacaaggataagcagatatttggaggaccagagaatgttcaagaagctgctgaaggaggcggacttttatgagcagagaggtaaatttattatttagaagcaattcaaagcgattaagggactaattgccataaaacaatgccaaaaatgtgtaattattaaagccctgaattttaggttttacctattttttacggataaatacttgatgagagaagcacgaaaatcatattttctccgaacaatttttgtattagattgactttttagcatccaaaaacacttaaaacggggatcagcacttttttagcattttcggtctttatcacctattttggcctttttccagaaatttcataccaaaaatgcaataaaaacgtaaaatgcacccctaagaatcggtcccaaaaatttcagaaaaatacgccccgaagaaccgaccaagaaattttcaattacaaccctaagtatcgaaaaaaaattttttttaaatatctccaaaatttattatttattttttcttgacaagttgcaattgttcggacgaaatttttgcaccttttttgcacctattttagtacctatttcagtatttttggcacataaaaatcccagctctagtcattatctaaattcgcaaaacttagaaatttttggccgtttttatttctcaacatttgtcttctgtgtgggtgcattagattaagatagcttttaacattttgattactctgatagggttttgctatataataataaaaaaaaagataagagcacttttagtaattcaaaa

SEQ ID NO: 45198 - DNA, 1016 bp, Heterodera glycines
atgatcacttttgtgatattctcaatatttcaatttcttatatccaaatgtaatctgtataagttacagtaggaaattgtaattgggggttatgggcgatttcaaatcgatccttccggaacactgatgctgtttatatttagagcgtaatgagctgaaaatgtcagaattcaaaaagtggggtcgcgaaaatagtaaatctgaggttattggcgcttatcaacctgatccgtctgcaacacttaaacagtttatatttaaagcctaattagcagaatgtgaaattctctcatttgttactttatgatcatttttgtctaattcgcaaaattacagctcattcttcgcgaaatataaactgaatcagtgtttgcggaatgaccgagctgataatcgccaataatcttcgattacaattttcttggtcacctttttggaattccaccatttcaactccttatcctctaaatataaactgaatcagtgtttgcggaggaccgagctgataagtcccaataatctccaatttacaattttcatgatcacttttgtgatattctcaatatttcaatttcttatatccaaatgtaatctgtataagtttacagtaggaaattgtaatttgggggttattgccgatttcaaaccgatccttccggaacactgatgctgtttatatttagagcgtaatgagctgaaaatgtcagaattcaaaaagtggggtcgcgaaaatagtaaatctgaggttatggcgcttatcaacctgatccgtctgcaacacttaaacagtttatatttaaagcctaattagcagaatgtgaaattctctcatttgttactttatgatcatttttgtctaattcgcaaaattacagctcattcttcgcgaaatataaactgaatcagtgtttgcggaatgaccgagctgataatcgccaataatcttcgattacaattttcttggtcacctttttagaattccaccatttcaactccttatcctctaaatataaact

SEQ ID NO: 45199 - DNA, 1121 bp, Heterodera glycines
  unsure (1)..(1121): unsure at all n locations
ttcaggaagcggcaggggaatgctaagcaaaaagcagtgcgctgtttaacccattggaaaagtcggcacagacgcgcgttgacccattgccttttttgacaaccacaatgggtgcgccccaatttgtatgttcaaccggacggatgacattcatcgattgaagtcgctccaattctgcctcaacaacagatttggtgttgaatgggacgggacgcggtcggcagtaaattggtgttgcattgggcttaagcgacagatgtgctttcacctttttgcaatgcccaagtccgtcggcaacaatttcaggaaacttctttttgagttcctccataatcgttgcttcgtcaccatttcctcttccgattgcattcaaatgcagtgttgagttcactttttgtcgaatgtcgtccaaaagtccgaaagcatccagcatttcaatccccaataaattcaatgatccacttttggacacataatacgttccgttttttgtggcatctccaaatttgaatttcgcttcccctcttccgagaagagtgcacttggagccgtcgtgatatgctgcttgttcttggcatcggcgcaattgaggttttccaatcagacagtgagtctcttcgttgatcactgtgacctcggcgccggaatcaagcacaaaaatcacttttcttccattcatttccacggtaatttcaatgagcctcgttggatggttcacaatgttcaccattacacctccgatccgaagagtgcaagctcttttcccttgaaatttgccgtttttgttccggttgagccactcatggtgcttctcgcattgtgcctccaaatgtccagctttgttgcactttcggcaaacagttttgatgcttggacattcgcttggagcatggtgaaacttgccacaacgccagcaaaccctttngagtttggttctgaacttggttccctttnttgcgttggtttcatgggccgctgcttctgtttgaccgccatcanatttcgcgatgccatcggncgttcttcaatgactttgcttcggcgaatgggtgattggaaatatttggaagttcttcgacaactccatcatactcgaccnagtcaccatccgctgcaagctt

SEQ ID NO: 45200 - DNA, 1586 bp, Heterodera glycines
tttttaaacaggtcaaaaagtttaggcttatattttaccccaacaggtcgaacctagcgcactaacatcgatataatctctctaaattttgcaggccttctccattgtaaaggactaacttaacctgaaaaaatgccaacgcttgttgtttttaaaatttttcgaaattctgactttttcattaattatttattttttgcaaaattaattcataagtattttttcagaaagtgctctgaaacacacaaaactttatttacaggttagtttaggcactctgatgctttttctatcaaaaagggagatgaataaaatttttaattcctttttaaacaggccaaaaagtttaggcttatattttaaaaagtttcatcgaacctagcgcactaacatcgatataatctctccaaattttgcaggccttctccattgtaaaggactaacttaacctgaaaaaatgccaacgcttgttgtttttaaaatttttcgaaattctgactttttcattaattatttattattttgcaaaattaattcataagtattttttcagaacgtgctctgaaacacacaaaactttatttacaggttagtttaggcactctgatgctttttctatcaaaaagggagatgaataaaatttttaattcctttttaaacaggccaaaaagtttaggcttaacttttttttcagaaactgatcagaagcgcaccaaactttgcagggatactgaaaggaagagtaataacctattttaaatattatctagtcagttcatttaaataatttttatccaaaaaaatttttttttgggttttcggggcagtccccctgaaccgatgcgcccagatttatggggagaccgaatccttcgggaatagcttccctatagcctgtactttattctgcgttggattttgctcccataaatgtttgagtaccctaaacggacacttgaaaaaatcgatttttttgtttcatatatattttttcagaagtgctctaaagcgcaccaaattttatttacaacttaattttagcactctgatgctttttctatcagaaagggagatgaataaatctaaaaaaatttttaattcctttttaaacaggccaaaaattttaagcttgtgtggtaagtgtgaagaactgtgttcctccaggcaaaaaattctaagaaaatttataagcatttgaagggttctcagcagtttccctgcaaaatttggtgagcttctgatcagtctagaacgttgggtgatcaaatgcaaaaaataatttaaaaaaaataatgctggtgtggtaagtgtgaagaactgtgttcctccaggcaaaaaattctaagaaaatttataagcatttgtagggttctcagcagtttccctgcaaaatttggtgagcttctgatcagtctagaacgttgggtgataaaatgaaaaaaataatttaaaaaaaataatgctggtgtggtaagtgtgaagaactgtgttcctccaggcaaaaaattctaagaaaatttataagcatttgaagggttctcagcagattccctgcaaaatttggtgagcttctgatcagtctagaa

SEQ ID NO: 45201 - DNA, 1013 bp, Heterodera glycines
  unsure (1)..(1013): unsure at all n locations
caccaaattctacacaanagtgctcacacaattgggatctgctgcttaatgatatgaaaagcggtttggtttttactcaatataatatatatatatcattcctaacaataagatgtttctcgtcttcctaccacattggcccgacttcgtccggtgactgaacgacttggaatgacagaaagagcgtaagacagatgactgactgaccgtgtatcatccgacagacaacaataaattaattctttagaattcttggacgtctgacaagcaaagacccggacgcagtggctgggcaaagtccattacctccgcccggaccctttgtaactccaatggcacaaagtcgcttctcgggcatacagccgaaattcgccgcacttttgaagccgaaacaccaatcaaagaaagaaaatctgccagagaaagacggaaacgacaaacaaaatcaggaggaaacgcgaccgagcaaagaggaaaaacggactgacgctgatgttgagaagacaagtgataggagtacaaaggaagcggaaggaagttgcaaggaggaggcagaaccagtgcaagacgacaccgtgaaagaaggttgactttcgtacattccataaatgcgtatacgtattttcactttcccgttagttatgactagggactccattttaggcacgaaaagtcgcaaaatagacgcctanaaaggtaaaaaaaatctanggctcaataggcaaataaaaaaaaatttacgctttttagctagaaatacacgtaaaaaacttgatcaaaagtttaattttggttatatttcaattgtaaataaaatgagaaattttaaatcaaaatttttatgaagaaaaaaaaataaaattttgggggttattttttgtgaaatttttcccattttcttanggggtgtattttcctgaaattttttcgggtcgatttttaagggtggattttttcattttttgtaanggatttttctgaaaaaggcgccaaaaatggcaaactgaaaatgg

SEQ ID NO: 45202 - DNA, 1141 bp, Heterodera glycines
  unsure (1)..(1141): unsure at all n locations
cttaacaaaataccctaaaacagcaaagaatttcacggtggtgccttattttattttgaaattagacgcaaagttttcattttttgaccgattgctatcacattgattttaccgttataaagcggggttcgattgtccgtggccgtgatgaaacgatcgacctaaaaaatgtattaatgaaaaaacaaaattcaagaaaatgtgaaaaagatacattcaaaattgccagatcattctcctccataaaagatgccaaatgctccaccggcacagtgatgcctcctgcgccgtccatgcgactcggaattggacgaaaagtatctgaattgaatccatggaatggatggaagacaccaaattgaaaagcaatgtgggtttaaaatttgaagaaaaatgaacgccctgaatgcattcatttcgtaccaaacgaaaagtttaaaatatattaaaaaaattcaaaactaaaatttggaatagacttcttccctatcctaaaaaaatttcgtcacctttttgcaacacattccgtatcttcagtttcgcctccacttcgtccgcgttcaaaagatgcgtcacttataagggaaaataattattttttgagaaataccagaaattcgttgtcccaaaagtccctttttcctaacaatttttggaaatttttccatgctcctgtgtatttccgaaaaaactacaacatgacccaggccaaagtcatttttaaaacaggacatcgggttagtcttgtatgacaatgagccaaaaactcggtcagggtgtgggttttttcttcaaaatttcgctctataaaatagcgattttttcaaaaaattattaaagccattgtcatttgtggtagtaaaattctaattctgtgcttttcccgccctttgcccacactgactgaattcgtgggatgccacactgtgtctctcgtgttcgttctccctttggctgtccaacagttcgtccgctctcaaattggtcggcgcacagtacggcttgagcctgtccttctgcgctgtgctgacattgtcctcctcactcggctccataatcatcttacgattaaaattgaagagtaattttattttataaaaaggtgggggcgaacccanaagtttggcatttttatgtttct

SEQ ID NO: 45203 - DNA, 877 bp, Heterodera glycines
  unsure (1)..(877): unsure at all n locations
ctatgaatgatttttgtcggggggggggggcgggctcctcctaaattttttattgccatccattaatccaagccaaacctcctcagaccataaataaatataataaattctatcgtatttaaatggtgtttaacgtctttaaatcaatcattttatttttatttttacggaaaatttttttaattgttattttttgttttgacttcgttaccaaagctaaaaattaaaaaatgttaaaataaaataaaggttttattgtgctttttaagctgattgttccggcgcttttgaaatgttttcttaccctgatttatttcaacattaatcaaaaataaaagtataaatttgactgattttcacggcaaaaaaaaatacgaaatggtattttccccttccctcttttttaaccccatttcaaaaattttgcccccaatttaaaaaataaaattatagtcaaggctaaaaaaatgttccgcattctgtcaaattttgttttttattgttcttacgaatatgattggatcaaaagctcagcatattggcgatgttggtaaacatgggaaaatttgcaaaggtaagctgaattgatcacttttaaataatgaaaattattaatatttaaaggtaattttgtttttaaaattttcggcattcgaaaaaatttggcacatggattccaattcagtccttaaaatgaaagcgtccacatccccctttacagtatgtaacgacagataatttaactgtatttacatgattatccgcttttcaaaaaaaaaaatttttgatttaaaaaaaaaattcggcattaaaattatgttcaccaaaatgggctacatcctgngtttacaaatttactcaataaaaaggtacctat

SEQ ID NO: 45204 - DNA, 1226 bp, Heterodera glycines
atttcatcgtccccgatgaaaatgctaaatcttgatcttctatgggtgagcgaccagcgttttcggcacatacagaatgtacttcggcatcgcattttcagaaaagcgcaaatgaccgaacggcatatcaaagtccttggtgatggagttgtagaatttcgtgtgctcatttttctccagttctgcatgccttcgtgtccaaatgggcttcattgagttcactttctgccattctaatgtctgttccaccaatttcaaatttggcctcgcctcttcatcgtttttctcttccttttgcttttcacctgcttcttccttctcttttgtctcctttttcgcttccccactctcttcgatcaatttctctactttttctgacttttccaacgtgcccacaattgccgggtccgtcatgtgtgaaatttgctttttattattccccttaattttgatggaaaattcttcggttgtaggaagtgctgtttcatttttcggcaaaatggactgaattttgttctgggcatccaacgaattggagtccttaccacattccaaattttcggaaatcggttcttcaacaatttcggcccaacgcagtcccaacggatcacaaaatttaggcaactcgcctttcccatccatgaaccgctgttgtaaactcacagcaactttgtcaaaatccacacccaaacgctgtgaagtttcatagaaaagttgacctccgcggccttgtctgaattcgtcgtcaattgactcacttatcataagataaatggtcatggctcggctgtacaggatatatgcatcctcttctttcccttcctgtattttcgtttttcctttccgttcgacttccatcaaaaagttgagccgcgtaaaattgtcgagccgtcgaagtgaataagtcaatcgattgtcaacgtttgcatgttttttgagcacctcataagattcgtacaccaatggatgcaaatttgtcgatgaagtccgcataattttgtcttatcaacacgagataaaacaaaaaaatccaaatgtataaagcaacacgagctttttataaaagattgtttggcgagcacaacacgagtgctttagacgaatttgtaaacgtggacgaaggcggatgaagaaaaacccaacacgagggtattaaaatttgacgagcagttgacgaacccaacacgagggtattgaaaatatcgataaacccaacacgagggttt

SEQ ID NO: 45205 - DNA, 1271 bp, Heterodera glycines
tttttttttaaaaaatatatcccatatattttttttaatatatcccatttatatccctttttttatatatcccatcttatatttttctttaaataatccgggataaatgttaggtattaaaaataaatttaaaatttatgaataatttaaaaaaaaaacccatatggagaatttcaaatataaaatctccctaaaaatatattggagttaaatttaatgagaaaatttgattttttccatccgaaattgcataattaattaatttccccctataatgtcggcggacacaaggcgagaattcgccagatggtcgaattgggtcatcaggaatctttaatttgttttgatgcaaaattgagtataaataggtaaattgtcagggactcattcattcattcattcattcaataattaaattttattttgttatttataaatatttcgcaaatatttattcaaatgtctcaaccgtgtactttaattactttttagaccaatccattttctgtaaccatgaactctaccgaccgtcgctcaccgtctcctgacatggagctttatgaattgtccgcctggtatgacattttcgaatcgcccgacgacaatgtaaattttaatttttaatcgtagcatctttttttttcactttgccattctcagattttgaactggttcacaccgatggtggcgcgtgacgtttgccaggaggtgttggaattcgccaaagagcgtcgtatgccgtgtgaaaatgtccagaaatggaagaaaattctggataaaatttgtgatcagcttgtccaaaaaaagtgatcgctttgatttgagtttcatgcggttccgcttttttctctctgttctaataaaagatgaacattaaacttgaacgagaaggggacgggagggggtgtcatcatcgatttgaattgtcgcacgggactcagtattgagtgcccatcccacccaatctttactcaattccttttgcgtaatttgacgttttaaattggagggggggggggctcaattgatgtccagccgggtgtatataagcagctgttaattccgccgtcttccatttcattctcgaaaatttttctcccaaataaaaatggcaatcaatatttccgacaaaaaggcgctcgtcaaccaaatccttgggcaggcagacattacggtgacaacaagcggcataaccgtgagcgggcctcgtctgtccccccgcgatttatcccgttcgaggaatgccgccgctgccgcgcatgcaaagctac

SEQ ID NO: 45206 - DNA, 703 bp, Heterodera glycines
aaatggcatttgttttttaggtcaaaaatgctttttttttaattaaagtttggcactttgtcattgccggagggcactttcgtcattgagccattggtggtcattgatgaggaacaacagcagcagcagcagaaacacagcggagaagcagacaatgttgaggtgcgcaaacggaaacggcacctggcggccgaattggactcagatttgcgggcacatctcgtctatcgacttcagtcccattattttgaggtacaggctcggcacttcaaattgtctggcacggctctcctgatcagtaacagtgaccagaattataagcatttggcataatggcccatgtgatcagcagatagcaataatcacagtcaatcagtgccttttgtaatgctgatcagaagtataagctcgaggacacacataaaactctacaatttggttgtcgcccgaaacccgaacgcccggattatttcccaagccaaacccgaacgtttttgtcggctttcgaatcaaaaaatacaccctaaaatatagctaaataatttcaattattatttgctacaaaaattattttctttctgacccgactgacccgcatttgtgataataaaatgaaacggaattcattaatttgttgtcagactcattaaaatgaacctaaaacattctaaaggataccgctgatcatcactatcaaaacgga

SEQ ID NO: 45207 - DNA, 1064 bp, Heterodera glycines
gcttggctatcagtaataatgcatttgccgtattttcttttaactccctgggttttttagccccctcggcgggggggggtgctctaatggaatgagccttataatagaagaaatacagaacattacaataaaatgccacccgagaccttccccctttagaagaaatacagaacattacaataaaatgccacccgagaccttccccctttagaagaaatacagaacattacaataaaatgccacccgagaccttccccctttttaatttattttttaatagctgaaaattgctgtaattcattgctttccaccaacagaattgtggaagtgtccggcgacaacacgcccgagccacacgaactaaacagggcatccattctgatcacaacacccgagaaatgggacgggatcacgcgctgtgcggacacacggcactacgtcaaacaggtggaaggggggggagggctcccacccgagccgcgaagcggcagagtgagtaccttcggtgcaggaaaattattaaggaagagagttcattatttatttatttttgcaaaattaattcataaatttttttcagaaactgctctgaaacgcaccaaatgttaattaaaagttaaataaggctctctgatgctttttctatcaaaagggagatgaataaaatttttaaaaatttttaattcctttttaaacaggccaaaaagtttaggcttatattttaaaaagtttcatctaacctagcgcactaaaatcgatataatctctccaaattttgcaggccttctccattgtaaaggactaacttaacctgaaaaaatgccaacgcttgttgtttttaaaatttttcgaaattctgactttttcattaattatttattttttgcaaaattaattcataagtattttttcagaaagtgctctgaaacacacaaaactttatttacaggttagtttaggcactctgatgctttttctatcaaaaagggagatgaataaaatttttaaaaatttttaattcctatgtaaacaggccaaaaagtttaggcttaacttttttttca

SEQ ID NO: 45208 - DNA, 1446 bp, Heterodera glycines
taaagccccccccctgaattagagcctcccttgtgagcatagttgaaaaaaagcccccggggctccattagaggaaatactgtattattttctttgacaaaaatcgaacgcttttgctgtgctcacccaaagcaattgtcgtagctgttaagcgtaaaatggagcatccgactgttcgtctttctgctgctgaaccgccgccatttccccattaattggacatcgcttcagcacccaagatctagatccttccttggttagtgtcagcttctcattggtccgttcgttcatcaatgtaaattcaaatggcacaattgatgttggcatatcaaaatgaactttgtagctgactgaagcggtggcacggagaaatgtctaagaaaatgggaaaaaaaatgtgaatcaaagccaatcaatcaatcagggctgggaatttaagtcacgaaaaattgagtaaaaagttggctaaaaaagtagagtgccacgggaccgggaatttttgccaaaaccgggaccgggacttgccgggacctgagaagccgggaccgggacctcgattttttttcgggaccgggaccgggaccgcaagaaaaaccgggaaccgggaccaaccgggaaattttaaaaattcaaaaaaatttaaaaaatttaaaaaaaaattcaaattttaatttatatcaagtgaaaataatacaaaattatttggttttttatttaataaattaaattaatgaaaattttcaaacaaattttcttcaattatttcaaacaattaatcatttttggactaaatcatcgaatattaatagaaattcagatttgattttcacatcactttttttcggagcgctttttcaaaaaactttgggaaagaaggggtccggcggtgccgataggcgccgccgggggaaattttaaaaatttgggtgcaatttgttaacagattttcaacaaaaaaaggttggtttttgcgattattaagctcaattggtaggattttcatttaaaaaatgataaaatatgtatcaattaaaaaaaaactatgaggaatcatattttctttataggaaaccaacgagtatacaaaaaaaaaaattgaaaataatctaatttctgtagagggattgaaccaggggaaagaagaagggaaagtcaaggagactagccattaggccatttgcacacttgggcagtgttacttttaaagaatatattaattattattttttatttttccaattgactccaattttcttcactaatttttcactcacaaaggaggggtcggcaagtgaccgtgggatttccaaatgaaatttggtgggtgggtaaatcacccctagtttctattgtgaaattttaaacatttttgccaaatgagcatgagtgccgagatatgacgggggggagtttttatgcttttttaattagaaaagatataattct

SEQ ID NO: 45209 - DNA, 805 bp, Heterodera glycines
tctccccacatatctgtgcgcatctgtttggggggggtcccccgaaaacacaaaaaaatagattttctcaagtgtccgtggggggtactcacacatatatggggagcaaaaatcccacacagaattaaagtacagtatatagaaaagatattcccgaaggattctctctccccatatatctgggcgcatcggtgcggggggactcccccgaaaacaaaaaaatcgattttctcaagtgtccgtggggggtactcacacatttatggggagcaaaaatccaacgcagaattaaagcacaggctatagggaagctactccggaaggattcggtctccccataaatctgggcgcatcggttcggggggacccccccgaaaacaaaaaaatcgattttttcaagtgtccgtttggggtactcaaacatttatggggagcaaaaatccaacgcagaattaaagtacaggctatagggaagctactcccgaaggattcggtctccccataaatctgggcgcatcggttcggggggactgccccgaaaacaaaaaaatcgattttttcaagtgtccgtttggggtactcaaacaattatggggagcaaaaatccaacgcagaattaaagtacaggctatagggaagctactcccgaaggattcggtctccccataaatctgggcgcatcggttcggggggactgccccgaaaacaaaaataaatcgattttaacaagtgtccgtttggggtactcaaacaattatggggagcaaagatccaacgcagaattaaattacaggctatagggaag

SEQ ID NO: 45210 - DNA, 1396 bp, Heterodera glycines
tttccaataaaaataaacaatgcaaagccctattataataaaaataaataaatatgtgtgggcggttgctgcactaattagctaattaccattaattagcgtaaattattgattgcgctgtttgccttttattggccagtcaaagcattcatcacttcagcagcagagattatatggatttcacctaccttgagctcagtaatggaattaattaaccgaaaattgatttgcccttattcaaaggacattgaattaggtgaattacgatttcaacaaaaatatgaaaattaaggtacttatcaagcataaataaacaaatatttaataagccttttttttgcactgacgtcttttattacttttcagttaagggatccttggccaacaattaaaatcgatagaaattagacatattaaattttaaattcttattttggtaattgcatcaaaatttacagccatacacggggctgctctttttaattaaactttcttggtattgttaaaaacttataaaaaactgtataaacctgcaaattttcaaaattttttattcatgtaaaaaaatcagggcaaaaagttcaaaaaactaagtttttgagttccttctggtcataacttttttgaggcttaacgaaaatttttgaaattttgcaaattaaaaactaaacacttagcgctatcgaacaacactaagaattcttaatttgattgacaatgagaaagttatggtctaaaaagtcttccggcgtcgttttggggtgcaccccccaaatcggcagtttttgccggttcaaaagaagtgatttctttattacgcatgacgttaattaaattagaatagttcacacgaaattttcacaattcattaaaataaaattatggaataatgcaaactataaaaaaatttgccaaaaaaccaaacggaaattctcacatttactagaaattgctttcaaaattttctctcatcagttaccaacgcgtttaaaaatgaatttttacataaaatgataattttcttttgtttaaatatatcaattttcacaccaaatctatattagataactttggttttcgcagattgtacttttcaaaatttatttaattgctagtcaactagtctacctcattacttacttatttatatatatatatatatacttaatctatcttcctcattaatctatttccctcatatcatttgagctccgtccaataaagccaccaactgatgagtcgttttaaaaaattgctacccaccctctatatgtgccactgaaaattattaattgcattgaaaaaccacccacccctttaagaatgtcaccgaaaaattttattacattaaaaaagcttagaggacctatcaattagtgccatcgaaaaatttaat

SEQ ID NO: 45211 - DNA, 765 bp, Heterodera glycines
  unsure (1)..(765): unsure at all n locations
ctgcagcctcgttcaattgaagcggaaacgggaggggcgcaggcagaacaacgcctggcatgtccggcagcggaggcggtgcgggtgataaagcggcgagagtatattggtgatgatccattttcgacgcttgcgcggatgccggcggtgtgaaagcggacaaaaaacatggcaatgaagggaattttggcgccactggcgacaacggcaccaccgcttcgtcagtgccggcaccgctcgttcctccactcgcggaaatgccaccactgctgccgccctccaacgcggttgcaggctgtgtgacgacgcggcgacgcattttaacgattggaacgcccgagggcacggaactgtcgcggatctcatgcggcaacagggcctgatcggggtccaagccttggcgcagctgatgcatggatatcggcattgtgccggcggcggctgaagcaacgccggcgccgctcccatttccaaagcctggcaaacagaaacgcgaggcgaagtcatcgccaaaaagtgcggcgacgctttccgggtcgcggtggcccatgcggaagtcgttgcgcaagtcctcctccgtgaccggcggcattagcgacgccttgcggcgatactgcggcgactgtgtgttcggggaggacgacgccagcaactgctgcgattgngggttagcaattgcattggcagtgacgccgaaggaggacggcactccatctgtgtcgtccgcttcttcttcttcttcttccctcctcttcttcatccgct

SEQ ID NO: 45212 - DNA, 971 bp, Heterodera glycines
  unsure (1)..(971): unsure at all n locations
actcgaagcatggcagattacctgggtgaaatggtttgtcagataatttggtcaacgtattataaaagctcatgttttctgaacagcgagaaaaaatgccggttcattttatgaatgctttttacgtcggtctagtcctcatttgtgtgccgtcagtgttgcaatcggagctaataaatgtggatttggaggttgacaatcaaaactatttcgacagcggcaaatatcgtaccttttcaaaagatgcgaccgcacaacacttcggctacagctggaatacagcatgtcgaattgagaaatgtgagcgcgacagcgaatgggccgtttcacttcaaaatgtttacactttgcacaattatcagagtgtgtttttaaaaatgaaatcattgatgaaaatgtcaccattggcctgttttgaatacaatgggtatagttttaccttttttgaagacagagaatctggtgagacggctatcttccgtggtcaccagcagaagattgtgcaacgactgttcaaacatggacgggttgtgtttgatcacctatcgggtcgattgtttctgatcgataaacaccagaggcgaatcagtgaaatagagcttgaatacctggagcattggtggcttcgaaaaaaccaatcttccgcccatacgattttgaagagcaactttgtcgcttttcttccaccagataaaagcgactttactttggtggacaaccatgtgtttgtgatcagagaccaacgcatctataaatttcacatttccgactatgcaaaagggaatcgtgcgctaacttttgtaaccaattcaaatgacgtccgatttaattatctaatttataaacccagagaccaaaacattaacccgcggcgtttttgctcatctacgcatgtncgacgcttggatgccgatctcgtacctgntcatctggttctaattgtactttgcacatacatacttaaacagcta

SEQ ID NO: 45213 - DNA, 865 bp, Heterodera glycines
aaaaaattttgttaagttgattaagtaaatattattttttggctttgaattatttcagttatatttgtaaaataattaattttatttttgtaaatatattttcttagaaattgacgaattttataacacaattgttttttgaccccaaatgtgattttgtagcaaaatgcagattatgaaagcttaggataaaacaggatttagtcatttttggctattatgggatcaaattctgaaaaaatgcaaatattgggtatggctgtgccattttagcgccaacggggtaatagtttaggtggtaacacaccagggatggcattccgaggccccaaaaattttcggaaatcggaattccgggggtcaaaaatttttcggaagtcggaaatcggaaatttttcaaaaagtataaaatataataaaaatttgctaaatattttagtaggctaattttttgattcttaaccaaataaaagatgttttcaaaaatgttattggttatttgaatattttgcttgctaagttattcaatgattttatcaaatcttttttatgtcatttttcattatttgaaaacatttttggtaaaaggagtgactatttacgcgttttttacagcgcgcttttttcaaaaactttctgggaacaaggaggggtaggtccggcggtgccgataggcgccgggaaatttttaaaaatttcagttcaatttattaacagaaattgtacaaaaattactaatttttataaaaaaaaatttaaaaaattttcgaaaatttacgacttttcaccaagaatttcggaaatcggaagtcggaattccgacgaccaaaattttttcggaaatcggaattccgtgccatccctg

SEQ ID NO: 45214 - DNA, 944 bp, Heterodera glycines
attttcagcgaaatcagcaaattgctgcacgaaccgttcagtttccgtttgatggaggcaattaaatttttaatttttaccaatttaattaattatttaaattttttttcccatttttcagattaatagcaaatgtgctgctgtgttcgaatcgttgggcttaatttcggctgaaaaggaggaaatttatttgcaatttgaccaatttttgaaggagaaaatttatgtaaaaaaaaatatttaaaaaaatattttattttttattttcagccaatttccaaagcgatcgaagcttttctcggcactatgcgcgaatgtgcgcagatggcacgcgactcggcacgcgcgtgtgccatcttttcgcaatggagccgcgaatttggggaccaattgcaattgcagccgaattgggaggtgaaaagagaaaatttaaattaaaaaagaaatgcaaattatttgaaaataaaaattaaaaaggaaaaatatttaaaaaaactttaattcaaaatcaaaaatggaaacggaaattcataattaatgatacaaatttaaaagttaaaaaatccaaatttatctatctaattaatgatgcttaattatttatataatatttaattattaacttttttgcactgacagttaatgttctacaaagtgcaagacttgcagagcaggtgaaagagcacaaaatgaaatgcaattacaattaaaatgagaaataataaataataattcgatttattattaaaactattaattacaataatttataattaaaaaaaatggagcaattcaattaactaatttgtcaacagatttcgcgagaatggcctcacaaagcattggcttccgccttcgctgagtccgcttttgcaagtgcttattttcgagcacagaaatcgcatggaagaacagaaaggcacaaaatttaaaattaaaatttt

SEQ ID NO: 45215 - DNA, 950 bp, Heterodera glycines
ctggccaaggcgactgtgctcattgacacgtagttgttcaataaggtacttggactttccacagtaaaatgtggtacaaaattttggaactgtcccgcctcacggcggggcttaaaagtattgtacagcataattaaaaccgaaaataattttcgtatatttttcacaatttatttcaaaagacaaaaaaaaaatgattcaattttgaaacgaaatagtgcacaaaagggagggatggttagacgaaaagaggaatttttagaaaagagcgcaccccatctgatattcccatttttccgttccacaactggccaaaggcgactgtgctcattgacacgtagttgtccaataaggtacttggactttccacagtaaaatgtggtacaaaattttggaactgtcccgcctcacggcggggcttaaaaacattgtacagcataattaaaaccgaaaataattttcgtatatttttcacaatttatttcaaaagacaaaaaaaaatgattcaattttgaaacgaaatagtgcacaaaagggagggatggctagacgaaaagaggaatttttagaaaagagcgcaccccatctgatattcccatttttccgttccacaactggccaaaggcgactgtgctcattgacacgtagttgtccaataaggtacttggactttccacagtaaaatgtggtacaaaattttggaactgtcccgcttcacggcggggcttaaaaacattgtacagcataattaaaacctaaaataattttcgtatatttttcacaatttatttcaaaagacaaaaaaaaatgattcaattttgaaacgaaatagtgcacaaaagggagggatggttagacgaaaagaggaatttttagaaaagagcgcaccccatctgatattcccatttttccgttccacaactggccaaaggcgactgtgctcattgaca

SEQ ID NO: 45216 - DNA, 1086 bp, Heterodera glycines
catgctcgagagtatttgtatgtgtataaaatttctaaaaaagagatagccattttctgggatagagtataattaaaaattccctcaaataaaagatcgattgcgcaccgccctccctatcatgctcgagagcatttgttgtgtataaaatttatcaaaaaaagagatagccatttttctgggatagagtataaatttaaaaattccctcaaataaaagatcgattgcgcaccgccctccctatcatgctcgagagcatttgttgtgtataaaatttatcaaaaaaagagatagccatttttctgggatagagtataaatttaaaaattccctcaaataaaagatcgattgcgcaccgccctccctatcatgctcgagagcatttgtatgtgtataaaatttatcaaaaaaagagatagccatttttctgggatagagtataaatttaaaaattccctcaaaaataaaaggtctattgcgcaccgccctccctatcatgctcgagagcatttgtatgtgtataaaatttatcaaaaaaagagatagccatttttctgggatagagtataaatttaaaaattccctcaaaaataaaagatcgattgcgcaccgccctccctatcatgctcgagagcatttgtatgtgtataaaatttatcaaaaaaagagatagccatttttctgggataacctctaaatataaaaatcctctgtgaaataaaatggcgattgtgcacagccctccgtttcatacgcaagcgcttttgtgaggtataaaatttatcaaaaaaagagatagccatttttctgggataacctctaaatataaaaatcctctgtgaaataaaatggcgattgtgcacagccctccgtctcatacgcaagcgcttttgtgaggtataaaatttctcaaaaaaagagatagccatttttctgggataacctctaaatataaaaatcctctgtgaaataaaatggcgattgcgcaccgccctcactatcatgctcgagagtatttgtatgtgtataaatttatcaaaaaagagatagccatttttctgggaagagtataaaattaaaaattcc

SEQ ID NO: 45217 - DNA, 1048 bp, Heterodera glycines
atgtatgagcatattccggacagtcatgaagcgcgagaaggtcaatgacagaggatggcaaacgccaatttatgttgttttcaggacagcaaattggctattaccaatgggtaccattttctggattattattcattcgctgccaccattttcttggcacttttgccattcctatgaatccattgattaggtgccgttcattctgatcgcccaagcactgatgttttctttgccgtgcattctgtggcgattgctcaattggcaaaatggtccatcatcgatttgccaattgcttttgcttttattcacatctttttttcctcccaaaacaggcaccaacattcagcaactgatttcggctgcttgtgaggcgcgttcagtgatcgacgcggatgagagggaacgcgtggtgggcgcggtggcgcggacattcgtcgaaatgttggacctgcgcgaagtgagtgtggtggaaagacagacactattttagggaattttaatggccggatatccgattctggcattcgtattgactttgtagtcctggctgatcctggcaatccatcaccattaattattgcattgacatttcatttaaacttttaaacataatcacgcttaaaacaattttctaaaaaagtattacatattttgctgttctttggtctcatcaaatttttaaataggcaacagaaagcggcgagattaattaatacacaatttaaaataaagaattttgggatgccattcaattttatttatttgaaattaaatttttttaaatttaaaaataaggacacaaacagcgaagtacccccaaaaagggatgattaattcaccattgatcatgattcatgacccaatgatcagattcaaaatcggccccacccttacgcttcatccctcgcccgtttcaacccaattcggctgatgaatggccatttggtctgttccctgtatttgttcaccaaagtgtgctattccgtcaacattatgctccaatttgctcttctcaatgccgcactgacctcaaaagaccattttctgt

SEQ ID NO: 45218 - DNA, 502 bp, Heterodera glycines
tatataattttaaaaatatttcttttttattaaaatatttatattttaatgttgctaatttttaaatcggatttgttatttgatttttatttaatcacgtagcattgttgtagattcatcaagttttccgctgcgtcaattagttatttcaaatataaattaattttaatttttttaatatatttcattaaggtatgaattgtaattattaatttatcttcttattatttttccttttatttaaatttccaggaaaatgctcatcattacaacattaacaccactgtcattcagatgatcattttttattatcgatccaagcatgtttaaaataattattttttaagcggaggggggaagcggtcgaaaaattgttggtcttttgttttgtttttttttcaaaattttgaacatttgaatgtgtgtgtgcatattttaatgtgttacggaagggacatctctttttagcatggattttttcatacaaaattttttttaatat

SEQ ID NO: 45219 - DNA, 1121 bp, Heterodera glycines
tctttcagtgtctgccttatcaactttcgatggtagtgtatctgactaccatggtgatgacgggtaacggaggataagggttcgactccggagaaggggcctgagaaatggccactacgtctaaggatggcagcaggcgcgcaaattacccactctcaacgcgaggaggtagtgacgagaaataacgagaccgatctcttatgaggccggtcatcggaatgggtacaatttaaaccctttaacgagtatctatgagagggcaagtctggtgccagcagccgcggtaattccagctctcaaaatgcatagaattattgctgcggttaaaaagctcgtagttggatctgtgctagccgtccggtgcacactttgtgtgttactggtttggttggcttttctgccggtctttccccggcgttggcctttaccggtcggcgtcggtgggctggcgagtttactttgaacaaatcagagtgcttcaaacaggcgtttcgcttgaatgttcgtgcatggaataatagaagaggatttcggtccgattttattggttttgctgaccgagataatggttaacagagacaaacggggccattcgtattgctacgtgagaggtgaaattcttggaccgtagcaagacggactacagcgaaagcatttggcaagaatgtcttcattaatcaagaacgaaagtcagaggttcgaaggcgatcagataccgccctagttctgaccgtaaacgatgccaactagcgatccgccggcggatttattcgccctggtggggagcttcccggaaacgaaagtcttccggttccgggggaagtatggttgcaaagctgaaacttaaaggaattgacggaagggcaccaccaggagtggagcctgcggcttaatttgactcaacacggggaaactcacccggcccggacaccgtaaggattgacagattgatagctttttcatgattcggtggatggtggtgcatggccgttcttagttcgtggagcgatttgtctggtttattccgataacgagcgagactctagcctactaaatagttggctcattgcttctgtgggcacaactgcttagagggattttcggtgttcagccgcacgaaa

SEQ ID NO: 45220 - DNA, 568 bp, Heterodera glycines
tgccagtgctaattattctcctaattaagttggcttttcttagaacaacgaaccaatggacggttcagctttattcatttaaatgtgtaaaattaaataattgaataaaataaaattgaaattaatatgcctaatttccaagttttttggcaaatttcgattaattccgttttcaaatgcattttgctcatttcttgtttatttcactttttacttaatgatatgtggaggtgtgccgtgactgaaaaatcccgtgaatcgtgaccgtgaccgttaatttttgagtttaatttttctctggtgctgaatttttttgcgttttttggggaacagggggtccggtgcgccgataggcgcatgaatgtgcacagattttaaccaaaaaatggccaaattttgcaaatttgagccattaaaataattggcttaattagaagtgcgtaaaatttgtaaaattcgaatttttagaagataagcattgaatgctatagtaacatgtaaaacattggagaggttttattattttagtttttaaaaaaatttgatcacacataacttatcattaact

SEQ ID NO: 45221 - DNA, 736 bp, Heterodera glycines
gatgaggcggaggaggatgatggcattgccgtggtgttccgttgagtcgcctgcaaattcttgtcccatttgctgaccgtccgctgcactttgttgctgtacatggactcaatgtaccttgaaatttgaatttttgaaattttaaaatgtcaatgccatccatcaacatccatgcccgcctctccaccgctggctgaccttacataagcctcggaatgaagcacccgttggattttcactgaagcagacggctcaacgaacacgggcaacgccattttgggcatcgcattgaccaccgctcgaccagggtcgatgataatctaaattttattttaaaaaatgtaatattttttttgaaaatggacaattttatttctaaaaaacaaatatacaaaattaagatatttttatttttagttgaatttatcagtggtaaacaacaatgttgtacctgctgaacctgcgattgggcagaggacgcattcgttccaacgaggccaacagttccagccgtatagggcggtggcgactgaacaccaaccgcacaagactcagcatttgtcccgtaatgatgttgaatgtattgttgttgaacttcttgagcttgatgttgttgttgttggggctgttgcaaatggaaaagcaccgttgggccaaccgttgacgacgacgacgacgcggaacaggaggacgaagcaaccgctaaaaaatgcacaaatgttgttgaatgaacatg

SEQ ID NO: 45222 - DNA, 1369 bp, Heterodera glycines
atttgggcccaataaattttggcatcgggaagtttatgcatcatatggaggaatttcaaaaaaataagataaataaattttgtaaaatgttattcattttgcaatatttctttaaataaaaattttttaaggataatagatatgcttataaaatcacgttttaaattaatttaggattaacagaaacaaaaaaccgaaaaccggttccgaaacaaagaatcgaaaatcggttttttgggctaaaataaaaaccgagaaccaatggtccgaaaacagcagaacaaaaaaactggaggtaccggttaataaccggtcgtgaacaattagaaaagtataccaatacataagaatcacataaatttaatgattggctttttattttgttcgttcaaataactcaattattatgaacttattggttcaattattttactagtgttcgctatctttaaattacattataattgttatgaaaatcatttattatcattaaaataattttttatgtttttagatacattatttattggatgatataggaaattattatacctaatatttttaagtgttcattgtaaaaatggcaaatatttgtaaatttagtaaataatttaataatttcacggtgaatgtcttccatgggatatctatcatctttgcatttaattattaattgcattatgagaaaatgcacctttgcatttgcatgtagatcgctgctgggaaagaatttttttaatatcttttaattttatttatttttaattttgatctaggtatattgtaattttttaaaattcttctttttgtcttcattagggttttcaaatttgaataaatttattaaattataaaataaaaaatatgcaatacatcattaaatttatttacataatcacttcttttttaaattaatcaaaatgtaaatgataaaaaatatctgtaagtttttattgaataggcgacatgaacatttaatttttttggagaataccgattcacatatgactacgaaaaacttcattgagtttgaacaaaataatatattaatataaaaaaagaaattaatttatatataatattaaaacttatcaaagtataatcattttaatgaaaatatctattctcgacataatgacaataaaaaatgatacgcttttattggacagtgtgaagtgatataattgaaaaaagaatatacaaaaaaatcaataaatttgtttatattttgtgtagggtgtatggattaaataaacctcttaaaggccacaggagataaaaatttaaaagattagctaagtaaaataaataagaggcaatatgggaaaaagcaataaaatgataattacaaggagtaactaaaggacat

SEQ ID NO: 45223 - DNA, 77 bp, Heterodera glycines
catgccgctcggcaaggcctacgacaagatgatcgattccaagttcgccgacatgaagaactcggccggtcgctatg

SEQ ID NO: 45224 - DNA, 1642 bp, Heterodera glycines
  unsure (1)..(1642): unsure at all n locations
tgagctctgtgcttaagcatttgatttcaaccctttttattgcctttcaatcgctttaaatcggaaaatacgctatttttttacggatgtttaaactgttatatctcgtcaaatgttgtttttaatggggtttacactatacattcagtttttagagagtgaaaacaaaaaatggtcaaagaccgcctcatggaatttcaggtaatagaaatgactgccttttccattttgttacgatatttatacatgcttttggtattttcagcagttgtccggtatgaatcggaacattgccgctaaatgcaatccgtcatggaacagaccaatgaaggaccgactggggaccctaaaaccggtcggttttttgttttattttcccaattaatgataattgcgttattaaaaacatttcaaggccgaggatgaccatttggtggcgagccaaagtcagttcatggaagactttttcgagcaggttgaagagattcgggccagcatcgacctgatcgccacgagcgtggaggaagtgaaaaagaagcactcggccattctgtccaacccgatcaacgacccaagtgagttttttgaggaaaagtgaagatgtaagactaaaatagagttaagataaaacagactgtagaattggcaggcgtgtggttacatagctccatgatgacctaacctacctatatttttctttaaacgaaaatttttggatttaccaagaaaaagcgggttcaatttttcctcattgaattttattcatatttcgggatggggcgggggttttccgtcgtttataaatagtcactttcgaattttttaaaagacaatttaaactttttaaagaaatcaaagagcagctggacgaactgatggtcgagatcaaaaaaactgcgaacaaagtacgcgggaaattgaaatgtcagttcatttgttactttttatttgttttgggttttatttcatttataatttattcggattggactttttcattcaaaagtttgcacgattttcaactgaaattcgaaaaggaattgttagtgccaagacaaggctccaccatcggaatttaaatacttttttctatttccagccatcgaaaataacctcgaccacgacgaaaacggaggacaagcgaacgtcgacctgcgaattcggaaaaaaccgagtgtcaactttcgaattcggataaaaaaagcgagtgccgaccaacgaattcggaaaactcagcacgcaaccctggcccgaaagttcgtcgaagtgatgaccgactacaacaaaacgcagacggactacagagagcggtgcaaagggcgcattcaacgccaattggacattggtcagtgggagggcacacgactaacgacggactcacttttggggcccttgtatctagtgnggaattaggaaaacccaactctgaaagtgggcggggaaagaccggactggcataacttggtgccaagcctggttttctggggaatggctgctttaatattttatgtcgtctcgtttatacaaagtgaacatctgtgccccttttaagtgggtcttcagatgccgnaaagaggaagtggaccgtgcgattgagaatggcaatttgtcacnnatgtcgggggtcgggtggtccacatga

SEQ ID NO: 45225 - DNA, 1133 bp, Heterodera glycines
ttcacatctatgtaaatttagactaaggaatccttgcaattgacctaactttctgtcagtattttgtaatgtttactttaaaaatttctgaatgtctaccaagcccttgaaatttaattttcttccaaggtccttgacaatgacctcaatctgattatatctccgagatttggattgaaaaatcgttttcttgtttgttagttttttggatcagcccatgagttgatctaatcctgtccatagctttggtattgtttgatcactgtccataattggtcgtaaactcttgatttatttgaaaattggtctgattctgactgaccagcagttccttgaaatatgattaattaattctgactaagttaattaatgttcggactagcgggtccttgcagagaaaatttttggaaaaaaaattaaattaattaatattttattttccatcagaaaaatgtagttggcccccggtgtgatcagtgccgtcccggcacatttgatctgcgcaagtccgacctgtacggctgctcggaatgcttctgcttccgcgtcacggaccgatgccgctcatcaaattggcccatccaaacactgcgcattccggacgagtcgtggagcctcaaaattggcaataagtgaaatttttccaaattttaaaaatttttcataaaaaaaattgccaaattttgccaaaaaaggtcgtcaacaaatggcacaatttttgtggaagatggtcgaattgtgtacgcacctgaggcgggcttggttccagatgagttgccaatggaagtaaccttcgaggcacgccttcagcctggcatggacgtaaatgtttttactaaaattaaataaaaaataaataaatttataaaaattcatttttaaatattcatcaaaaaaacgatttaaaaatataataaaatattaaaattaagtacacgcgcatgtatggactgcatttgtcttatgccatctccagcttcccaagctcggaccgtcccaaaacattctcacaacctgacgtccgattggtaattttttgtaatttatattttaaattataatgtataaaaaaatcaaaattttattaaattaaaaatcactttatatgttttttagtgcttaaacaattcccg

SEQ ID NO: 45226 - DNA, 967 bp, Heterodera glycines
tatctcctcgccttctgccgttcaacattcccaaacagtttctgtccaattgctcgatgtcaacgatgaaaccgttgttccggtcaatggcgctgtgattccgtccccctcattcatccagctaagcaatgacaatcgaccccttttgcaaatgtccaatggccaaaccatcgaattggtgtcggccaatgggtttcacttctcggacggagtccaaaatgtggaagaagtctcttctgaagggacttcttcctcttgcggaggctctcgactcactcacaattatccaccaacgactttgctttcgacggcagaagtattttcgccccaacaagttgagcctgtgtacgtgaatgagaagcagtacgcgcggattttgaaacggagggcagcgcgagcaaaattagaaatggaaggccgaattccgaaacaaagacgggtggggagaaggaaggggaggataagtgtgcaaatgccatttaacagaaatatttgcacgaatcgcggcatcggcatgctcagaatagggccagacgtgctggaggaaagtttgactcgggacagcctcgggcgaactcctccgcttcagttcaaggctcagagggaggagaccaagagagttcgaagaaagacggaagcgaaccgatggacagacaaatgccaaaagacagcccagacaaatgaccacaaaacattttataccctcaaggaatgatcaaaagatgtatacctctactcactgttgtaataataaaacacagacttttatggaaatgatttacatttgattaaaccaaaaatcatttccatggttattggcgacagagacgttacgaccaaaaaccgggcacacgagttaagaaacccaatttcaaacacttggaaaaaccgtcaaatttacgcagttctttaaggttaaaaacgtaaaattattaacggaactatcttcaagttcgcaaattttcag

SEQ ID NO: 45227 - DNA, 1115 bp, Heterodera glycines
tttttctgagaattaattcacaattcccgcagctcttgcggtaatggaaaaattttgaagaggctctgcggaacggattagcatcggggttacgagatagaaaattgtcgtaaaaagagatagccatttttatgagaattacttcacaatttccccagctcttgcggtaatggaaaacattttgaagagattctccggaacgcatcaacatcggggctatgattagaaatttgtcgtagaaagaaatattcattgtttgtagatttaattcgcactcgccactgctgtggtggtaatcaaaaacattgcgcagagagtcgtcggcgccctcttccatagaggcggagacatacattaaagccccataaagcgagacccccttttccgaaaatagcaaaaaattggatcatcgtttaaattttaaaagttaaaatgaaaatgaaagtataaaataacatccgattgatgaggacggctaacttaacgggaataaaagtacactggtaagaatgggggtccgagtgaaaaaatttgaagaaaattggtgggaaaatagtagagtgccacgggaccgggaatttttgccaaacccgggaccgggactttccgggacctgagaagccgggaccgggccctcgattttttttcgggaccgggaccgggcccgcaagaaaatccgggaaccgggaccaaccgggaaattttaaaaattcaaaaaaattttaaaaatttaaaaaaaaattcaaattttaatttatatcaagtgaaaataatacaaaattatttggttttttatttaataaattaaattaatgaaaattttcaaacaaattttcttcaattatttcaaacaattaatcatttttggactaaatcatcgaatattaatagaaattcagatttgatttccacatcacttttttcggagcgctttttcaaaaaacttttgggaaagaaggggtccggcggtgccgataggcgccgccgggggaaattttaaaaatttgggtgcaatttgttaacagattttcaacaaaaaaaggttggtttttgcgattattaagctcaatcttacatttggcataagaagaattgtgaattttgtcaaaataaaa

SEQ ID NO: 45228 - DNA, 1040 bp, Heterodera glycines
cactaatagtgtgtttgaaaacgcacgaaaaatagttattgacaaaaaatggctatctctgaaagtcacgattaaatccctaccgtgaattggacaccaacttttgtcttctgttgtagcgctgaataaagcactaatagtgtgtttgaaaacgcacgaaaaatagttattgacaaaaaatggctatctctgaaagtcacgattaaatccctaccgggaattggacaccaacttatgtcttctgttgtagcgctgaataaagcactaatagtgtgtttgaaaacgcacgaaaaatagttattgacaaaaaatggctatctttgaaagtcacgattaaatccctaccgtgaattggtcaccaacttttgtcttttgttgtagcgctgaataaagcactaatagtgtgtttgaaaacgcacgaaaaatagttcttgacaaaaaatggctatctctgaaagtcactattaaatccctaccgggaattggacaccaacttttgtcttctgttgtagcgtgaataaagcactaatagtgtgtttgaaaacgcacgaaaaatagttattgaaaaaatggctatctctgaaagtagtgtgtttgaaaacgcacgaaaaatagttcttgacaaaaaatggctatctctgaaagtcacgattaaatccctaccgggaattggacaccaacttttgtcttctgttgtagcgctgaataaagcactaatagtgtgtttgaaaacgcacgaaaaatagttattgacaaaaaatggctatctctgaaagtcacgattaaatccctaccgggaattggacacaacttttgtcttctgttgtagcgctgaataaagcactaatagtgtgtttgaaaacgcacgaaaaatagttattgacaaaaaatggctatctctgaaagtcacgattaaatccctaccgtgaattggtcaccaacttttgtcttttgttgtagcgctgaataaagcactaatagtgtgtttgaaaacgcacgaaaaatagttattgacaaaaaatggctatctctgaaagtca

SEQ ID NO: 45229 - DNA, 499 bp, Heterodera glycines
ggtatattttctgaaatttttttagatcatttcttagtggtgtattttctgaaatttttttagatcaattcttagtggtgtattttctgaaatttctttagatcatttcttagtggtatattttctgaaattttttagatcatttcttaggggtatattttctgaaattttttagatcatttcttagtggtgtattttctgaaatttttttagatcatttcttagtggtatattttctgaaattttttagatcatttcttagggtatattttctgaaattttttagatcatttcttaggggtatattttctgaaatctttttagatcatttcttagtggtgtattttctgaaatttttttagatcatttcttaggttctatattttctgaaatttttttagatcatttcatagtggtgtattttctgaaatttttttagatcatttcttagtggtatattttctgaaattttttagatcacttcataggggtatatttt

SEQ ID NO: 45230 - DNA, 1301 bp, Heterodera glycines
ttgcatttgtcgtaattacacctattatgataaattaatgaatatgttttcgtaaatattgaatgtagctattctcgagttgtgtaaaattttattaaataaatttttaaaatgaaaaaaggaatttattaaattaaattcaagaaattgtttttaattttctcctcgcagtctccctaccgtatatacaattaatacttttatttttctcatttatttttcattagtttatattcaatttcatttttctctttctcattatttttttctcaccaccgtaccatttttttcctttactctttgtactctcctaagcgtatgtgctatttctcttcacttaacagtttacggtattttttttctactcctttctctgctaaattatcctcggcgtatgcactatttcatttgtttctcattcttttttgattatttcttcaaatatctattctttctccgcacactacctcctttttctcaattgacaaataaacagatggacaaaaaaattcaacgccatccgtaagatgagcaaaatatgagaaaatgggccaagcttcatttaaaaattagcgccaaaaataaagaaatgtcaatgcttcatttactgccgccaaaggaaagatgtcatttgtcaaaaattcttcacacaattatgagaaaatcttgaccggtcaaagaaataacagtcgtaaattaagagaaaagggtgacagttgtcaacatgtcgtcgcacaattacgaataattctatggtcaatcaacaaattgacgccaaacatgagaaaaaaagacgccacttgtcaagaaatttggcgccaaaatgtgaatatgagtcaacttcttacaaaatagctttaatatctgatgctagacggaactgatcaacgttgggcttaaatgtgtaagcacgcagggacttctaatcggtgtgggcgtgtcacgctgatcagctccccgaatatcggccggttcgtacaccctgtaatttacacaaatcattttaaaaattttgctaattttgttgttgcttttttggtctcactatattctgttgctttcctctcctcgtggctttttcaggaacaatttttaaattcatgaaataaaattaaatatggataattaaaataaaaatgaatatattattttcagttgttagttgggttttaattttaattttatttttaaatattcactacatattttcattattcacacaattagttcaatgtccttaattttatgtaattcttcaactttaatatatttacttgatattttacactgtcttccactct

SEQ ID NO: 45231 - DNA, 1278 bp, Heterodera glycines
ggactggagataacccttctgcattttatggttgttttttaatttactacatgcaaattaaaaaatatatatttaaaaaggtctctgccaccaccctgccttcctgctggacttcatctgtgaaatcaatgaaagcaccgactgacgatggacgctgcccgatctgagctgctcgccattttattcgaatatgacaaaagcgatacaccatacaggacgccgtcattatgcgaattttggcggacgcgaaatgcaacaacaatggcgaaataaatccgtggcctgtgacggcgatcggtcttcaaattggaggacatcagcaaaattgaaggatttcgagaatttttttggttcattgtccatgttccgtaatgatttttttgataattttaataaatttattcattttcactatgtgaagtttgtctagagatagaattcggattacttgggaacccaaaaacttgttcgaactttggtcgccatcttgtatagaattcttagtttattttatatttatatttggatcaagggttaggcaaggggtaatataaaagtcgtgttcctattcagcgaccccgaaaaccctaaattagactccttttccgggtttttatgagctttttcgagttttggacatttcgtgttttttacccttatggacatttcgaggcttggacatttcgtggcttggacatttcgttggtcagcgtttccgaaagataaatccaatttcaaaaatttgaactttcgattttctgttcgaattcgggtccgggtttaggaattggtcgaaatggatgtcatatttgtaataaacggcccgaaaacccccgaggacaacgtagaatcgtaaaaaaccgcctttttattccttttttgggaccagtaaaagtcagtattaccgtccatttttctattgggttcaattccccattaggataggaaattttcattggtaattgccgaacacggtatcaactcaaaaaagtgaagaccgattttcgaacaaaattgaagcccaatgagtataaaataattatttataaattcattactttaaaaaattacaaatatttttttgacccgtgataattgaaaaaggtagaacaaatgaatagaggataagttcagtcggtaactcccgttctaaaatttctttttttctaatcaaatgcttttttcgaagggtatttgaaacaattaaaaagtcgatttgtcaagtttatgcaccaatccaccaaaaagtttgaataaaaaattgattaaaaaaacatc

SEQ ID NO: 45232 - DNA, 1091 bp, Heterodera glycines
  unsure (1)..(1091): unsure at all n locations
agtcttttaaaaaggtactttaagttgagcttcctctaaaattntcagcatagcattatganatacttaattaattacaattattaccaatagcacatcatatggcgaagagcggtccgtacaccgagagataaaatcagacttatattgagttcggttcgagaatgggtcagttattcctgaatatgaactctgaatgccattcaatgggcgcgtgacactctgaaaattcggttttaaaaaaatttattttgggttctttatgaaatcatacagtatatttgtatagttctaactgttatttttattattagtcgctccaacatatgcacaaaaaattgctaaacacgctcaataaaagtaaaaatatgcatataaattttaaaaattgaaaataaaatccaaaataagccaaaattattaattttgattataattaattaaaaatctaaaattccttttttaaattttttgaaaaattttgtacttataggtgagccgtgttcacagtggattttagaaaaaatgctattcgtcatattttttagattaaatataaaataaataaaattaaaacaacaacccacagcataataatcggtttctgttaaaaaaaatttaagctcgttcgtttgatgctcaacgtgtcttgacaatgctgcgaattttgcttctacaaaatgatgcagtttttgaatcgccttgaattcctcggattctggctaaaataatgaaattaattaatttttatattccgattaataatcccggtgttatatcgttcttttttcttactttgaaggctaagtcagccccggccgcaatcaaactgccaatttgggaggcgactcgaacgaaagtgatggcatgcttactgacatggcggagctttgaaatgatgtcccaagttgaagaagttagcgcgaaaatttcatcagctaacttttggacatcttcagtgtctaaaaaataaattactaattgttatttaaattacgcgcataaactggaatagagccatttaaactacatgctataaaatcctctatttataaatttgtttgttgtacagtctaatatgagttttagta

SEQ ID NO: 45233 - DNA, 947 bp, Heterodera glycines
tttccattttgaattgaaaaagcaaaaatcaatgactgtttgaaattattcccccaaatcaccctaaaccaatccaattaatctttataaactctaatcatagaaatatttttcgagatttcgggggattaattccttttttgaatttaattttataattttcgtttcctaatcatttttttcgaactctgaatgactcgaggagtgtttggcataatcattgaaaatttttgtttatatttcgtccatattcaattttgttgattttaggttagatttagtaaaataaatgtcatttttgcaaaaattctcaaatatttgttattaaggaatttttcaataaaaagtacagcccggacttttctttataagcacagtttgcgttcgtgcaaaagaacacttcaacaaataaaagaataaattaaaaaagcgattttaaaggcgaaaatcgcaacggaaaaaattaattaaaaatcaaaataagagagaaaggtttacaagaacaaaggccattttggaaaacaaacaaaatgaacaatttaaatatgttttgtttttaaagtaaacattttacaatattaataggaaatggaggaaaagaaaggaagacgagggaatggaagtgaattggcattccctggggggggggggggtccaagccaagggtttgcttctgtcgtgcatcgaatctcccgacccgtgcattttctttgaacctaaaattctctacaggcaagaattatgcaaaaaaaaagttattcattactggaaattttacagaaatgccgttgaagaagtgccgatcgacaaatatttgctgccgcttggcaaggctgaggttgtcaaactgggtcagtgcattttaagtacaattagacgtaaattacgaggcaaataatccttaatttagggactgacgtcactttggttgggtggggccctcaatt

SEQ ID NO: 45234 - DNA, 880 bp, Heterodera glycines
ggcgcatcgtttcggggatactgcccctaaaacaaaaaaatggattttttcaagtgtccgtttggggtactcaaacaattatggggagaaaaatccaacgcagaattaaagtacaggctatagggaagctattcccgaaggattcggtctccccataaatctgggcgcatcggttcggggggactgccccgaaaacaaaaaaatcgattttttcaagtgtccgtttagggtactcaaacaattatggggagcaaaaatccaacgcagaattaaagtacaggctatagggaagctattcccgaaggattcggtctccccataaatctgggcgcatcggttcggggggactgccccgaaaacaaaaaaatcgattttttcaagtgtccgtttggggtactcaaacaattatggggagcaaaaatccaacgcagaattaaagtacatactatagggaagctattccggaaggattcggtctccccataaatctgggcgcatcggttcggggggactgccccgaaaacaaaaaaatcgattttttcaagtgtccgtttggggtactcaaacaattatggggagcaaaaatccaacgcagaattaaagtacagactatagggaagctattcccgaaggattcggtctccccataaatctgggcgcatcggttcggggggactgccccgaaaacaaaaaaatcgattttttcaagtgtccgtttggggtactcaaacaattatggggagcaaaaatccaacgcagaattaaagtacaggctatagggaagctattcccgaaggattcggtctccccataaatctgggcgcatcggttcggggggactgcagggaaaacaaaaaaatcgattttttcaagtgtccgt

SEQ ID NO: 45235 - DNA, 1399 bp, Heterodera glycines
  unsure (1)..(1399): unsure at all n locations
ggtgccttattttatgcctttttcagcattttgtaggaaaaaatagaaaattttaaaattttttgcaatttttcttatcatatttcactgcaatttccaaaaaaatttttcccagcggcgcctattcaccgccggacccctagttatatcttggttttttaaatttgaataccaaaacagcaaaaatttattcctttttttgctccgccggtgttgaaattgttgacataacaaggagaaaaaaacattaggcccgaagaacaaaaaaaaggtctcttggatttctgctgccttttccaaattttcgtgccttttttgacgtttttgttcattttttatgccgtttcttcccatagtactctctatttaaattattttctctaccctccttcatatgactgggactgaaagtcagcagcactctctcacttttgagttattctcttctccaactgaatttattactagagaacgaaaaaaagcaccaaaaatctcgaaaaaggcactataataggcaccaaaaaattgaaacaaaggcattaaaaggcacataatcccaaaaaaggcatgaaaaaaggcatttaaaattttggagaattttgaaaattcatagaaatatcttgttaaaaataaaaatttttttgaaaatttactttcaaaaatcaaccaaaaaataatttttanattactaaaatgtgattctaagcctattagatcatttttatgcattttgtatctattgcatcctttacgaagaatttttccaaaaaaataatcatatttacatatttggtgcatattttgtccactttttgtaaatattttacagccctatttattagcgcgcgcaatattttatctttcttttggcattaaatggcattttttctctttaataaaagaaaaaaagaattatggtgtttttgtttgtattttaagactagatcacttttaaataatgacaatcttataatcatcaaaattcaactaaatataacttcttttgtaacgtttttcctataccattcaaaattaattcagtagagaattttttgctttaggaattgcaataattatagtagcagctcccttttttaattttttgtttgatatattgtttcctgtgggcttgtttttttttgaaaatttccccgattttctgtgtattttaggttgtaccgtcgctttgaaggaatgatctgatcaatttgttgtaaaagatgtgaacaaaatttgaaaaactttgaatactactagagcacagtctatttttctataaattaatttctttttcaattttctttttatattataatttcaatacataatttaatgttgcattccgtttttataattcaaatattttttcatttgtgcgtcaaataatttctttgggaat

SEQ ID NO: 45236 - DNA, 985 bp, Heterodera glycines
  unsure (1)..(985): unsure at all n locations
ggctaattcgttcgccgtttgttgggcacagaccactcactccctcactgatcatttatgcttttggaggttgatagaaaatccctgctgctgcttctgctgttcattttacgtctttttcctccgatggttcgctgttacgacggcggacatttgcgggaagcggggggggggggggtaattagggcaatcggtccgacgagctggcggcagccgaagcggcggcatggcccataaatatggcccgttgggatggttgttgctaaacgcactgccaaaagagggggagagagagagtgagaggaaatcataattcattccccgaagcgactcgaaaacattgcatccgcttattttttatggaaaacaccaaacaaatttgtccgatcggattgtcattcataaaatcccaccccttttttgtcggctgatcaaaaataaattccgccctttccccgccttcccaatgtgtgctttgcaaacagaacaaagtgcttttgcttgcttctcctcctcctccgcatattaatcaccagcagaatggcaattgcttctgctgttggtcacagtgcgcgaaacgaatttaagcgccaatcgccgggggatgggccgacatttgcccaaatcagtttcaattcatccaaattcatccacaattcttaggtccgctgatcattcagcgaccgaaaacattttccatagcaactgtgtactgaaatgtgatcagtaataattattgtccctttagaacctccctcccccaatgataactgatcaccgccgctcttcgccgggcaccgacgtggacgacacgtcggcacgggtggccatttatttggctttaaccatctcaactctgatggtcggcatcagtgcaatggtattgacctttttgcacaacgacacggcactgctgctggacgaagtgtcggtcggcatggacgaattcactgtatgtaaggngggggggggggggggggggggg

SEQ ID NO: 45237 - DNA, 1679 bp, Heterodera glycines
  unsure (1)..(1679): unsure at all n locations
tttgctcgttaggttattgaactaaaatgggttttatgtaaccatgaatagaacctttattttaattttaaagattcgacagagtttttgacaattcaaaattacaatttagcagttaaatatgttttttagcttacgtatttcctataagctcactgattctttaaacaactgactaattgttgcaaatttggccactgttgttacttggcaacncattctaatgaaaatctatgagtttgtactctagtaaatccatgcaataaaatttattaaatattatcattttcctgttttttcattaaaaacaggaagaaaatcactcaaattccgccaaaaaggattagtgtgacctagcaaataaacggaccgggtcgactgggcgccgccgactgggcgacgccaactgggcgacgccgactgggcgccaatcaactgggcgccagccaactgggtgccgccgactggacgccaatccccctttccctcactacgattaaatttataaacccgaaataaaaattaattattacatttcgtttaattcttgtttaatgcattctatttactttttgatgtacagtcatggtcatatgtttaggaacacctcttttttttgaataaattctttgaaaatattgcttctctggattgaaagaaaaataatcaataatctttttaatgcattttgtagcattttttctgggctatccattggtaccacacattcctcgtttgctttattcctttttgtaaaaatttgtgttttcttccatatagtcaaatttcggggtggtcatatgtttaggaacactacccatatttttttcatagcattaaaaaaatccaaaaaaaatcaggtaagaataactttgggtgctgatcaaaaaaggtagcaacaccaagttgatcagatgcggttttttgaatattgtagcaaattttgtgctctataaaatgggcctactcaaaatttccagaaaaagttttgcacggaacgaaaacgaaactgaaaactttttgctagccgattctggtggtacatttttgttgaatgaaaatggacccccgcaacggtaggcaatgcgttttgttcgattcactattactttttttgttaggattttgattttcgggcgcatgtctcataatagctgggccaatcaaatgacagaatgttacgctgacggaacattttcattaagcccaccactatttagaattttaattttaatgcctcttcgaagatttttgtgtatttaaaacctattttgcgattttttgtgcctaagaaagggaatttggaagtgggtcttggcgcccagttggcggcgcccagttgagctggcgcccagttggcgtcgcccagtcggcggcgcccagtcgacccccaccgcaaataaatatgctttttgattacaatttgccattgtttcttggcaatgcacgcacttccaaagtctcggtccctgctaattgtttggccgaatacaataataatataaaaaggaaaagagaaatactgtaaagaaacaaaaaaggtccaataaatttacaattgcgtgatttcataaagatatctacaattttgaaaaatatgtagttgccaaactgaaaatctttctatgacattataacaaatgttattaagtgagctaaagttatgattttttattcag

SEQ ID NO: 45238 - DNA, 1167 bp, Heterodera glycines
  unsure (1)..(1167): unsure at all n locations
gcgcagggtggccagcagacttattgtagagcttannaaagcccaattttcccagattttaaaatttcgaaatttttcaaaatttttcgagctaggcctaaaaaacggttttcgggtttttgaattttaggattttttaacgaattttcccagaaaaacggagaccacttccaaaacatagtttttcgagctctatcgactggtatttttttcggaaaaatttcgattttttcccggaaatagaaaaaatttttggcctcagcgggacatttgagtcctgggcccataactcgtcaggggttgattttagcgaaaaattgtcttagaacatttttgtagagcattttaaatgctatcgaatggtgtactacatgatgtaaaattttcaaaaattttcgagctaggccccctagaaattttcaaaaatttttttggggtcgaaaaagtgtgtgaaaaatatttttctggggtattttgaggtgctgagtacgaatatgatgtctattttaagtttcataatttttggaattttttagaaattcgaaaatatttttaatttttttggtccttggaaatttgggttaaattttgaaaattcataactcaatgaaggactggtcaatttaagtgaattaaagctttaaaaatagcaaaaaatcgggagaattttatgagatttatttgaaatttataccacaaaaacaaaaaaagttattccagaaattctggaaattttcgatttttcagaaaaagtacctcttcaaatcaccgttgtacctcttctaatcaccattgtatctcttctaatcaccattgtacctcttctaatcaccattgtacctcttctaatcaccattgtacctcttctaatcactgttgtacctcttctaatcaccattgtacctcttctaatcaccattgtacctcttctaatcaccattgtacctcttctaatcaccattgtacctcttctaatcaccattgtacctcttctaatcaccattgtacctcttctaatcaccgttgtacctcttctaatcaccattgtacctcttctaatcaccattgtacctcttctaatcaccattgtacctcttctaatcaccattgtacctcttctaatcaccattgtacctcttctaatcaccattgtacctcttctaatca

SEQ ID NO: 45239 - DNA, 701 bp, Heterodera glycines
aaaaattatcatggttttttatcttaaaaaattttgcatacaaaagggtcctccccccttttgtttcaaaaactgtcactttccatatagtgccatgttttttgtttctgcttattttcaggcgggaaaattttttttaatttgaaagctatttgttaacagatgattaaattttaatgctttttgggcgaatttttgaccaaattaaaaaacagaaagagaggttccggcggcgccgataggcgcctgaaaatatgtgtcaaaaaagcggataattctagccatactgatcagaatccaagctcagatattatgccatttttattcccttccattgttaatacgaataatacggcgtttaatcggattaacgacaaatcagcaaatgttcgccaaaaattggatatgatggaaacagcgcttgtgcacctaacgactaacaaatgtcagcttaatttcagtgccgaaaaggtcagtgtttggccaatgctaaagaattgttgtaactaatttaattttttttttgggctcaaaatccgttttctgggaggcttgtcactaatctgaactcggtttaccctattttcaaccccctgatccgaattcgaacaaaaagtcgaattttttagttttaattattaaccgagaagtatatgcaatttcccaaatgttattgaacatgtcaaatgtttttccatgaa

SEQ ID NO: 45240 - DNA, 1042 bp, Heterodera glycines
  unsure (1)..(1042): unsure at all n locations
aattaaaaaaatatttcatttaaacttataaaatttattcattaaaaaaaattatttaaatataattttttatttattacntcaaaaaatatttaaatgaataaaaattgaaaaacacgaaaaaaatggtagaaaaataatgtacaccgcccggcttcgaacttcgccccccccccctcaaaatgatgcctcagaatccccaatcacacagggattctgaggccttaacgatgtcaaaagtaaaatctgatcacgtattcgtgatcagcgtcataaaatagccctaatgacatgtttttgaaagatttttggttaaaaaaatttttcactcaaaaatcctggtcacccccctttggacccgaagcacaaaatcacttttatttttatatctttttttaaagaagtgataaaaataccaaataaattttataaaatagagcaaaaaattgcggatttttatattattttacttttccaaaatatcttttcagaaccgagttatgaattttttactgaaaattcgaatttttccagaacttctggaataactttttttagtttcatgatagaaaatctaaataaaacccataaaattctcctgattttttgctatttttaaagctttgttgtatgaaaattgacttaccctgaggttagttatgaattttcaaaatttaccccaaaatcccgagggtcaaaaaaaatgaaaaaaatttcgaatttttaaaaaattctaaaaattatgaaacgaaaaacaaaggtcatattcgtaatcagcatttcaaaataccacagaaaaaaatttttcacccccattttcaacccaaaaaaaattttcaaaaatttctagggggcctagctcgaaaatttttgaaaattttcgaacatgtagtacaccattcgatagcattttaaaagctctacaattttgctctaaggcaattttttggctagaaccaacccccgacgagttatggggccgggactcaaatgtcccgcttagggcaaaaaattttctatttcctggaaaaatcgaaaattt

SEQ ID NO: 45241 - DNA, 937 bp, Heterodera glycines
agaattaaagtacaggctatagggaagctattcccgaaggattcggtctccccataaatctgggcgcatcggttcggggggactgccccgaaaacaaaaaaatcgattttttcaagtgtccgtttggggtactcaaacaattattaaaaatttttagatttttattcatctccctttttgatagtgaaagcatctgagtgcctaaaataacttgtaaataaaatttggtgcgtttcagagcagtttgtgaaaaaatatttatgaattaattttgctaaaaaaataaaatagtgaagctttaaaaattaataaaaaattttaaattcagaattactggagttagcatcatagcagtgcttttccttgtctttttgatgccctcgcaaaatctggttcgcttctgatcagtttataaaaaaaaatataagcctaaaatttttcgcaaatttaaaaaggaattaaaaatttttaaaatatttattcatctccctttttgatagaaaaagcatcagagagccttatttaacttttaattaacatttggtgcgtttcagagcactttctgaaaaaatacttatgaattaattttgcaaaaaataaataagtaatgaaaaagtcagaatttcgaaaaattttaaaaacaacaagcgttggcattttttcaggttaagttagtcctttacaatggagaaggcctgcaaaatttggagagattatatcgattttagtgcgctaggttcgatgaaactttttaaaatataagcctaaactttttggcctgtttaaaaaggaattaaaaatttttaaaaattttattcatctcccttttgatagaaaaagcatcagagagccttatttaacttttaattaacatttggtgcgtttcagagcagtttctgaaaaaatatttatgaattgattttgctaaaaaaataaa

SEQ ID NO: 45242 - DNA, 1293 bp, Heterodera glycines
agcgagttggcaaagaaccaacggcccccagccgccggagcgggccattgttgaaatcgtgcaggagcgagtcggtgataaaaattcaccaacatctgaaaggcttgcgctgtcgaagcgagggacaagttacgccggccggaaaaggttttttgacgggcataaaaatttttaagacaatctttttgaaaaatctaaaaaactaacggttttaattaatttgaatctccgatttattccgagaattatccaagaaacgagactgagactcgcaaaacccgacactgaaaaccgagcatctcgacaagcattaagatatctctccattaataggaaagtcaaactcggagacgtcttccattccgttccacgaagctcttgaacgtttcggcggtgacgtgtcgaaatcaaagtctttcgctcaaaagcgtaaagaggtttctaagtcatataattaaataaaaaaggttttttggatattgtaatgcaatcaattcttgaaatatttggctatttgacattcattttcatgaaaattttttgatgctgggtgggttaaaggcccaaccgttcgctatttgccaattcccccttctctcatgcgcagaagcagcaccaggggacgacagtgcccgagatggtccaccacggccagcagttggcagaattggcgcaatctacgagccaactggcaacggaaaaagaattggacgttgaacaggacaacaaatcgctcaagcatgggccgggcagtggaagtcaccacagcccttcttgaattccatcgttttcgccacgtgatgagtcattggcatgaattttcgctttaaattttaaacttaatctgcctattttaatttcgttcttattttttattctcattttttgcttcgcttacgttttgctttgtgtcttatggataaacttaattctttttggtgccaatttttcatccacctgctttcagtcacaaagggtggcaatattttttacccaattaccgcatttccgtaattaatttgctagactaaaacaaatttagatcgaaaaaatattttttagtcacttaaatccttgatccgtgggtgttcccaaattttaagtctgtccttcaaaaaacacaaaatgaaattattgtaaaagcaaaattaaattttccaaccatggaaatggatgttcacggcaagtctcagaaccaaagaatgtgggattttgacctgtattttctggacaaaaatccgggacaagcaaacctggtttatcccatggctcattctgagaatatgtagctga

SEQ ID NO: 45243 - DNA, 885 bp, Heterodera glycines
ctctttttctgctcaacagtaataggaattccaaccgcattctcagaataattacgccgatactaattgttctggaatttgtttctctgcgcgtttgtttgggaaaaatttggaaaattggatatctcattttctgctcaacagtaataggaattccaaccgcattctcagaataattacgccgatactaattgttctggaatttgtttctcggcgcgtttgtttgggaaaaatttggaaaattggctatctctttttctgctcaacagtaataggaattccaaccgcattctcagaataattacgccgatactaattgttctggaatttgtttctctgcgcgtttgtttgggaaaaatttggaaaattggctatctctttttctgctcaacagtaataggaattccaaccgcattctcagaataattacgccgatactaattgttctggaatttgtttctcggcgcgtttgtttgggaaaaatttggaaaattggctatctctttttctgctcaacagtaataggaattccaactgcattctcagaataattacgccgatactaattgttctggaatttgtttctcggcgcgtttgtttgggaaaaatttggaaaattggctatctctttttctgctcaacagtaataggaattccaaccgcattctcagaataattacgccgatactaattgttctggaatttgtttctcggcgcgtttgtttgggaaaaatttggaaaattggctatctctttttctgctcaacagtaataggaattccaaccgcattctcagaataattacgccgatactaattgttctggaaattgtttctcggcgcgtttgtttgggaaaaatttggaaaattggctatctctttttct

SEQ ID NO: 45244 - DNA, 1446 bp, Heterodera glycines
  unsure (1)..(1446): unsure at all n locations
aaattagttttgctattagcatagtttcttggctctcagttgactggcgctcaatttgaaaaacaataaatagtcacacanctctgtttcacagcagtttggactcaaactcaattatatgaaatcgacattttacaaatagatactttccgtgttcaattttcgtaatttgtacgatttaccaaaatataaataattaacattaagagattttttaaactgcatttaaatcgttttaagaatcatgaacatagaagaattaaattttattattattattttctttaaaattttaaattgcatttgttgttttttatgttttaaaatgttgtattgactagagctaagaaacaaaagaagaaattttttgctcgtgtgaaaatatattctttattttaaaatatgttttaattgattctttctttattgcttcaagtaattttatttcaaatttctcctggcaaggataccttgtgttttcaatgggcaagactaaatgaaatgggtgagcatcaaaactacgcaatttaattatttagataatgaataaaattgaataactttcatgtataatttagaaaggattggttttttaattaattttaggaactaacagcgctaattcctttatcgtatcatcattgtggtttaaaatctacaaaaattcaactatttaaaaaaaatataagacctgacgatctttccctacatgaacaagaagaaatgagtttaaatagcaatgggggaactttaaatgaataattattaaaaaaatttttaaacaaaaatagatacatagaaagaattactaattaaaacaaagcacccaaaacatgtggttaaatttttaaatttttaaacgataaatggaactgaatttattataaaaattatgattgaaatgtaaaatgaaaattaaataaataagaaattttaattaaaatctcaaaataaacaacaacaaaaaaatgtctagcatttgtcgtcagcataaatataaaatttatcttgttatttatttattatcgaactaacaccaagtgaaaaatatttttaattttatatactataccaaaatataatatcgagaaaattagagtaaaaaaataacaagcattttgaaatcaaaatttttttaatgagttcaagcgatatgtaactacaataatttatagacactttagcttaaaatgtatttttcctgaatatatagagttaaactgctttgtactacatatcttataatttcattttccattgtgccatcatggtactgcataatctagtaaactgggcattattcaacataacgattgtgagggtatgatttttcaaacatggttaaaaacacttttaatataatcggacaaaaagccgaaacctggcaaattagatttggattgggacattttttactaataaaattttttaacatgattaacaact

SEQ ID NO: 45245 - DNA, 1211 bp, Heterodera glycines
aataacattcacggtgcgaaaaatggggtttgacaagtttatttggggaaaaaaagactttacaaaataatacccctgggagaagggagtgggaaacatgatttcaaaattttcaattttttctagtctaatctactcaaaacggttcagaattcaataaaaataacattcacggtgcgaaaaatggggtttgaaaagtttattgggaaaaaaagactttacaaaataatacccctgggagaagggagtgggaaacatgatttcaaaattttcaattttttctagtctaatctactcaaaacggctcagaattcaataaaaataacattcacggtgcgaaaaatggggtttgaaaagtttattggggaaaaaaagactttacaaaataatacccctgggagaagggagtgggaaacatgatttcaaaattttcaattttttctagtctaatctactcaaaacggttcagaattcaataaaaataacattcacggtgcgaaaaatggggtatgaaaagtttattggggaaaaaaagactttacaaaataatacccctgggagaagggagtgggaaacatgatttcaaaattttcaattttttctagtctaatctactcaaaacggctcagaattcaataaaaataacattcacggtgcgaaaaatggggtttgaaaagtttattggggaaaaaagactttaacaaataatacccctgggagaagggagtgggaaacatgatttcaaaattttcaattttttttctagtctaatctactcaaaacgggttcagaattccataaaaaaaacattccccggggcaaaaaagggggtttgaaaagtttattgggaaaaaaaattttacaaaaaaaaaccccccgggaaaagggaggggaaaaatgatttcaaaaattttaattttttttaacctaaaccactccaaaagggttcaaaattaaaaaaaaaaaaatttcccggggggaaaaaaggggtttgaaaaaatttttttggggaaaaaaaaaattaaaaaaaaaccccggggaaaaggagggggaaaaatgatttcaaatttttaattttttttaatttaaacttccccaaaagggttcaaaattacaaaaaaaaaaaaatttcccggggggaaaaaaagggggggtttgtaaaatttttttgggggaaaaaaaaaaaatttttataaaaaaaaaaaaccccc

SEQ ID NO: 45246 - DNA, 769 bp, Heterodera glycines
tctagagtcttatctgaacaatgaaaataattcaaaaataaatgcgaaatatgtgccgtcggagttggcacgcacaatataaaacaaaaactcgcctcgttggtgccttcgatgatttggtggactcggcagtcgcgcaggtattgctgcagggcgtagtccttgagaatgccgtagccgccgaacatttgcagcgcttggttaatcaccttataagcagaaaatttaggttggcaaattgggggattcaaatcatttaaaaatgccatttcccaaatgtggcacaaaattccggaaaaatagttggaaaatgcgttcttttcacgtcatatcacacaatagaatgaacccaccgtgaatgcctcgtcagttatgtacattttggccatggcgctcatcgccgatgcgttcggagtgtcctcctgcaaatggtggcacgcctcgcgcagcaaaagtcgcgaggtgaccagctgaaaatggcattttgaatcgagacaaaatttgaattaaaaaaacactgaaccctctagaaaaagcgtttgaagtttaatggatttgaatgaatgacccaatttaatggaaagtgccgaccgacctttgtggccatttcggccaatttgaactgtgtccattggaattgggagatggacttgccaaacgcttgacggacctgaaaattggaaaatattttcccgacaattgctctgtccatttccaagtcggtgtcaccaacttttgtgtgttcgatggccaagtccatgctcatctg

SEQ ID NO: 45247 - DNA, 837 bp, Heterodera glycines
cgtggcaattgggtctttggcaccgatgaagttcagctgaatagtttgagtggctgcgacattggcattgataacactgtaaaaatttaaaaaaatatatatatatataagaaaaaagattattttaaaccaaaaattcattaaaaatttataaaaatattttaaaaattaaaaaaaaatatgtaattttctagtaaaaattagattatgttttacataaacagaaaattagtgttatatacatcatccatatcccgaataaaaacatttaaaatataaaaaaaatcatattttaaataaagtcaattgaaaacgcattatttttagcaataaaaaataaaattaaaattaatttttcaatttgtctttatataaattaaattaaaaaagaagaaaaacattattttgaacccaaaaaattaatttaaaaatgcattaaattttttctaaaaaaagttcattttaccaaaaattttaatgtttgcatttaaaataaatatgtagatattttaaaattaagaaatgaaaaattttaagcaagagatttataaagggattttaaataaaaagaaatattttaatttattgtttttttcgcggcattttagcattttttaagaaactttcattttaaacctaatattgaaaattgggaatatttttgaaaaatataaattatataaatacgaaaattatatatgcattaaatcctcatttcgaattttagcattatctctttctttttataattgtaatattttatgccccgagtggacaatggcatcagattttggcacaattttgccggaagaaattgctaaaaataaattttcaaaa

SEQ ID NO: 45248 - DNA, 1154 bp, Heterodera glycines
  unsure (1)..(1154): unsure at all n locations
ttttttttttttttgttttggggggggcccgggggggcccccaaaagaggggtttttaaaaaaacccccccccccgttcgcttttgttttttttttttttttccccccccccccccgagggcgccccctttttttttttttttttgtgggggggggggggggggggggggggggggggggcccccccccccccccccccccggggggggccgggatgatacttcggtgcaganaattatnaaatntnaaaattnnntaattgcttttanaatatgccaaaaaatgtaggcnttacttttntagtganaattcgatcactcatattttttgctaatgnagcagaagcgtaccaaactttgcagggatactccccggtaaaggactaacttacactgaaatgagcgccgagctagctggctcaaaaaaattttcgaaaatctgagtctttcgtttttatttgttttttgcataattaattcataaatatttttttcacaaaatgctctgaaacgcaccaaattttatttacatgctagtttaggcactctgatgctttttctatcaaaaagggagatgaataaatttttaaaaatttttaattcctttttaaacaggccaaaaagtttaggcttatcttttttttcagaaacttatcagaagcgccccaaactttgcagggatactgaaaggaagagaaataacctattttaaatattatctagtcagttcatttaaataatttttatccaaaaaatttttttttgggttttcggggcagtccccctgaaccgatgcgcccagatttatggggagaccgaatccttccggaatagcttcactatagcctgtactttaattctgcgttggatttttgctccccataattgtttgagtaccccaaacggacacttgaaaaaatcgatttatttttgttttcggggcagtccccccgaaccgatgcgcccagatttatggggagaccgaatccttcgggaatagcttccctatagcctgtactttaattctgcgttggatttttgctccccataattgtttgagtaccccaaacggacacttgaaaaaatcaatttttttgttttcggggcagtccccccgaaagaggcgcccagatttatggggagaccgaatccttc

SEQ ID NO: 45249 - DNA, 1008 bp, Heterodera glycines
aattgggagaagcatggggctgtagctgaggacccaaaatggggccccattgggggaattaaacatgatttctgaaaagtccctgaaatgtcgattttttctttctatagcttcttgtagagctcgagctgctctttccaatggtcttatcccggtctcgatccgtgcagaactcaaaaagttatgaagtgaaatgtgaaatatgtttgcaccacaagggattttttctgaaacccatcggaaccaaaaatctagggtttggtataagcgttttagaaattgcggagaaaaaagcttcgatattgagaaaccaagtcaagtccagaaaagaatagcttaaaacgaattcgttttggtttggcattatgataccgaataacattcggaaattatggaaacaaaattggagaaattcgaataattttttgacttcaaatttttcccagttttgattgggttttcaaatagtagtttggttcagaattttcccctctacaaaaaaaaatttataatagaattttttattattaattcgaaatctttaatttatttgacaaatccaagacttaaaattgggagaagcatggggctgtagctgaggacccaaaatggggccccattggggaattaaacatgatttctgaaaagtccctgaaatgtcgattttttctttctatagcttcttgtagagctcgagctgctctttccaatgatcttatcccggtctcgatccgtgcagaactcaaaaagttatgaagtgaaatgtgaaatattgttttcgccacaattgggagaagcatggggctgtagctgaggacccaaaatggggccccattggggaattaaacatgatttctgaaaagtccctgaaatgtcgattttttctttctatagcttcttgtagagctcgagctgctctttccaatggtcttatcccggtctcgatccgtgcagaactcaaaaagttatgaagtgaaatgtgaaatatgttgcaccacaagggatttt

SEQ ID NO: 45250 - DNA, 942 bp, Heterodera glycines
  unsure (1)..(942): unsure at all n locations
tttncggggcagtccccctgaaccgatgcgcccagatttatgtgggagaccgaatccttccggaatagcttcactatagcctgtactttaattctgcgttggatttttgctccccataattgtttgagtaccccaaacggacacttgaaaaaatcgatttatttttgttttcggggcagtccccccgaaccgatgcgcccagatttatggggagaccgaatccttcgggaatagcttccctatagcctgtactttaattctgcgttggatttttgctccccataattgtttgagtaccccaaacggacacttgaaaaaatcgatttttttgttttcggggcagtccccccgaaccgatgcgcccagatttatggggagaccgaatccttcgggaatagcttccctatagcctgtactttaattctgcgttggatttttgctccccataattgtttgagtaccccaaacggacacttgaaaaaatcgatttttttgttttcggggcagtccccccgagccgatgcgcccagatttatggggagaccgaatccttccggaatagcttccctatagcctgtactttaattctgcgttggatttttgctccccataattgtttgagtaccccaaacggacacttgaaaaaatcgatttttttgttttcggggcagtccccccgagccgatgcgcccagatttatggggagaccgaatccttccggaatagcttccctatagcctgtactttaattctgcgttggatttttgctccccataattgtttgagtaccccaaacggacacttgaaaaaatcgatttttttgtttttcggggcagtccccccgaaccgatgcgcccagatttatggggagaccgaatccttccggaatagcttccctatagcctgtactttaatttctgcgttggatttttgctccccata

SEQ ID NO: 45251 - DNA, 175 bp, Heterodera glycines
ctctcagtctgccgttcgcgggcctcttagcagcggcgcttttttcagcgtcgaaaccctacatagccctctttgccttgatgttcagttattttgaggtactgttcttcgacccatggttcagggcacaattgaagaccgccgcgaagctacaagaggaattcgattgcaactt

SEQ ID NO: 45252 - DNA, 744 bp, Heterodera glycines
  unsure (1)..(744): unsure at all n locations
ccgcaaataggtccgatnntttcccttgggccgcaaatgtccgaaaatggcccttaagaaacgggccgcaaatgtccggaccgcaaaagtccgaccgcatttgtcgggccgcaaatgtccgatttccagcaagccgcaaatgtccggaccgcaaatgtcttaacacggggtaagcgtcggaataaaatgttgcaaaaaaaaggcgtgggttcaagcccacttgactgcgcacaaatttattattttcaccgtttctccctcctcttgctcctcccgttcgtactgggccacctcatttgcttcgtcatcatcatccccgttttgttcagcgatgagttccgggttgaacgtgaagaggtctcggccagagaggccagcctagcgggaaaaaattagaatattaaaaaaaaaaaattaaaaaacagtaaaaaccataaagcacagatgaaataatcatttcaaagtttttttttctgtgttcttctattggctataccctagcgccccatctggaaaattctttagaaattcacccaggatttcggcttggaggaggggggggggagggtggatatcgcatccgaccgaatttatttatttataattttttgctttttatgccatttgttacggcccggttttaaagtggacaaagaacgtaaatcacaggacaaataatattttttaaacatttataatacagaaagactgcattatttttttaagaaattcatttttttttta

SEQ ID NO: 45253 - DNA, 324 bp, Heterodera glycines
aaaaaaaaaaaaaaaaaaaaaaaaaaaattttttttttttttttttgtttgtggtgggcggggggagaaaaaaaaaaaaaaaaaggggattgggggtgggtggtaaaaaaaaaaaaaaccccccccccccccccctcttttttacgaaaagaagagggtgaaaaaaacccacaaaaaaataatatttagaattaatgtctttgtagcataggcacacagattttttgaaggggggggaccccccccccccccccctcttttttttttttttttttttattttttttgccccccccccccccaaaagaaaaaaaaaaaaaaaaaa

SEQ ID NO: 45254 - DNA, 1244 bp, Heterodera glycines
caatgaaattgtttctgatttccctgattgtgcttggcattctgctgaccaatttggaggcatttcgccaacaaactgttggcatcagaggccgtctgatgtgtggcaatcagccgttgaaggacgcgaacgtgaaattgtggaacaaaaacacgctcggtacaataaacagagattaatagtaattatttgggacggaaattcatgtaagaaaaattgcaaaatatttccaaaaaaaaaaaatgccgaattatgtatggaaaatgggtacaaaaaatcatcaaatattaattaaaatatgtaaatataattttattatggtgttttggattaaattcttagaaaagcatgaaatagggcacaaaatgccgcaaaaaaaagaaactaaggcttagaagaataatattttttgctttttaaacattcgttttggtgtaaatttttatgaaaaaagaggtggttttttaaatatttttcaaaaaatgcttttaaccttttctaattagtattatgtacattaaaatttttgaaattttgtgtccggtaccagcaggactattccccctccccatgtcacagaataggcatttaagttttttaaatttttcaataaatttttcaggttccgatgaccaactggcggctaacaggacagacaatcatggcaattatgagttgcaaggaggcgttggacagctcaccaagatgaatgtgcatttcaaggtgtaccatgactgtgacgacggaatcaaggtggaagaaattaaaatttaaattaagaaaaaaatctgtaaatttttaaatttttagccatgccagcgcaaagtgaattttggtaagttaaatttggaaaaaaaaagttaaatttaaattaaaataaattgtatttttgtacaagttaaatttaaattaaaataaattgtatttttgtacaatctaatttttactaatagaatttaaaatgatataaaattatttcttctaggccgaaaattttcggtttttcagccctcattttatataaaaattgcattaaaaaaattcattggccaaaaaaataaattttttatttttttttctgcaatttaaaatacgttccatagaaaactggccaaactaaattcggcattttgctattttttcaggcgttccggatcattacgttgaacgctcagggtccaccaagaaatggtttgaggctggcacaatgaacatggtaaaaaaaaatttggaattttcatttt

SEQ ID NO: 45255 - DNA, 905 bp, Heterodera glycines
  unsure (1)..(905): unsure at all n locations
ttttatgcaatgcctaaatttctgcgcacttataagctcagatggtttggggagtctattatgacttttataatgactaattttgcctatttcggggggttttacttaatgtatcgttttttgagaaanaatccttaacaaaatacattaaatttaactanaattagttttttaattaagtttttatgggtttggctacctaaaaggcgttaatgcaaattttatttgcctattcgaggatttttgtgcatatttaatgcctatttgcgattttttctgcctttttaggtgcctatgtcgcggtgagtttttgtgccaaaaaaggaagccctattaataaaatatgctaaacggtgtttccaagaatatttcaaaacataaagtgtgtttgattggatttatccttataagaacaataaaaacaacaacaataatataaatattgttattatgcttttaaataatgtaagaaaagaatattcatgtgtattcttatatttggttgctttatggtgcaactttcttgaatgcacttagatcattaattctaaaattaaatgagaaaatttatcttatttaatcatcaaagttttgatttaatatagaaaaaccatcttaatttatttaactttgaaatattttatttatataaaataagaattattttataaaaccaaaaattactttttgttaatattttctgcatctgtaaataatgactccataagggtagtatttaaaatttcatttgaattcatatttcttcgataaatagccggcaattcattgataccattagttttttgcttgtcatttttcattgttagtccgaccacccaaaaagtgcaataactgacataactaaaaacagtttgaaattgcattaataaaaataaaattctacc

SEQ ID NO: 45256 - DNA, 1318 bp, Heterodera glycines
aaaattccaaatttaacatttttaaatgcagaatttaagctatttggcccaaatgatagagaaggaagtaattggttgtgaattgttttccattctctttaaaattgtttaaatatgcctttttgggcatgaaaattccaaaaatttaattgaccgaaagaccaaaaaattcaaatgcctaaaaagcgttgaaaccaaaaaatataaaaaattccttttgtgatttaaaaattttaattaagcgaatcgccaaatgtaaaaacgcaaaatttcataaaatttttctaaggtttaattttaaaaaatcaactctaagagattaaattttccgaatttaaataccaaaatttcgaattgtactcactttgcatccctcgcaagagaaaatgccgtagtgaaagccgctggctttgtccgagcacactttgcacaacagcacctcctcattgttgttggctgagctgctggtgcgcgaaattgaagtgccatccgacgacaagggacctgcagaaatttttggcattttttgagttaaaactaagcgaattctcaaaaatctaatcttaaagccaaattaacccctaattactgaataggatactgtagctttgtgttctgtagctttttaagggtagtgacagctaatcagaagcgatttattcagtttttgaacagtttaaacgcaataaaatcttaaaattaattaccctgataccgtaacatcattttacttaatgagattaacgtaaatgccgtttcctatggcagttcatttaaaaagatcaatgatcgtttttatgaaataaatacagtaatggcggcattctctggtcattatttcgtcactcccttcatattgaaaagataaatccaaggtcaaattcacaaattccttatagaatcattcgtatattccaagcaattcatttccgaaatttaaaactttccgcgcaacattttttggcaatttttgaattggattttactgaaacccatttgtcttttaatttcatgttaattttgcaccttctccgtatctttttgcatgttatataatgcttctttgcctgttgagcatttattatttttcacgtaaatttttaaatggcacaatgtttggcattatgtcttttatgctttccattttttaaaattttctaattattttcaattatccctcgttttgttgtttaatttgtcaaatgccctcctctcccctcctccgctgctttttgcccatttttggctttttcagggtcatcccccgaggggtcagggcaagcaatcgccgacgcattcacaacacacaaataaatgt

SEQ ID NO: 45257 - DNA, 1207 bp, Heterodera glycines
  unsure (1)..(1207): unsure at all n locations
attgatgcgaacatagaagatgtatataaataaaatatcatttacagcgcggtgtaatttcaaatttaattaataatttattgtaaaataacaattttatcgttaaaaaattaattttatttatgtaaatgctttgctattattgaaaaaatagaatttaaataattctgctgaaatttaaaaattaaaaccaattaaaatttatttattggaatttatataattatgattatatttatttacaaacgattgaaatttatttattctttatcgattctacttgccttgtataaaattatatgatcaaatagaattaaatttataaaacatttatctaagaataattgctgcaataccatggagaattgcaacattatttaaacgaataatacgcatttagttgagcttcggcacaaaagcaatctgccatatcggctcagccatttcaaaccaacgaacatgcctgttttcgtatgcacagaaaaaatttgtgcgaaacttggaacagaaagtttctaaaatttagaaaaaacaaaaatatatgggatttgattttaaaacttacaacaaatataatgagaatattgtacaaagtgcggacgacattgtcttgaaatatgatgagaagacttgactttggttaaacaaatgaatcggtccaaggaaaaagaagagtcaaaaatcccaaaatatatacgaaatatggacaaataatataaagtcctaaaggagtatgctacttatgatgttatataaaatcttagaaccttatttgttaaatgaataacaatttaattaataaatttactaacaaaagaaaataaataaataaatttcaattgaaaaaagtagggttagacgggtccgggtcccggacccggtttttaaaaagaatatttaatttttattgtaaaagtaattcatttattgctcctgtggcctagtggatattatgttggattcatttggtatttctcaggtgtttaatttttttttgcaatatccccataagaaattttgaaaatttaaccctatatttcttgaaaatttgaacatttttggtagaaattctgtaaacatattggataaaaccacaaaatttggtcattttttaataaaatctgttaacaaatcgaagtaanatttcaaaaatttttcccggcggcgcctatcggcaccacgaaccaccccttctctcgaaaagttt

SEQ ID NO: 45258 - DNA, 801 bp, Heterodera glycines
ttctgttagtcatttctcattggtgttgacgatccaacattcagtgtacaaatttgttaaacctctcaacattttaaatcaaaatcctaataaaaatttcgttgaatttcttcgcctcttatttgtgcaaaattttcgaaaaagtaattttctatgtaaaattaaaaaattcagaagcaaattcaagaattttttttatttttaaatgcattttttaccacatgaattatgattaaatttttgcgtttcgaattcattttggaattaagaaaaataaaaattgataatcatttgatcatttttagcgcactttaagcaccgccgttaggcagcgcagttccaaaatttattccattccacagatattatgggcaggacacgccaagtacctcaaacttgggtaattaaaccgaagaaataagtgcagtggggaagaatgacgcccaaaatgaaggaaatattcgatgctgtgcgaactctttgtgacccctctctgactctgccaatgcagcagtttacaatttttaccactatttttctctcactcatcgtctgctcgtctctcctttattataggctatttttccaaagccaacaacgcccttttctccctcttttctgttagtcatttctcattggtgttgacgatccaacattcagtgtacaaatttgttaaacctctcaacattttaaatcaaaatcctaataaaaatttcgttgaatttcttcgcctcttatttgtgcaaaattttcgaaaaagtaattttctatttaaaattaaaaaattcagaagcaaattca

SEQ ID NO: 45259 - DNA, 696 bp, Heterodera glycines
  unsure (1)..(696): unsure at all n locations
aggtcccnttcgcacngggggaagaatgttaagcggtgggtgctggtgtggtgattggagatctcgcttcccaaccacgagataatcttgtcaagatcagtttagctcggaagttttctttttttcttaaagccttttgccaattagttaagcggctctaagattggcaattcaaaacaaaaaaaaatgtatgtgtacaaaattaatgccagactagaacagaagaaaatgaaaatcagaagaaaagctaagcgacccgggatttcatagctttatgaatgagaagccgactgagaaatgctactataaaatattaaaagtttctttttggaaatttaaaatgctagcatttaaaaaatttttaagtacgacatacttaatggcttttcaggatacaacattcattcaaagcgatagagaaatgatacgacctattcataaaatcctggactgcaacagtttgcgtggttaggtgagtaaaatgaaaacctgaaaaaattgttgaatttcaaaaaaagcaggtataaacttaaaatgccataaaaacaaaaaataataattaatcgattaattttgctanatacgatttttttttgcatancaatttaggtgctncattgcgcattattcattcataaaatggcataaattatggcaaattangcaaaaaataagatttaaaagtctattgccata

SEQ ID NO: 45260 - DNA, 1343 bp, Heterodera glycines
gaaatacttcgcaaaaaatttgatgaaaatttgaagggaatgcttaaaagggcgagggaattcgaaaaagcgaacaattggcaaaatggaaacaaaaaatactacagcataatttggaattcgcctttctatgacggagtttcaaaagtgagtgtttgatcaaaaccaaagctcaagatttgaaaagcccaaagaaatccccgagaccgagtcgagactctcgaccagcaacagctcaaggacagtcaattcttacttttctgcgtttttagatataggccattgtttttcctagggtagtgttccatggctcttatcttgtcaactccaacccagaaatttccgttcctaatgtcgtagaaccgatttttcactccagaatactgtagtgtcagtattcactgtccaaatgataggagaagcttctccagtgggaaaaacttattaaaaattcactaaagccgaaaaacagacagataaatgaaaaagaaaattcggcatcgttgtttctgtgtcgtgccaaattaggaaaccataaaaaacataattttaggtagaggacagagcatttgtcgcatttgtgaaagggcggtcaacttttgacactttttgcacggaatttgcggatgaattggcgaaaatttgctatgaaatgacagaagagcagcagcaacccacgtttgaccagcagaaagaatatttggcacaaaaatatgcggcacacattggcgttgtgtatttaatgcgagagaattggcactgtgccaaaataattgggagcgaattgggaagtgatgggcagcagaaagagtgccaaaaattacacaaatattttgacattttttacaaatatttgttttgtgtttatgctgaaggtaatttcaatagattaagccccaattttaatttagccgtagacatacatggttggctaataagcttttttaattttaaatggattgcctttttgggtttttaaataaaaatgtgctaaaatttgcttgaaattccgtggggtcttaagtatacataatttgactgttaattgttaacttccaatttaattggtaatttttagatgatgaccccataaatgccatatatggtcagcttatcatccgaaagattgaacagttcggaactttaatttatgtcataaaacagctgaaccaaatcgcgaagtttttttttgattccaaacgcaaaatggaaaatgcctttgaaaattcattgttttcgcggcaaaattttgaacaaatatttgaaacggagagcgaaacagaaacggaggaagaaggattaagcagcaaaaagcaatttgacttaaagctaaaggaattact

SEQ ID NO: 45261 - DNA, 1119 bp, Heterodera glycines
tagagttgagcgggaccgggaattttgggaaaaacccggaccgggacctgagaagccgggaccgggacctcgattttcgtccgggaccgggactaaccgggaatttttaaaaattcaaaaaatttttaaaaaattcaaattttaatttatttaaagtgaaaacaattattttgttttttttattttataaaattcaaaaattaaagctaaattaaatttatgaaaattttcaaatcgaatttgtttcaattattccatttttaatttctgtagagggattgaaccatgggaaaaaagtagaaaataaaaagattagccactaggccatttgtacaattggcagtgctttaaaaaatatattactcttattaattttttccttttaactccaattttcatcaatcagaccaccattatataccaggggtgggacaactctcgcctctcgtctctcgcctctcgccaactctcgccatttttggtactctcgcctctcgtctctcgcctctcgttttttgcgacgagaggcgagagttgaaaatacacccctaaagattgaacttttgagcagccagaaaaattttcaaatttacgcgaaaaaaaaatcttaaatctctttctttccttccttaatgttttctctatttttgtatagctccaattcaaatatggtctgctggctaagccttctgcctttcattatttttctcttgggttcaattccccaacggtatacagaatttttttaataatttctttaaactgcaaatttaaccaaaactttgatcattttttgacaagttctgttaatatattacactcaaaattttagaattttttcggcggcgcctaccggcaccgcccgaccccaactgtccccgaagttttaaaaaacgcaccgcaaaaaaaggtggaaaaaatggacaaataataaagtttgtttctaaaataaatatatttcatgaaaatattttttaattttcatgaaaaaattttaaagatttttgtttggatttttcatgacttggactcggtttaaaaactagaactctgacccggctttctgtacccggcaataccctgacccggtatttgcccaaaacccaggcccgtacccct

SEQ ID NO: 45262 - DNA, 903 bp, Heterodera glycines
  unsure (1)..(903): unsure at all n locations
tctttgtttgtcaaattttataaatttggcatcattcgaaagctctacatgtttagaagcttttgataaaatattgctaagcgattgaacaacttataaaaaagttgcaacatgaacactaccaaaaagtcagaatttttgcatattttaatttataacttttttatatgtcggtatgtatttgtgatttttggatagccgatagagcttgttaagagctttcgaatgataccaatattgttggatttggtcaacaaagaaaaaagttatggtggtctaaacttggctcagacgcaactggcccgctttcaggcccaacttccaacagaacttcactgcgtgtccaattggttgcaaagcattatcaatttcttcattggtatttcccgaaactatgagacgctgcctttgtttgttctggaattttattataatttttagctattttttaatcatcattttgataatttacaagcgtcagtttaaataacaataaatcacaagaatcaattccacgtcgtccctcacaaataattttaactcgttgaatgacgtggaccagaagtggtgcctgcagtgtttaaaattcaattcatgtaaaaaattatgtcccacaaatgactaattacttgctgaacgacgtacaccagacgcgctgcctgcaatttttaaaaatttaattaatgcaaataaattatagccctcaaataatttaattacttgttgaatgacgtcgaccagcagaagtgctgcctgtaatgttttaaaanttgacattaattttcatnaattccatagctctaaaatattcattgttgaaatacgtggtcagaagcagcagaagcgcctgcaattttanaatatgtttttgcaatcaatttatataaattgataataaaaaat

SEQ ID NO: 45263 - DNA, 473 bp, Heterodera glycines
cgcggacgacgcgcagtgccgccactggcgctgccccgttgacgccgcctcgtcagcgcatggtcaatgtaagttgggggcggtaaaatttgaggccataaaaatggcacttatacaggataggccccaaaaaaaaaaaaaatttatttgtaaaatttttaaatttaattaattgtttaattattaaatgaatttttacaaatgtcgcaggctcaattaaaatttttgtatttttttttattaaaattaattcagaaatttaatttaattattttattaaatttaatttatctcatttttaaacaatttacagctcgacgagtcgtcgaatcaggaggacgaggtgtttgttgaagctcatccgatgcaaccggtcactgctgacggtaagagcaaaagctcagaaaataaaattacgaattcacaatgaatgcattttttgagtcaaacataagtttatagacggatagtcc

SEQ ID NO: 45264 - DNA, 884 bp, Heterodera glycines
tttttggtcaagaatttttttttttgcgtttcaaatatcgtaagattgtttgatagggccagacaagagaaggcaactgttggtaccaagtttgcggtaaaaaaatgagaaaaaagagatagctattttttggtcaagaattttttttgtttgcgtttcaaatatcgtaagattgtttgatagggccagacaagagaaggcaactgttggtaccaagtttgcggtaaaaaaatgagaaaaaagagatagctattttttggtcaagaattttttttgtttgcgtttcaaatatcgtaagattgtttgatagggccagacaagagaaggcaactgttggtaccaagtttgcggtaaaaaaatgagaaaaaagagatagccattttttggtcaagaattttttttgtttgcgtttcaaatatcgtaagattgtttgatagggccagacaagagaaggcaactgttggtaccaagtttgcggtaaaaaaatgagaaaaaagagatagccattttttggtcaagaattttttttgtttgcgtttcaaatatcgtaagattgtttgatagggccagacaagagaaggcaactgttggtaccaagtttgcggtaaaaaaatgagaaaaaagagatagctattttttggtcaagaattttttttgtttgcgtttcaaatatcgtaagattgtttgatagggccagacaagagaaggcaactgttggtaccaagtttgcggtaaaaaaatgagaaaaaagagatagccattttttggtcaagaatttttttttttgcgtttcaaatatcgtaagattgtttgatagggccagacaagagaaggcaactgttggcaccaaaggttgcggtaaaaaaatgagaaaaaagagatag

SEQ ID NO: 45265 - DNA, 1225 bp, Heterodera glycines
  unsure (1)..(1225): unsure at all n locations
atctttttttgtcatttttcattattttnagaacatttttgggaaaaggagtgactatttacacgttttttacagcgcgattttttcaaaaactttttgggaacttggaggagggtacagcggtgccgataggcgccgccgggaaaatttcacaaattttgaatgaaatttgcgatgaaaaatgagttaactttaattaaatttattattaaatttatttaaaaatatttggcattctgtcttagaaaaatcttcaaaaaatcaataaaatcccgcataatcccgcacaaaaaatcaaatttgcggatcccgctgcgggattggaactcaaaattctttgcgggacgggatcccgcgggattaatcccgcaaatcccgcatttcccaaaaaatacgggattgcggactgggatcccgcaaaatcccgcgcgggatcccgtcccgcgccggtctctagaagagacaaagccacaaaaaaagtcacaaaatgccaaaagtttaaaaagttcgagtgccatggaaaatctcaaaatccaaattgtgacagtagttttcaaaaacgatgctgatccgttcacagttaaaggatttgatcaaaacaatgctgaattgtattcggctacaacacagtcaggcacatttaacaatgaaacatggcaatttgtgaagatgaatgttaatcattgggagggattggacgccggcatgattactttcaaagatgggaatgaggtataaaatgtaattattaaaaagtaaattatttaaacgaccattttatcctttggcccaatgttaagggctaatatttgtcggactcggaaagtttagtctggcagatttagtctgcgacaagtttagagcatcataacttttttctttgttgatcaaatccaacaaacttggtatcattcgaaagctcttaacaataagctctattgcctttccaaaaaacacaaagatataccgacatgtaaaatagttataagtaaaaacatgaaaaaattctgtcttttgtgaagtattcatgttgcagattttttataagttcttcaatcgcttataaatagctattgaacagcttctaaacacactattatttttctcctaaataatgttgctttcttaaaatggttatatatatatataacttggaatgtaatttttatttaagaaaatcgtaaaaaatatgtaataaaaatgtacttacttcttaaaatggtta

SEQ ID NO: 45266 - DNA, 1287 bp, Heterodera glycines
aaattccttaattacggcgattcaattcggctcctgttggttctcaggaatctgaacgacttttttcaattgccggaattacacttactgatttaagaaatcgattaactgcagaaaatttggagaagctgctttttttgcatcggaatgtaccaatttataatttttcttattgatttgtgaacatataaaaaaaattttaattgacccgaatcccgacctttttctcgtcccgaaacccgaatcccgacccgatgttttttcggccgacccgacccgaatcccgacccgatatttttctcgtcccggaacaaccctggtatggaataaacgattttaactaattaataatataattattttaatctattaattagatttgttgaccatatttataatttcgatttattattttattttcccatacaattacatttttatgagagaaatacagtgccccaaaaaagtcttgactcaaacctgaaaaactatcgtatagttcatttaaaaacttgaaataattcatgcttgcataacttttggtgctgatcaaaaaagtctcttacaccaacttgatcagatcactccttcctagtgaccgggacacccaaaatacactaaaaataggggaaattttcgaaatccctaaggggctggtaaattttttctagagaaaatgaagccactggaaagatcacaaatttgttacagaattgcttttggaatggtggatctgcgatttgtatatagaaagttatacttggttgaataatgatcaccataaaaatgatcaatttatcaacgccataactttttctagaagcatccaaattaagcattcttggtatcatttgatacacgggaccgggaatttttgccaaaaccgggaccgggtcttgccgggatctgagaagccgggatcgggacctcgattttggtccggaaccgggaacccggaccaaccgggaattttaccattatgaaatctaaataaattatgttttccattattttattataaatagtttaaaattaataacgcgaaaagaaaatttgaatttttgtttgaaattacagctcgttttaagaaattttgatatatgaataaatgagaatattttattttaaactttaacactattactttatatttacatttaacttgcgaataacaaagtttatccagggttcttattaaattttgtcttagtcctttgaacaaaattattattattaattatatcatatttcagcgcatattatttataaatgaaatagtagagaaat

SEQ ID NO: 45267 - DNA, 795 bp, Heterodera glycines
tgaaaaaatcgactttttggttttcggggcagtccctccgaatcgatgcgcccgagattactggggagccggaatccttccggaatagcttccctatagcctgtactttaattctgcgtaggatttcagctccccataattgttttgagtaccccaaccggacactagaaaaaatcgatttttttgttttcggggcagtccccccgaaccgatgcgcccagatttatggggagaccgaatccttcgggaatagcttccctatagcctgtactttaattctgcgttggatttttgctccccataaatgtttgagtaccccaaacggacacttgaaaaaatcgatttttttgtttcataaatatttttttcagaaagtgctctaaagcgcaccaaattttatttacaacttaattttagcactctgatgctttagtatcaaaaaggaagatggagaaaaaaatttttaaaaaatttttccttatattttggttatatcgttttgcttttggtggggtgcttggaacagtggaatcatgcgcacccgtccgatctggcaagttaagcaacgattgctgactagccaaaaggttcggtgccgtgatgaaacgaaccagcactgcttaccccgcggcacccggcacggtcccccgaaggaatggatttaattaaattctctccttcggggatttttttccattaggtcgtccgttaaaggtcaattgctctagtcaatttttaaaaatttttgccgttggagatgaagtgctctgaagggcggggggggggggggcgggg

SEQ ID NO: 45268 - DNA, 1601 bp, Heterodera glycines
  unsure (1)..(1601): unsure at all n locations
tttttttttgaaaacaaacggataataagaggaaaggaaaaaataaaagttgtgggggaaataaattgaagataaaacaaaaaagaataataaaacttatctaattttattaaataatcaatttaagaaaagtgcacattgtgcacttctaatggaagttaattaattttttatttgaatattaaaagttctatattttaatttgatttaatgctcttttaaattctcaaaaaataataataaaatgaaaatataacattgagtatgtgatttaaaaataataaaaattaaataatattaaaacatcaatgtaattaaataaattgataaaatgataattaaaagatcatttattaacttatactttcatatgaagataattttaaataaatactttaacaaaacgaattaataagcgccagtttttattttaaaccttttaaattgttaataaaatcaaaatttcttttcttatattatattttttatctttttaacatataaacgaatctcgttttgttattcttttatttttgattttctggttaattttttaattcgaagaattactttgtatttaatgaagaaaatcaaataaaaaacggcctattattgattaaatatattagttaatatgaatttctttttgaatttcaaagtttttttttctcgttttaatacccaagaaatgatgagatgattaacatgttttgcaatttttcaaaagattttttttaattgaatcaacttcataataatcttttaagaattgatatttattaaaaaaaattaatcaatttttttagtgttgattaaaaaaatattattttaagatagtttggatgctcataatcaagccaaatatattaataaattcctctnatatatatatatatatatatatatatatataattttttaattctttcattacgtaattatttattcttgcataaaaacataatttgtaatatggctaatttattaaattttattattttttgaaatcatttctgtcagttatttatatataagttaattccataaaagtaatgaaattggtattattaaatattttgttatttgattattttattctttgctatatcacatggctaattcataagaatcttcgtttttaaaatgattattttaattaatgaaatgtattttaaaatctaattaataagaaaaactcttttttatattattatttaattaaacattttcatcaaaagcaacaaatatacaatattttggaatttaatatatatatatattttattatataaccgattaaaacaacgaatgtggaaggggcatccacatggtgggcattttttctcttcatcggcaccaaaactttttttgcaaacaatacaataagaacgcgtactcattgaagtgcgcgcacaaacttctttaaattttataaataattaaccacagatggaggatttccaagctttggctcatgttcgggatcaccacttgggtagcatcagaacccgaaaattgtcccaaaatcaatttaaaaatttctaatttactttagaaaaaaagtccctcaaaacaaataatttatttttggtgtatttggg

SEQ ID NO: 45269 - DNA, 466 bp, Heterodera glycines
aaatttgggaaacacgtccaattcacacttttgatcaaattccaacaatttatgagaagaccaatttaaataaaagcacaattacaattaaaaatttcagaggagaggagattccaaaattataaatagagaccgcattttgaagcatatgccttttttttctgcgcactagtttcgatatattaagcataaaaaacgctgtttccacttggtttgaggcttctacgttgacttttattatgccttttttgcctttttcaggattttcgtgccttaaatgccttttttggcatttttgccgttttggtgccttttttggcatttttttcgaaaaattccattaaaaatgcaataaaatcgggaaaatacacctctaagaatcgacctaaaatttttttcagaaaatacacccctaagaatcgacccgaaaattttcaaaaatgcacctctaagaattgaaaaattt

SEQ ID NO: 45270 - DNA, 693 bp, Heterodera glycines
aaaaaattttgtgacaagacgggtaaatttttactcagcgtgccggcaataattttttgatcaattaaactgaaaaaaaaaaaatatatatatatatatatatatatatatatatatatatatatatatatatatatatagtgcggggtgaaaagaataaagaaaaaagataatttaacttagtttattgcctgggcctaaattgacagcaattgcttgcttagcttatgagtaattcaaatatttttaaaaaattattcaaaaatttttagaccgaccaggtggtggtgccctcctgagccttgccactttcaatttcttcaacaacagtaggggtatggtagaagctgttcagatatgattttatgccgtaaaatttgccaccagctcctttaaaaatttaaaaatatttcaaaaaaaaatatttttttgcgccttgctgtgccgccccgttcagtacaacaccgtcaaccaccaccggttcatgctcttcagttttttccccatcgttggttgagctcaacttgctggctccgccaaatgtgggccacaaattcagccgaaattttcgcatcacctctcaagccccagctttgttgcttgatcggaaaaaaatgaaaaatttgtggacaggtgtcaatgcttttccgatcagcaaatcatgtattgacagtgtgagataagcatgtcaaa

SEQ ID NO: 45271 - DNA, 662 bp, Heterodera glycines
tgtttgttttcacagaatcccaaattaaaaattaaattaattgcctgatgcgcccggtggaaattgccgactccgaagtgaacaatgccggccgacaatgaagcacgactgtatttcggcacatttacttccgggtgtgccaacgcgatggcatccaatgtacgggcggacagtttaattgtttttggcggtgggttcagcgtgttcagcattgtctggtggtcagctgcgtaatcattttttcgttgctgattcgtgacaaaattttgggcaggcatttttgtggcttggagtactgttgttttctgtaggacaaaaaattatcaaccttttttaaatgccaaaaaatatcatacatgttaccatggtactgaaatttttcgactcaagagtcacgggcaaataaacgataagatttaaagtagaaaaatgttaagccccgggtgggaaccgaacccccatcaattttttcaaccccagtaaccgtctccggtcactttacagtaatattatttaattttctgtatttatagcgtattattggtataattatagtcattctcagtactcaatttagttgatcagcacagaaaattgttgctgacagtgatcagagttactaataaactaagcaaaaatgaacaaacaaaattataataatg

SEQ ID NO: 45272 - DNA, 863 bp, Heterodera glycines
  unsure (1)..(863): unsure at all n locations
caatcactgggactcaacccacgagcattcaatcactgggactcaaccctccagcattncaatctctgggactcaaatctcgggcattccaaacaatggactcaatcctccagcatttcaatcactgggactcactcaatccaccaacattccaatcacattccaatctctgggactcaatccaccaacagtccaatcaacgggactcaatccaccagcatttcaatcactgggactcaattctactgcatttcaatcactgggactcaacccaccaacattccaatcaacgggactcaacccaccaacatttcactgggactcaatccacaaacattccaatcactgggactcaatccaccaacattccaatcaacgggactcaacccaccaacattccaatcattgggactcaatccaccaacattccattcaacgggactcaacccaccagcattccaatcactgggactcaatccaccaacattccaatcactggcactcaattctcctacatttcaatctctgggactcatcccaccaacattccaatcactgggactcaaccctccagcattccaatcactgggactcaatccaccaacattccaatcaacaggactcaatccaccagtatttcaatcactgggactcaatccaccaaaagtccaatcaacgggactcaatccaccagcatttcaatcactgggactcaattctactgcatttcaatcactgggactcaacccaccagcattcaatcactgggactcaacccaccaacattccaatcattgggactcaatccaccaacattccaatcaacgggactcaacccaccagcattcaatcactgggactca

SEQ ID NO: 45273 - DNA, 1243 bp, Heterodera glycines
tttaattttgttttttaaagatataaaatatatttttatatcttttatttgtccttgatattaattgttaggtatgcttgatcaaaatctaagctctttagactaaggctagtaggtgaaaacacgaaaaattttgcgtgctatatattttgtgatatgatttttgtataaagcatttttttaatcaatttgcctaataaactatatgtaataaattcgtttagttgtgggtaaattttccgattaaagaaaaaaagtatgtcgaaattgacatagcttagagcaagaagcattatttaattatcaccttcagtcattatttcaatttggtaattacgaaaatttatttgaaaattcattttaaatttttttttcttttttttgataatttagtcacaaatgtcggtccgcaaaagtcggtccgcaaatgtcggctaacccggcgcctatcggcaacgatggaccccaaaaacacttttttctgcccaaaattttattcctattaacttgatttagaattttttaaatttagccattaaaacatttaaaaatttttaattgattttatacagtttcagaaattccgatcttccgaaatttttgaggctaggaattccgatttccaatttccgaaaatctttgggcctcggaatgccatccctgaaatatgacataggcatttatataattgcgaacattttgggcacaagattgttattgatagcgttataacgggtggatgagatgaagaatcccagcgtcggcattgcgatattccttttcctttggtgaccatcagcagtttcgtagcccataatttttttcttacttgatcaatgcttcattttggtatcaatcgaaagattaaagtctacagtatttttatataactaattatcggctatttaattagatagttgtttataaaatacgcgaaaaagttaaatttaggatttttggttgtaattttttttcctcgtgatgtttcattttgtagttattatagttggttcttaagttagcaagatttcatccaaaaatttgttatttgctatgacacttttttcaaaaaaaagaagaatactcgtagaaaattgagtcaatcaacctttaaaaaagttcgttttgatccaaatctgttaactcattgaaattttaaaaaattttcggcgatgtttgacaccgtatagccataaaatgttatgattttataaaagtaaaatatttatttattttatttagc

SEQ ID NO: 45274 - DNA, 333 bp, Heterodera glycines
ttttttttttttttttttttttgggttgggcgccccccccttttttaaaaaataaaaaaaaaaaaaacacctccccccccccccccccccccccccccccccccccacaaaaaaaaaaataaacccctatagggtgtggggtgtgggtggtttttttttttttttttctttttttttttttaaaaaaggaggaaggggggggggggggtggggggccccccccccccccccccccccccccccccccccccttttttttttttttttttaataaaaaaaaaaaaaaaaaaaaaaaaaaaaatagttttgtttttttttttttttttttttata

SEQ ID NO: 45275 - DNA, 728 bp, Heterodera glycines
agggtaacatcccttgggcagctgaattcaacaacaatgtcactgaccttcaacaaggcaattcaaaacatcgatctgtctcatatcaacagacaaattttcaaaatccattaattttcgtcacacgcggatcaatttttgaatctgaacaggcacgcctggaacagaatctcaaggaattgacgagacggatcactcggcctgaattgaacttccctgacatagggacagttgacattaatcagaccgagattcacggaagcacggtcacagacattttttccatcggcgaaatactggtggaaaagatgcaaaaagagggcgaaaatttcagaaaaaaggcagaagaaacgattgaaaaagggaaggcatggatggaagacccaattggaatcatcaaatacatcaaatggatcctaatcacaatcgctattattttaattgtgattggatgcacagttcttttgtggaaaatcaaaatttatattccggaagaagattggccgaacaagttcgatatccgatcgtgatggaagtcgaactccaagaccgagccaagccatcagcaccaccagaggaacctttactcgaccaaaaagcatacgtgctcaattatcttcccaacatttgccaaattgaacaaacaagacgaaaaaagaaaagatgttacgtcaattttttcatgaatggagtgaaaacaaaggccttattcgacacaggagccgaca

SEQ ID NO: 45276 - DNA, 1001 bp, Heterodera glycines
actgggatcacatctaaacgactatgctaaaaacggggaactaaactgtattaatatttttaacaaattgcagcccttttcgcctaccctgttaagagaaatcttaatttcactaataatttctcaattttcttctataacagattaactcttctatggtgagtttttcaatttctatgtactttattaagtaaacaataataatcaaacatttttctatgattgcaaagcatttaaaaaatcataggcttgtttattttcattatgttttgaaaaggtcaattaaataaacaattttttttttgtaattttattaattgtataaatcttatgcaattttctataagcaatcgatagtgtaacaaatagagaagataagttctgatcaaacacacacctttcattatttccggttaaatatgtgttcatattttaacaaaaagcagtcttgaatgtcgtcgaaatttgtggtaattccatggcttatagctgaccaattgctctggaattttgccatgaggcttattttttgtgctggtttcgaatttacaggcgcccatgcaattggagcgcattaaattttttgtcgatttttcttcaatacccactttaaacgataagcatttcctcgcacaccgctctatttgctctgttttaaacaacaaaattttcccaagcattcatacctactttcttaattgcactgggatcacatctaaacgactatgctaaaacggggaactaaactgtattaatatttttaacaaattgcagcccttttcgcctaccctgttaagagaaatcttaatttcactaataatttctcaattttctttctatacagattaactcttctatggtgagtttttcatttctatgtactttattaaataaacataataatccaacatttttctatgattgcaaagcatttaaaaaatcattaggttggttatttccttatgttttgaaaaaggccaataaataaaccattttttttt

SEQ ID NO: 45277 - DNA, 438 bp, Heterodera glycines
  unsure (1)..(438): unsure at all n locations
tttttntggtgaaaatctgtcaacaaattttaatcaaattttcaaaaattttcccggcggcgcctgccccctcttcccaaaaagtttttttggaaaaagcgcgcctcaaaaaagcgttttattgatttttaaatttggaataaaattttaaaaaatgatttttgctttatgattttaactattaaaaatttgtagaaaaaatttcgcttttcgcatttcgcttttcgcatttttgcatattttggcttttcgcatttcgcttttttttcatttcgcatttttcagtttcgcaaatttcgcatttcgctttttatttttcaatttggcccatccctggtatgtcccccgtcgcttggcagagataatcccctgcgattaattttcacactctgaagccatccaattggcatttcgtcggcctaacagaaggagagataa

SEQ ID NO: 45278 - DNA, 932 bp, Heterodera glycines
  unsure (1)..(932): unsure at all n locations
ttcaaagctaattctttcggttcatttctcattttccacaattttcatcaataacttgcttccttttttctccttcctcctcttccattgttttattatgcatatttttattctgtcaatttgtacctctccnccaccctttatctcgaaagtgttctgcctgatcattctcgacacaataataccctttccatggcgaagggggagaggaggtgcacttgacggcaccaaaaacacaacttttgtcttgcataacgccgccactccccccccccccccgcaacccctcgggggagggaggggagacatttgtttgctgggcctgggcctgggactgtgtcccagaaaatactttaccacggagctacaaacttactgtacaaattgctattgtctacgatttccccgattcggactccgtcagttgggcctcgacacgtttgggcccggactataacttttttctttgtcaaccaaatccaacattgttggtatcattcgatcacactatgttatcctctattagcctgcaaaatttcgaaaattttcgttaagggtcaaaaaaatgatggcccataatggctgaaaacctggtttctgtgatgtacttttgggcattagtttgttcaaaatttatggaatttttttggaattttgcaggctaatatagaggacacttagggctatcgaatgatatttggatttattatatcccgctttggattttctcatgcgcatttgtcactactcatctcctttgtggttgttcgagaataggaacaggtacaattttgcaaaactttccaatcaataacattaaattctatttaaaatactaaaaatttcacttttaatttgcttttcggttttgcctttgacactgcgcccgaggggacggcggacaccgccgcgggggttgggggggggggggg

SEQ ID NO: 45279 - DNA, 880 bp, Heterodera glycines
aaaagttggtgtccaatttctcggtagggatttaatagggactttcaagagatagccattttttgtcaagaaatatttttcgtgcgttttcaaaccccactattagtgctttattcagcgctacaacaaaagacaaaagttggtgaccaattctcggtagggatttaatcgtgactttcagagatagccattttttgtcaataactatttttcgtgcgttttcaaacacactattagtgctttattcagcgctacaacaaaagacaaaagttggtgtccaattcccggtagggatttaatagtgactttcagagatagccattttttgtcaataactatttttcgtgcgttttcaaacacactattagtgctttattcagcgctacaacagaagacaaaagttgtgtccaattcccggtagggatttaatcgtgactttcagagatagccattttttgtcaataactatttttcgtgcgttttcaaacacactattagtgctttattcagcgctacaacagaagacaaaagttggtgtccaattcccggtagggatttaatcgtgactttcagagatagccattttttcaataactatttttcgtgcgttttcaaacacactattagtgctttattcacgctacaacagaagacaaaagttggtgtccaattcccggtagggatttaatagtgactttcagagatagccattttttgtcaataactatttttcgtgcgttttcaaaaacactattagtgctttattcagcgctacaacagaagacaaaagttggtgtccaattcccggtagggatttaatagtgactttcagagatagcaatattttgtcaagaactatttttcgtgcgtttcaaacaca

SEQ ID NO: 45280 - DNA, 643 bp, Heterodera glycines
tactcagattttcaaaaaaaaaagtttaggtttttggctataactttttttttgcatccaaatccaacactgttggtatcattcgaaagctcttagatgctctattagctttacaaaaaacaaaaagattttttagcctgggaaaaattttattatgaaaaaattaaataatttcgacttttcgcaattttcatgtataacttttttggtaattgtctgattgcgaagcgatagcttagaaattgcttcaaaacatgttaagctttcgaatgatagcaagcttattggatttggatgctgccaaagagaaaagttatagccaaaaacataaactttatgtaaaatctgagtagggataattaacaagtaccaattatttttcctcgcattttcagttggatttgcaacgacgtttggatggacattctcccatcttttgaccatgctcaactcggactcaaaatggcacttctttcgccacgttttgatgcgttggtggacaaacatttcgatggccaatcagaatttccaattttgagaacaatcaaaatttgcaaagacactgttgcagcagtgccgaaattagccgtagttatcgacgaagacaattcagtgccatttccgttgcccgactattcgctgc

SEQ ID NO: 45281 - DNA, 417 bp, Heterodera glycines
gaccggagcccatacgaaccatgtggaatgtttttaggaagaatctgaaaatgaagttcaaggccatgtacgggacttgccgcgagatgttgccaagttattgtgccgagcacatgtggcggcagttcaacggaaagaaaactttagcggcatttaacaatatgatttatcacattgccttttattaccccgtgaataactgaattgattcgatttcctttactcatattgtagttacagtaccaagcaatgcatcagcaatatttgcaaaaattgaaaatttgaattttttcaaatgttcgaatccgggttcggggttcgaaattacgtcaaaagaaggtcaaattcgtgctcagcgcatcaaaataacccctaaaaagtgttttatgaatttttattcctttttttttgtgggac

SEQ ID NO: 45282 - DNA, 1207 bp, Heterodera glycines
  unsure (1)..(1207): unsure at all n locations
attttaaaacaaaaatttttggatcgttcgattatttttccaaaaaaattcatttcaaaggtgcaaattttccccttcgacgccgaccaaattaaaaaaaccgctctctctctaattacaaacgagtaattttttagacaaaatcttttaacaagttgaactcaaatttgggtagtccgaaagtccgcgcattggatatcaatttcaaccgatctcagcctgttgtgttgatattttttagatgaaacaattaaattttaaattttttagcgtggcgcaaatggcacggcacaaaattctcatcacccgatatacctatgttatgttaacagattttcgccgaataacctctttaaaaatttcgggtacgcaatgttcgagagtctcggcgcttcgagtcgttgagagagaaaagtcttggattttctcaagtcttggcaaaacattttgtgccgaccatctgctgctgttttcggcattaaaatgaccaaattcaatgacaatttgtggtgccttttatttctatttctgctgcgcagcttttttcgtcacttctgatcagtgatcacgcatattcattgtatgcttggcatattgtaaaaaatgattttgacccaagaaatgaaaatgcaaaaaaataccaaaaacaaaagacaataagaccgataaaaacagttaattatttcaattaaaatctcaaattttctacggcatcatctgtcggcactgccgtcttcatccttttacgaaaaaaataaaaaattaaaattaaatgaattgacaaaatatttatccttttgttttgttatttggcatcatatcatatgtcttattgcctgatcatttccaatcagttttaattgcatccctctcaaatcccctgccgagccaatggtccgattcgcgggcattgatcatcactgatcagaagtggcgagaaaagctcaatggcaccacaaattggtacaaaacattcattgcattcattcgatttgatctttttaatgccaaaagcagaacaagatggtcggaacaaaatgtttaccgaggcttgaganacccgatactttttcatcttgttccaaactcagtcggcccgtactcaatcgtcccggctcctatttttacgattatttttcnnacacttttttgctgttcacacacttcatttactatcctaattaacataaatattgttaatcgtcaa

SEQ ID NO: 45283 - DNA, 1145 bp, Heterodera glycines
  unsure (1)..(1145): unsure at all n locations
acaaatttatttttaattataaaaattaatgaaaattttttattaaatatttttatttttattgttccaaaaaggcgcattaataacaaaagataaatgaaaatattaaaattggaatgttttaaccaatcaaaatttagtaccgcagatgactatggacaggaaaatcagcaggaaaagggagagaaggacacggaggagagcaacgagtaaaaaaataataaatattgaataaaaaataaaagaaaaaagaaaaattcattcaaattttttgtaaaatttttgttcattatttgtaagaaatttgccggcatcggaggacagtggcaacccgctcaaatcttctgaggataaccaaaaacagcagcagatggatgaaggagaagagaaggaagcggaggagagcaaagagtaaaaataaaataaaattaatatttagttaataaataacattcaaattttttgtcaaatcttttttaattatttgtagcaaaatgccggcatcagttgacagtggcaatccgcccaaacccaaattgaaagactatcagaaacagcagctgtaggatgaaggagagaaggaagcggaggagaaaaaagagtaaaattaaaaaaattaaatattgaataaaaaatacatataagaaaaattcattcaaatttttgccaaaattattgtagcaaaatgccggcatcggttgacagtagcagtccgcccaaatccaaatcggaaggcaacctggaacatcagcaaaaggatgaagcgaagaagaatggaggagggtaataagcacaatgaaatataaaattgaatacctaaactgaataatatttttatttttgtaattaaaaattctcagaactttaatcaacatagaaagggtaattttcgatttcaaaattattaaaaataaatatatttaaatgaaattttatatgtatcattttttccaactaattttcagttctaaagatgattatgaacagaaagagcagcagctgaagaagacagaagagaagcaagtggaagaggaaagcgacgggtaaaaataaataataaaaaatgaaaaagtanattatttatttattataatattaccatttttgctaaatgcatttggcatataatttataggaaaatgacg

SEQ ID NO: 45284 - DNA, 796 bp, Heterodera glycines
agtcgcaagggcaaacacttcaaaagatgggtcttgtgcttagagggaagcaatgtttcacgcatggtcaagtttacgtcgccatgtcaagggttacgcaaatggaaggcatccgtgtgttttcaccaaatacctgcaagggcgataactgctatatccacaacgtagtttttcaaaaactacttggcctgccattgaacacgcttgcgcctaccaaacaacttttcaacataaatacaaattattcaggggcgctaaatgagaatttgcatgatgaggatgaagaattagatttaccatgttgaatatatagattttatttctcattttcaataaaatctatatttcattgtgacttattactgcttgatttaacattttcttgaatactttcccttttttaatgcatatatatatttttgttagttactatggaagaggaaattggtgaaaaggatattaataatactgctgtgtttggttgtaatttgccgcctgattctgacacaggtttgagggattaattaatttaacatttctacattaaaagtgcgggattgggaatacgtttttatttgccgacccttaaggcaatgaatggcaagggcgatgtagagcaatttgtaaccaacgaaaagcataccaagttggtggacgtgtcagactcagacgaagaagcgaaaacaatagaaaccagtgcccaaagcccagcttcgggtgtgtgttttttatttattgtttaatttacaatttacgacgagcacactcaacttcgcaatgattttttgctgacacg

SEQ ID NO: 45285 - DNA, 1032 bp, Heterodera glycines
aaaaaacttttgggtaatgattattttttggagtgagtcaaacaccctattagtgcttgctgtgccgagaaccggcaggcaatggatggctttctatctgcaagaaattagattggcaatatgtggtgtaaaaaacttttgggtaatgaattattttttgaagtgagtcaaataccctattagtgctttgctcgtgccgagaaccggcaggcaatggatagctttcaatctgcaagaaattagattggcaataagtggttgtaaaaaacttttgggtaatgaattattttttgaagtgagtcaaacaccctattagtgctttgctgtgccgagaaccggcaggcaatggatagctttaaatctgcaagaaattagattggcaataagtggttgtaaaaaacttttgggtaatgaattattttttgaagtgagtcaaacaccctattagtgagtgctttgctgtgccgagaaccggcaggcaatggatggctttcaatctgcaagaaattagattggcaatatgtggttgtaaaaaacttttgggtatggaattattttttgaagtgagtcaaacaccctattagtgctttgctgtgccgagaccggcaggcaatggatagctttaaatctgcaagaaattatattggcaataagtggttgtaaaaaacttttgggtaatgaattattttttaaagtgagtcaaacaccgtattagtgctttgctgtgccgagaaccggcaggcaatggatggctttcaatctgcaagaaattagattggcaatatgtggttgtaaaaaacttttgggtatggaattattttttgaagtgagtcaaacaccctattagtgctttgctgtgccgagaaccggcaggcaatggatagctttaaatctgcaagaaattagattggcaataagtggttgtaaaaaacttttgggtatggaattattttttgaagtgagtcaaacaccctattagtgctttgctgtgccaagaccggcaggcaatggatggctttcaatctgcaagaa

SEQ ID NO: 45286 - DNA, 652 bp, Heterodera glycines
caaagaataagcataattgaatcaaatgggcaatttgacataacccaaataaaatcccaatctcgtggtgaagtatataaaagaatatttttcagataatagaaatcgcttacgataaaataaaataaaaataatgctttgaattcataattttagttcttttgaaaaagttttattaaaataaaagtcgcttttaccgagaagtctgagtaaacagtaactgattcattcttattctcttggtgggctcaaatataattgattgggacaaagacgtctttttgtgtaggttggttcgctagttcagcaaaaatagtaaaagaccaggatatagcaacaaattaaatatactctaaaacagcgaataaaaaaggatattaaaccttttttagaatgtgaccaaagaataagcataattgaatcaaatgggcaatttgacataacccaaataaaatcccaatctgtggtgaagtatataaaagaatatttttcagataatagaaatcgcttatgataaaataaaataaaaataatgctttgaattcataattttagttcttttgaaaaagttttattaaaataaaagtcgcttttaccgagaagtctgagtaaacagtaactgattcattcttattctcttggtggacactac

SEQ ID NO: 45287 - DNA, 1048 bp, Heterodera glycines
aaaaaatgagaaaaaagagatagccatttttgtcaagaattttttttgtttgcgttcaaatatcgtaagatagtttgatagggccagacaagagaaggcactgtttgttacaagttgcgggtaaaaaaatgagaaaaaagagatagccattttttggtcaagaattttttttgtttgcgtttcaaatatcgtaagattgtttgatagggccagacaagagaaggcaactgttggtaccaagtttgcggtaaaaaaatgagaaaaaagagatagctattttttggtcaagaattttttttgtttgcgtttcaaatatcgtaagattgtttgatagggccagacaagagaaggcaactgttggtaccaagtttgcggtaaaaaaatgagaaaaaagagatagccattttttggtcaagaattttttttgtttgcgtttcaaatatcgtaagattgtttgataaggccagacaagagaaggcaactgttggtaccaagtttgcggtaaaaaaatgacaaaaaagagatagccattttttggtcaagaattttttttgtttgcgtttcaaatatcgtaagattgtttgatagggccagacaagagaaggcaactgttggtaccaagtttgcggtaaaaaaatgagaaaaaagagatagctattttttggtcaagaattttttttgtttgcgtttcaaatatcgtaagattgtttgatagggccagacaagagaaggcaactgttggtaccaagtttgcggtaaaaaaatgagaaaaaagagatagctattttttggtcaagaattttttttgtttgcgtttcaaatatcgtaagattgtttgatagggccagacaatagaaggcaactgttggtaccaagtttgcggtaaaaaaatgagaaaaaagagatagccattttttggtcaagaattttttttgtttgcgtttcaaatatcgtaagattgtttgatagggccagacaagagaaggcaactgttggtaccaagtttgcggtaaaaaaatgagaaaaaagagatagccattttttggtc

SEQ ID NO: 45288 - DNA, 1190 bp, Heterodera glycines
  unsure (1)..(1190): unsure at all n locations
actgtgctcatgnacacgtagttgtccaataaggtactngacttccnnacagtaaaatgtgtacaaaaattttggaactgtcccgcctcacggcggggcttaaaagcattgtacagcgtaattaaaagctaaaataattttcgtatatttttcacaatttatttcaaaaagccaaaaagtccggaaccaattttaaaaactaaaatagtgcacaaaaggggagccgccgcacggcggggcttaaaagcattgtacagcataattaaaaccgaaaataattttcgtatatttttcacaatttatttcaaaagacaaaaaaaaatgattcaattttgaaacgaaatagtgcacaaaagggagggatggttagacgaaaagaggaatttttagaaaagagcgcaccccatctgatatttccattttccgttccacaactggccaaaggcgactgtgctaattgacacgtagttgtccaataaggtacttggactttccacagtaaaatgtggtacaaaattttggaactgtcccgcctcacggcggggcttaaaagcattgtacagcataattaaaaccgaaaataattttcgtatatttttcacaatttatttcaaaagacaaaaaaaaaatgattcaattttgaaacgaaatagtgcacaaaagggagggatggttagacgaaaagaggaatttttagaaaagagcgcaccccatctgatatttccattttccgttccacaacaggccaaaggcgactgtgctcattgacacgtagttgtccaataaggtacttggactttccacagtaaaatgtggtacaaaattttggaactgtcccgcctcacggcggggcttaaaagcattgtacagcgtaattaaaagctaaaataattttcgtatatttttcacaatttatttcaaaaagccaaaaagtccggaaccaattttaaaaactaaaatagtgcacaaaaggggagccgccgcacggcggggcttaaaagcattgtacagcataattaaaaccgaaaataattttgtatatttttcacaatttatttcaaaagacaaaaaaaaatgattcaattttgaaacgaaatagtgcacaaaaggcgagggatggttagacgaaaagaggaatttttagaaaagagcgcaccccatctgatatttccattttccgttccacaaca

SEQ ID NO: 45289 - DNA, 877 bp, Heterodera glycines
  unsure (1)..(877): unsure at all n locations
gaagaagctgcttattaacaagccgatgctggctaaagacaatcattaaattgtgagtaaattagcacatcggaaaaacattttttggtctttggcttttcagcgatcgattacaaaaagaaaagtcacacgaccggctattaattatccctaattggcttctcattttcccatcaattgctgcagtttggcactgtgctcagatgagtggtgttcatccaattgggctttgctgaattgttttgattttttaaatgacggatcaccgattacctgccaaatcgtctgtcgcaaattcggcactttgccaatgtccgttccattttgtggcgtctccgatgggcaacaaaacggccaattgaaacgaatgtttggccgcatttgtcacatccgattaattgttccctttgacaagctgttggggactgatcagagcgatctgcaaatgaatattctattgtccgctaataaattccgcgtttggcattcgcttttcccctaatttcgcctaattgacccctcaggcgtcgtttgtctgccgttttcggttttggtgcgtttccgccaatgttttctctcaaatgctccgacatgtgtgagttgagtcccgcaaaagtgtcaaaagtgcgtgaacattgtgcgcatcccatcgtaatttcggccaacgattggtcccccttttgtgcgttttcgccgccaccgcagccgttgtcaccaaaagtgccaaccgcaaattccgtcaaactgccgaccatcacgtggaaaagcaaatgctttccgtaatcttcggccattacattaagggaaaatgttccaaaaaataagaagttgtagcgaaatagaaagaaaactattttggctatacaanttttgcaag

SEQ ID NO: 45290 - DNA, 854 bp, Heterodera glycines
gtaccgttaacggcatttcgctctcaaaataatcgcgaacaaacctcaatttcgtcgcttctcgtcgccgcttcatccgcgaacggctcccgcttcgtcgtaacgaacccggtcctccctgttgaaaaaaacaacatttaaaatgtttgaagttttctaactatagcttattttttagcttttttaatcacttttatggcaatattaagaagttcaaaaatttgaattttcgacttattgtttgaatttgggttagttcaggaaaaactttttgtatgttgcttttgtccatgaggatagtcactgattggacgcgtaaattgaatagagcctattgactcactcatcgcaacagtctttggtcaagcaaattggacaaccccgaattttcatacaactaatttttgtccaaaaaagggtggaaaaaattcgttaagtcagtcagactagaggaacccaaaaccagtgtgaataaacctcagaattgttgtcattgtcgtcgtctctctgtctctgtcgcatccgcctttcatcttcccgaacaacgtcgagttgtcgcaaaagttcgcggacgaattcaaacagttgttcacggtcggcgatggcttgctcacgttcctctgtgcccatgttcccagtcgccaagttagcatcaaacacattgattcggtgtgttgcatccaaaatttgagcaagtaattgttgacgacgatataaaagaaaattcataaacgctaaaacagatatgtataagcagagttcaagaaatttggtgaaaaattaattttcgacttttgtttaaattcgggtccgaggttcgcaattgaccaaaactgatgttaggttagtgatta

SEQ ID NO: 45291 - DNA, 867 bp, Heterodera glycines
gtaagataacatttgcccgcaggcatttttcggtatttttcaaaaaaagctatgaataggaaaaggagggaagcggcggtttccaaagacattgccggaaaaattgggaattttaataaaaattggtggcccagcggtgccgacggacgctgcaggggaaaaagtcggaatttgattattttgaattttttaaataaatttttaaacaaaaataatttgtaaaatatttcactttttttgctcaattgttttgaagaaaaatgcatttctgcgttgaatttttcgattctgatttcactattcgtcactaaagctaagttatgatttattatttagcaaacaaaatttaaatagtaattaaatttaattattacgaatagggctgctaattttatgttaatttttttcgtacatatttttcatttttttacatattttgaggttttttgagaatttatagaaattttttgcaaaaaattaaaaaaaatttttttgaaaatgtatccctaaaaaatcgattttttcaaaaaatgatatatcaaaaattaatttgtaaaatattcaaatgtgattctaagcctattttggtcatttttatggcattttgtgcctatttcactttttacgaagaatttttttccaaaaaataaccattaagtgatcatcatctgtgttccctctccgtggacctacgaaaattgctaaatttttggtccattcccatcccattcatctcaatttgttgtaaatgcaaaatctgaaaatttggattgattgccatcataaaattcaagcgggggggggggtcgaaaaatttttcggactttttaatgaatttgttaagaaaatttccaaaattttgcgacc

SEQ ID NO: 45292 - DNA, 966 bp, Heterodera glycines
cggctcattagcatttctctgattggccttccttgttttcaaatgcttcaatggcgcttcttttctcatgctcaatcactttttgcagctcttcaaatgccgtcggcaacaacagttcgccccttttagtcctttccaaaatgccgaacaccgcgaagtccacgtcgtccggcatgtgcatggctttgtcgctgtaaatgtcgatgattttcctgttgaatttcataaaattttcttccgcttcttttgtttcttccaattcactttttaactcttcaaaagcgttggtcgcttttttaagcaatccgtccaatttttgtacaattaattgcttcaaaaaatgcgacttttccattgcaatggaaattaatttgccgattttgccctttaattcctcctgaattaattaattaatttttaaatgataattttcatcaattaaatgtacctttttgttcatggaatttggccatttacaaattgcagcattaatttcagctaattcggcacttaaatccgacgaaaatttgaaaaaccctttaatgtcgacaaaaggcttttcaaaattgatcattttggttttcatttcgttcaaccaaatgcccattttcatctcaacaaccaactcatccacaatcctttgagcttgttctttacttgggttggctaattccttccgactaattaggtcattaagcatttccgtggctcgctcaaatggcgacaggtcacaatatgagccactttgttctgcaaatgccacaatttggtttatttttgcaacaatacaaggaaacattttgcttgtccatttgcatttttcaatttttttcatcgaaatctccgcaaaaagagtgccaaaatcagtttgaaggcccataattagggacctgatcttggccattgccatcaaatgctcatctgccgcttcgcctcctccgtctccgatttggtcattggcactaa

SEQ ID NO: 45293 - DNA, 1001 bp, Heterodera glycines
tccatacctcacatatactcaacgggccgaaaaatcatttttagagcataacaactgatgacagccactgtcattgtttccaaagagatttctattaccagatgccaaaaaaagagatagcaattttttggaccgtccatacctcacatatactcaaacggcccgaaaatcatttttagagcataacaactgatgacagccactgtcattgtttccaaagagatttctattaccagattgccaaaaaaagagatagccatttttttggaccgtccatacctcacatatactcaaacggcccgaaaatcatttttagagcataacaactgatgacagccactgtcattgtttccaaagagatttctattaccagattgccaaaaaaagagatagccatttttttggaccgtccatacctcacatatactcaaacggcccgaaaatcatttttagagcataacaactgatgacagccactgtcattgtttccaaagagatttctattaccagattgccaaaaaaagagatagccatttttttggaccgtccatacctcacatatactcaaacggcccgaaaatcatttttagagcataacaactgatgacagccactgtcattgtttccaaagagatttctattaccagattgccaaaaaaagagatagccatttttttggaccgtccatacctcacatatactcaaacggcccgaaaatcatttttagagcataacaactgatgacagccactgtcattgtttccaaagagatttctattaccagattgccaaaaaaagagatagccatttttttggaccgtccatacctcacatatactcaaacggcccgaaaatcatttttagagcataacaactgatgacagccactgtcattgtttccaaagagatttctattaccagattgccaaaaaaagagatagccatgttttttggaccgtccatacctcacatatactcaaacggcccgaaactcattttta

SEQ ID NO: 45294 - DNA, 1280 bp, Heterodera glycines
  unsure (1)..(1280): unsure at all n locations
tcattgtttcagctgttgtgggagttccaaaggcgcaaattggcagaattggaaacggcacaaatgactctttttctgaacncaagcaatttgtgtgggaagaaaaaggcagaggagggacaattctttggagagtcaaaatggcacgaaacggcagagaaagtgagggaacagatcagccaggcatgtgaagaaggcgaagagagtgccgccgttgaaggcggagaaagtgaggggacgacgaagaagacaagcgaagacattcaggtcagacgagcagagaataccgagagaaaggccccattgaattcagtcggaagtcacaaattacatggaaactgcccgtctcgagttgggccaaccgtccaccagcggcaactgcgtcgacccgtcctctccaccactcgtcacacattttaactcaatggccgaactgctcttttggtggcggattaatgccgaacgcttcccacgccttgtgcagctcgcccgtcagttctgcgcagttccaatggccaacagcagtgaccagaggaaggcactaagcaacgacaatgcggaggaagagaaagtgacgcggagatacgcagccgaacagatggcagaagatggcgacatggcacaattggagagcggacggacagaacagttacagctgctcacacagctgatgaccgtgagaatggcactcagagagggggcgacagaaacgaacgaaaatggcaaaaaacgaaacgaatgcatggcaccaaatgaagaaattacaactattgaaccaattagagaaacatcagaaattaaaatatgaacttttccaaattggattcatcaaaaattgtttatctttcgtttctcgatgaacattttttgaaatgcacccataatcgaatcaaaatgagtcaaagggtcaagcggttgtgataaagtaaattgcgatagatcagagaataatgtgagatccgatagcaggcccataacagaaatttttcaacatttccaaaaggggtcacttatttttcggggattggttagacatagttacgggcctgattcgcagtgattttgagtggtgaacaaaacaacaaacaaaaaatttaacgtgcattccctcaagcatccacctgcgcagtgatttcagcctcgtattccgccctcatcgtcaacgggggcatcttggtactgctgatacttcgagatcaaatcgttccttgttgaattcggtttccgtgaattcaatctcgtccatgcccttccccggggtaccaatgaagaaaagcctt

SEQ ID NO: 45295 - DNA, 1072 bp, Heterodera glycines
  unsure (1)..(1072): unsure at all n locations
aaaaattttaaaaatttttatccatctccctttttgatagaaaaagcatcagagtgccttaaactaacatgtaaataaaatttggtgcgtttcagagcagtttctgtaaaatactttatgaattaattatgcaaaagacaaataaataatgacntctcttccttaataaanaatccccgaaggagagaatttaattaaatccattccttcgggggaccgtgccgggtgccgcggggtaagcagtgctggttcgtttcatcacggcaccgaaccttttggctagtcagcaatcgttgcttaacttgccagatcggacgggtgcgcatgattccactgttccaagcaccccaccaaaagcaaacgatataaccaaaatataaggacaaattttttaaaaaattttttctccatcttcctttttgatactaaagcatcagagtgctaaaattaagttgtaaataaaatttggtgcgctttagagcactttctgaaaaaaatatttatgaaacaaaaaaatcgattttttcaagtgtccgtttggggtactcaaacaattatggggagcaaaaatccaacgcagaattaaagtacaggctatagggaagctactcccgaaggattcggtctccccataaatctgggcgcatcggctcggggggactgccccgaaaacaaaaaaatcgattttttcaagtgtccgtttggggtactcaaacaattatggggagcaaaaatccaacgcagaattaaagtacaggctatagggaagctattcccgaaggattcggtctccccataaatctgggcgcatcggttcggggggactgccccgaaaacaaaaaaaattgattttttcaagtgtccgtttggggtactcaaacaattatggggagcaaaaatccaacgcagaattaaagtacaggctataggaaagctattcccgaaggattcggtctccccataaatctgggcgcatcggttcggggggactgccccgaaaacaaaaataaatcgattttttcaagtgtccgtttggggtactcaaacaattatggggagcaaaaatccaacg

SEQ ID NO: 45296 - DNA, 684 bp, Heterodera glycines
agggcggcggacgcggggcacgacggcggagggagcgccgcacgcggccgaggcaaaggtcgcaaagtgttcagactgagcggcggaggacgtcgaatgcaatgccgaagtttaacggtgcctaaagaaagcgggggaattggtcgagagaatttggggaaagataggggagatcatttcgggggagggaattttagggggcacggagggaatgcttttaggtgacagtttggctcagaatgcattctgagcagcagagagtgtccgcccgtccggttcaatttaccggcactttcgtggggggtcgagtcgtgggatgagcttgatgagcttaagcttggctgtgtgtgcaactttcgttctgccatgcttatcaatccctccttaagtgatggcaacgaatgctttgctttcaaacagtcgaaactcactaccttacctcgtcaatttgccttgtctgatacggtgggaatacggctcggcacactccgtcgcccaccgttggcatcgattcgtacgtcgacgtggtaatgctgccgccctcctgggccgagctgagcaccgtggaaacagtggcctgaggaggcaacggtttcaaatcgacaaatgcaacgattgcctgcgaagttgtgctggtggggtgcgggtcgcccgaacggctcatcgacggagtggcggacactg

SEQ ID NO: 45297 - DNA, 1090 bp, Heterodera glycines
  unsure (1)..(1090): unsure at all n locations
ttntgtacggaatgccagaacgtttgccaaaaaaaatgacggagtatgccagtgttgcagtgagaaagcatttacacgcagctttatcttaaatttgtattatactaaatcaaatttttttaggtattattgaacgctttttatgatttatcattttttttgggggttttatcgtataaaaagacaaaaaaggaatttcattttctccgaaaaactctcggattaatttgacaataaaaaagtgataagcgtcgtaaaaaaatcgtgaataaaaaatatattgaaactaaaaaattaaaataaaatatactaaaataaataaacttttatttttatccattaaacaaaaaaatttttaatttattttattaatttttaagaaaaaacttttatataaaattgttaaaaattccatttaattgcattacgtaaaaacttcaacagcttaagtttttggtaaatggtgtacaaattttgcaaaaggtgtcccattgccggatcattttgttcaacataatcaattggagatttgccaaaaaataaaaaacgctaaaaaataagtatatataaatttaaaataaattaaaattagaaatctgagtattttaaaagaatttaaatttaatttaattaaaattaaaaaacctgagttaatgagttggcaaatgtattgacaatgacttgatcgagttgacccaactggcataataaactttttgttgctacggcaccggcacttttcacaagtttggcaccatttttatataaatttgcccaaaaacttcccattgttgtacaacaaactgccgaaatagcaaacattgaaacaatgatgcaaaacaacaatattgcacgcctcattattcgcctttttcagactaaatttcttttaaaaatttaaatttattttaattacaattatacattaattttaaaattaaaaaacttaaatatatatttttttgataatgccaacaaaattagattgattttaattttttattattaataattttatcaccggaaatatatgaaatgtctgtaaaaaatatgtgcaattaaaaagcataaaaaaataaaattttaataa

SEQ ID NO: 45298 - DNA, 808 bp, Heterodera glycines
ccaattttatttacaagttaattttagcactctgatactttttctatcaaaaagggagatgaataaattttaaaaaatttttaattcctttttaaacaggccaaaaagtttaggcttaactttttagtgaaaattcaatcactcatttttcgagtactgatcaaaagcggactatattttttaaggacatccttaagacaaggaaaagcacctctgtgatgttttaagaccagtaactatgaatttaaattttctatgaattttggggagaagggagtgggaaacatgatttcaaaattttcaattttttatagtctaatctactcaaaacggttcagaattcaataaaaataacattcacggtgcgaaaaatggggtatgaaaagtttattgggggaaaaaagactacaaaataatacccctgggagaagggagtgggaaacatgatttcaaaattttcaattttttctagtctaatctactcaaaacggttcagaattcaataaaaataacattcacggtgcgaaaaatggggtattccttctacaatcgcctttatacatcccaatatgagcgctaaaattatcagagtgccgaaaatcgcatgtgatctaagcctagaaaaaaatggtcaagtaaaaatcgtaattacgctcaaaaagcttctcaaacaattttagcgcttccaattccttctacaatcgcctttatacatcccattatgagcgctaaaattatcagagtgccgaaaatcgcatgtgatctaagcctagaaaaaatggtcttcaaaaagcttctcaaacatttt

SEQ ID NO: 45299 - DNA, 1295 bp, Heterodera glycines
gagatatgctctttgaagatttatctgctgggcaaaaatcagcagtgttttttcaaaaacgattgataatgacgacaatgccaaatttgaaatttgaaaaatctttcttctcccgcgatttgtcggaaacaatatacttatttgttagtacaatacataatatacatcattgggaattttgaattattcttgaacccgagcgtttgtcttagttttcaatgactaattagcctttaaaatttagtggaaattttaaatagtaaaaaattttttgcagttcgatattttatggttttaaatttaaaaaatattttaatcggataatattataactctaaagaaatttttaattatttttgtttttaaatagcaatttttatttattaaaatttcattttttggaaataaattatcctcggccttatatccatctccacaccagggatgggccaaattgaaaaataaaaagcgaaatgcgaaaagcgaaatttgcgaaactgaaaaatgcgaaatgaaaaaaaagcgaaatgcgaaaagccaaaatatgcgaataatgcgaaaggcgaaatgcgaaaagcgaaacctcggcccatccctgctccacacccataaatttttcgcttcgtatagcaccttagttttttaaagggaaatgaatggtcgggttactgtatatcttggtttttgaactccattaccgtaattttaagttcaacgacaaatactatatttttgtaggaagactactgtaattgatttaatcaaaatttaatgcattttaatttattgcataacaaataaaataaaaattacgacacagatggtgagagcacaacagcaccaactccattagcatcagcaacagaagctgaagaggaggaacagccgattttgctcaattatttggacactttggcccagtcaatttgtgtgatggcgatggaacaaagtgccaacaaattgttcgagcgccaaatccaattgttctaccaattcgccgatggtttggcaaatgatgtcatccattcggtgcttcgattggccgacgaagagccatcggattttgacgacgatgaagtggaacaggaggaacaggcttttgaagacgtacattctgctgaagaagaagcggaaatgatgccgaaggacgacaaaaacgcatttttggcagaaaagtaaaagtttagagtcaaaaatattaaattttgaaaattattttatccttttctgacatttgatttctgggtcctgtcctttcaattcacggatcgcttccataaaggcagattgtaatt

SEQ ID NO: 45300 - DNA, 1702 bp, Heterodera glycines
atcctcgttagtttcttttcctccgcttactgatatgcttaagttcagcgggtgttcacgtctgagttcaggtcgaaaaatcaaagcaggaatgccagtaatccaggcactccgccacagcatgcaaagcattggtgcgcttgagttacggtccgtaaaacgcgaattagaaccacaagttcgcgccagcacaccaaaaccccacagccgagctgagcaagtaacgtaagaacacgtacaagtacatgatcccacgaagcaacgcacaagcagtgcattttatggtaacgaccctgaaccaggcgtgccaatggatgtaactccaatggcgcaatgtgcattcgaatgttttgtgttcaaggtttctgcagttcgcactaattatcgcagttggctgcgttcttcatcgatccacgagccgagtgatccaccgataagactagaattcattcttcaacagaagtgtaaaaaaaaataatgaaaaaaaaagaaaaagctggcggtgcccgagctgacactcattgagtcttaagccacgtgctaggccaagcacgggcactaccgcgtcgtctcatcacggccacggacgtagcagcaagcacaaacacaccgctagttacggcacgtaagaccgggaacgaaaccaccatccccagtcagtgtgttatgtgcctgccacaacaaccgctcaacgacgcacagacgccagcacagccgttaggtcgccccacgagcgtgcatcccacattggcgcagcgaaccagccaagcgaggcggcccgccaccgacacattgccacgcagcagccatacacaggctttcacatgtgcagcactgagcggtataccacagctccaacgtatggaagcaccccaaaagcatggctcgtgaggcagctgccccgtaatgttgggcagcgtccacaagtcatctcgaacgacctgtgcccatcagcggacgggggcatttggtggtgccaacgctagcccaacaggacagcaggtaggtggtgaataggaatcacttgggtaatgatccagcagcaggttcacctacagctaccttgttacgacttttgcccggttcaagccactgcgattaaatcggttccagtctgcataccgaccgaagccggaacactaaccgtccccgaatttctcgaaatggctcagtcccgggcagcgacgggcggtgtgtacaaagggcagggacgtattcagagcgagttgatgactcgcccctacaaggaattcctcgttcacggacaataattgcaatgtccgatcccaatcacggcaaattttcaccggtttaccaacccctttcggggaaggacaagcacgctgattttgccagtgtagcgcgcgtgcagccccggacatctaagggcatcacagacctgttattgctcaatttcgtgcggctgaacaccgaaaatccctctaagaagttgtgcccacagaagcaatgagccaactatttagtaggctagagtctcgctcgttatcggaataaaccagacaaatcgctccacgaactaagaacggccatgcaccaccatccaccgaatcatgaaaaagctatcaatctgtcaatccttacggtgtccgggccgggtgagtttccccgtgttgagtcaaattaagccgcaggctccactcctggtggtgcccttccgtcaattcctttaagtttcagcttt

SEQ ID NO: 45301 - DNA, 1100 bp, Heterodera glycines
atcatcagtatcatcttaattttcccccagtgatttgtgagtgataagaaaatagaagaaattcagggattaattcctgaggaatttccaaggaccacgtgcatcattgctacaacggtgccttaatggctttttaatgtcaaaatgcccgacactagcgcatttctttagacaacggaaattaattcctgaggaatttcccaaagccatgcgcagctttgttagaccgatgccgaaatggcaatataattggaaaaggacagacaacaatgcttttctttatatcagctgatggtttacaaaaatcgaaatacttcctgagtactttccaagaaccatgagaataaatatcgcactagcgccaaaatcgaacaagaacgctaatcatcagtatcatcttaattttcccccagtgatttgtgagtgataagaaaatagaagaaattcagggattaattccagaggaatttccaaggaccacgtgcatcattgctacaacggtgccttaatggctttttaatgtcaaaatgcccgacactagcgcatttctttagacaacgaaaattaattcctgaggaatttcccaaagccatgcgcagctttgttagaccgatgccgaaatggcaatataattggaaaaggacagacaacaatgcttttctttatatcagctgatgctttatttacaaaaatcgaaatacttcctgagtactttccaagaaccatgagaataaatatcgcactagcgccaaaatcgaacaagaacgctaatcatcagaatcatcttaattttcccccagtgatttgtgagtgataagaaataaaagaaattcagggattaattcctgaggaatttccaaggaacacgtgcatcattgctacaacggtgccttaatggcattttaatgtcaaaatgcccgacactagcgcatttctttagacaacgaaaaataattcctgaggaatttccccaagccatgcgcagctttgttagaccgatgccgaaatggcatataattggaaaaggacagacaacaatgcttttctttatatcagctgatggtttattacaaaaatcgaaatacttcctgaatactttc

SEQ ID NO: 45302 - DNA, 1481 bp, Heterodera glycines
  unsure (1)..(1481): unsure at all n locations
attggcaatgtgcttatttcncattttggcatttcaaatggccaaagtgagtgagggaaaaggggggagggcgagaaatttgacgacattttaaaaggaaaatgaaataattggcagttttagtttcaaaagatggcggattttaagcaagaaatggatgcaggaaatcaaataaattgtgccgcttttggccttttggagtgccatttcctttccagtctaaaatgagccaattaattcgagaaaataaaatattttaaaatttaggaaaaagtgaaaggagaggggaaagggtaatggatgcggagaaacggcgaagtaaggagaaaaagtaaaacaacaattaattaagtaattaatgggatagcgaaaggaaaagcgatgggacatccatcccattaatccattatcccttttggttacacctctgaaagtgatttggtttatctttttccttggtttctcccgcacaattagcacattcttctgcttattcatcgatcatctgcagacaattctcgacggcattggcatcacaccataagttgcacaacttctgctcttttttgacgaaaataaatggcaaaaaaaaagtaatcgcatgataaattcccctgggatcggtcatttttctttttccaattttattttctcgcattttttttattttactaacaaattctgaattgctataatatcgtatataagcgagtaaatgagtttatttccattttttggttcttcgcttttttgcccttttggcgatacttttgagtatcttttgttccgattgtcccactgaatgatggcaatttctttttctgttatacggaggaggaatggagaatgaatggcttttcaattggtcattctctgctgatttggaggtccatcgaacaattggaagggatcgaggagagaacggaagaaatgaatgagtcgagaacaaagcgacggaggacggcacaatcagaaggaaaactcgacggacggaacggcacccgaaagaattgggggnggggggggacaaatgatcgaaacggaagagacgaatttggaagaaaagggacggaaaagtgatgggatggcatcatcagagaagagatgttcggaataatttcaatttcttaaacacaaccaattaatattccgtcccattttgactttgaaattcacacattaaatgctgtgcacaatccaaagaaatttcattttaatttatcatttttaatcatttaaaaattatatgggaataaattcactttaaaaatgttaaaagtctgatggattaaattgggcaattagtcataacggaatgaactgatgagcaaacatttcattatccacccattcattcgttcgcttactcatccctcaattaaggataaaagccaaaatcgtcttcctcggccgtttaactcaaaattcatctgttttcatgttactcgaatactcctttctaattgctttattacttttgc

SEQ ID NO: 45303 - DNA, 1184 bp, Heterodera glycines
cgtcaatttgggggaattaaaaaccaattttattccaagaaatatgggagtccatgaatggttggttggcccatttttgtgcataaatttcggttgaatgattcttgaatcgaaattttcgaataaagaccactaaaaactccgcatttcctccaaatttaaggtgttaaaaatttcgattttgaatattttaaaggtctcagggcattgaaggccaaaactgctgcattgtgtttcatttttgagaagacaaccaaaaatgattgttcatgcaaagatttggagaaggaactgctccaacttgggctgccctcgggtttttttttaccattttttgaaattcgaaaaatcttggacaaatttttcttggcacagaccatgtcagtgtactggttgaactctacgattccaacagggccgcattgtgtgacagtttggcagggcctgcaatcaaaggttttttcatgagaggcggtaattttacaaaaaactgctcctccctctttgacaaaaaaaaaaaagagtaaaaatcagttttgaatatacaaaatccgaattttatttgtttctgtgggtttgcgattgattcgagttaatccaatttatgtccaaattttcaaaaatttccgaggcctaattttagaaaaaattgaaattttagccccttcactaacagtggtgtgcaaagagcaggttccaacggctgccgacccgtcagtgaaaagtgactattttcgcttggacacaacaagttcggacgggtcaacagcaaccctgctcatccaccgagatgagttggtacagttgagaacctgtaagattgctgtcgcagtattttaatgccttaaaacccctttttttgcgggttttattaggcatggaagatgccgtgagagtgctcgagtcgttggtggtcaacaaagaatgatgcccgcttattggagacacgccccatgtccaatttttcaatttgtgacttgccacttaaactaaagcatggcacttacaactagtgccattccaaattctgccattcatttcttccgcgcagcacattttatttaatttaaaatattttattgtcacgattcgcaaaacatagtcggaattcaaaaacaaaaaaaaaacatgacgcatcaatttgagaccgatggagaagaaagagagaaaagtgtgtgttttgc

SEQ ID NO: 45304 - DNA, 1284 bp, Heterodera glycines
agaactcaattttttgaatggaatctgtccatttaaaactttataattcttatgccattttccatgactggcacaggagctgatcattaacattccttcatttgtctttttccttttatgtcattttgctttttattcacaattttctctttgggggtgtcgtcttctgagaaaaaacattgaaaagtaactgtaaattattgcggaccgacaattttttgtgttttagagcatcgaaaagttgccggaccgatgtcttcagttgattttctcctatttgtcccccactcaaatgctttccgtgggtcgagtgtgtcgcagatggaagggcattgcgtacaggtggctgttggaaaggaaattaagtgtgatttggcggtgccttaggcgcaattagtcccagcagttcccgaatttgccattttttcgagactgactcggcttgaattgtccatcttttgtctttttgctgctaatgtgccttttcgccctttagccccgtcctttggagttcggtgtccttccgtgtcaaccatggcggcattcaggtgacctcgaaacactcgcgtttcacttccgtaacgttgcgccgcaggtgaccaaccccgagcttttcgcccaaatgatcggagttcgctttaccgaactgcgcctttgtgagctgtccactgatttgatcactccaattgtatttgccaatgattttgtgccaaattcactcgaagtgccttttgccctctttaggtgctccatgaattggcgagtcgttgtccaaaactccaattcctcactttgggtactaatttattgtatcaagtataattggtccattctttttcagatttttccaccgctatgcaggttaacccatctgtcaattggcatttaaattataatgcccactggattaaaattggcacatttgcccctctcatccaaaaagtggcatctttttcatcccatttaatgacacttttttggcacattacatttaccccccccccccccccccagttgcacgacttcaacgacctccaatcgtttccgagtcgtctccgttctttaacgttgtgtctcagtgaaaacatttttctcgaaggctttcttcgtaaagtgtacactttcatctccaggtcactcttcttctcatcacaatatttttgcttattttcctctatttttagtgttgaaattctgcacattatcggttttcctcctcttccaataaattccattcgcttctcttaaggaacgtatgaaaaaggtggaggacgaggaggagga

SEQ ID NO: 45305 - DNA, 751 bp, Heterodera glycines
ttttgggggaaaccccacatgtacaccgggtgtagaaaaaaaagagatagccattttctgagaatatctattcttctgagaaagcaattttcaacccgacattttgtagggctcaaccgcagatagtaatgcgtttttggggaaaccccacatgtacaacggtgtagaaaaaaagagatagccatttttctgagaatatctattcttctgagaaagcaattttcaacccgacattttgtagggctcaaccgcagatagtaatgcgtttttggggaaaccccacatgtacaacggtgtagaaaaaaagagatagccatttttctgagaatatctattcttctgagacagcaattttcaaaccgaccttttgtagggctcaaccgcagatagtaatgcgtttttggggaaaccccacatgtacaacggtgtagaaaaaaagagatagccattttctgagaatatctattcttctgagaaagcaattttcaacccgacattttgtagggctcaaccgcagatagtaatgcgtttttggggaaaccccacatgtacaacggtgtagaaaaaaagagatagccatttttctgagaatatctattcttctgagacagcaattttcaaaccgaccttttgtagggctcaaccgcagatagtaatgcgctttttggtgaaaacccacatgtacaacgatgtacagaaaaagagatagccattttctgagaatatctattcttctgagacagcaattttc

SEQ ID NO: 45306 - DNA, 1329 bp, Heterodera glycines
  unsure (1)..(1329): unsure at all n locations
tcccaaaaaaaatctgaaaaaccaaggcggacaaattgatatgaaatatatatatgatcgtcaaattttatggattcatcccatttaaaatttgaccactcctttcttttttttggagttttttccgggctttagattaagcatcagggatgggccaaatcgaaaaataaaatgcgaaacgcgaaattccaagaaactcgaaagcgaaattttttctacaacttttttaagtcaaaatcacaaaacaaaaatcaatttaagaagcaataaaattttaattgttcatcaaactgtgtatttcttttacttctgcattttccatgtccttttgaatccctttgatttttttgttttttatttttcatttatgtttatccagcttccttagaggcatccactctccacttgttttatttatttttcaagaagatattcaccaatttaatttatttgcgctggcgtttggcacaaatgtttaaggttggcaaaattatttcataatgttggcggctaacataggccattcccgactgatatgtattggcacaaacaaataattgctttatcaattctgtcattttgatttttaaaataattataaatttatatacgcaaagtttcttttcgcttttttggcagttttattaaacgagccagcaattgctcaaaatttgatgncattagcnaaattgtattatcacaaaaggctcctaactctgctgatttatcagcattttgctgcttttcaaggagttaatgatggtttttttgagatgctgatttgctgatttttgtaaaaaaccctcaaaaatggttatgtaagattgctaccaaaaactcacgagttttcaaatttatggcgacctatttgacttaataaaattcattaaaaattccaaaaattttccggcgttgtttttgcttaaaatctggctaataaattacacttaaaatgtgaaaaatttttccctggcgccaccggacgctaccggccctctgttcccaaagttttttttttcaaaaagcaaaccgcaaaaaacatttttcttgtttttttttgataaaaactttacaaaatggtaattttcatcctccaaatgttgattttaaaaattcaattgggagccctgttatttgtaaattattaattattattattattatcactattgttatttaaatccttaaaaaaaacttatgattatttattttttttttattattaagtcctgaaagaaacattattgattcttttcgctggcaaatataattatgcttaataattatgcttatccganttaataaaataggatattattttatgttgta

SEQ ID NO: 45307 - DNA, 1550 bp, Heterodera glycines
  unsure (1)..(1550): unsure at all n locations
acaaaaaatcatttccggaaaagccctttgttttatgtataacataaaggtcgcatntactccatagggattaatttaaattttaaaatatgataatgtggcgttttgttgcttttgcaaatttataattagcaaattaaatgcagttattaattgggggctaattacatacataatgctcatcattttgcttaacttttgcatttgtttatttacgatatgtgaaaagaaatggtgggccaaaaatgggcaaatacagaaaacgaaaacaaaaagatttgacacatcgcaaaaacaaagcgcacaatggtgttgagtcccatcctttctttttacaaatgatgagggcgggattccccaattttaccctaaaatttttcaattaaattggggctaaaaaacccgtgaaaatttaaattttttgactatgctcctcaaaaaattccaattttaaagcgccgaaacatatcaaaattcttgacaacagtaacaattgtttactgtaattaaaatcaaacgaagttgtacaaaaaattccacaaaataacggacaaaagttttcctctccctaatgaccccagacagttaaatatataaagaggggaatttggtttattgtgtttttggccaacaacaattaacagcagcagaacacacattaaacaacaaacataatacaacaaacacaatgaggtggaagaagaagaagaagaagaagaagaagaagaagaagaagaagaagaaactattcacaaagagaaataatggtgttatgataaaaaataaaaaaatgttgcgcaatgaaaagacgaaaaaataaataaataaacaaaataattaattattggacaaaaaacaaatattttttatttgaattaaattttttgttggcaaagggagggcggaaaggcttaaaaattgcataataaaataattgacgacggcggcggcggcgacggacattttaataataataatgatgaggttggatgaggttggatggcctgatcgaagtcgattaaagaagagggagtgaataaagcatcgctttagggatgaaaggcacgtggatttttacatggaatagcagggcaagagatagagaaagagtgggaatgaatagggcaatggagaggaagagggatatccgtgggataaagcggaaaaaagcaacgaaaatgggggttaataggacggatagaggagataaagcctgggaaaagaagagggaaagtgataaggagggaagataacactggaagagatgagatataagcatgggaagagaggcgataaaattgataaaatatggaaggagggataaagcgttgaaaaggatcaagaagataaaaggaaaagtgaggtaaaagcagggcaaagaagaagctactgctgataaggtggaggggtaaaggatcaaaaaagtggggataaagcataagaaaaagaggctaactaggtggaggggtaaaggatcgaaaaagtaaggataaagcatgggaaagcgaaaaagtattgaacaaaatgtgatccactgatcattgattgat

SEQ ID NO: 45308 - DNA, 954 bp, Heterodera glycines
  unsure (1)..(954): unsure at all n locations
cccctaaaattgacacgtgaataatgactgtgtattaacacgtaaatcatgcccgtgaagtaaaacgtaaatcatgcccgtgtattaacatgtaaatcatgcccgtgaatttacaagtaaatcatgaccntgaattgacacttgaattatgagcgtgaattgatacgtgatttaacccgtaaattgacactgaataatgactgtaaattaaacgcacatgaccgtgaattaacacgtgaatcatgaccgtgtattaacacgtaaatcatgcccgggaattaacatgtaaatcatgaccgtgaattgacacgtgctttaagccgtaaattgacacgtgaataatgactgtaaattaaacgtacatgcccgggaattaacatgtgaatcattaccgtaaattaacacataaatcatgattttgaattaacacgtaaatcatgactgtgaattgtcacgtgaattaacccctaaattgacacgtgaataatgactgtgtattaacacgtaaatcatgattttgaattaacacgtaaatcatgcccgtgaattaacacgtgaatcatgatcgtgaatttacaagtaaatcatgaccgtaaattgacacgtgaataatgactgtaaattaaacgtacataacccgggaattaacactgaataatgaccgtaaattaacacataaatcatgattttgaattaacatgtaaatcatgaccgtgaattgacacgtgaatcatgccctaaattgacactgaataatgactgtaagttaaacgcacatgaccgtgaattaacacgtgaatcatgaccgtgtattaacacgtaaatcatgcccggaattaacatgtgaatcattaccgtaaattaacacataaatcatgattttgaattaacacgtaaatcatgactgtgaattgtcacgtgaattaacccctaaattgacactgaataatgact

SEQ ID NO: 45309 - DNA, 1567 bp, Heterodera glycines
agcaagtttttattagcactaattcaacttcaactttatattacaaaaaaagaaaatgtttttcctactaattagaccggtgcccccacaaagtgtccaagccacgaaatgtccaaaagagtaaaaacccacgaaatgtccaaaatttttcaaaatttataaaaacaaaatgagtctaatttaggatttttagggttttcggggtcgctgaacatgagtatactatttatattacccgttgcctaaccttaggcccatccgaataataaaaaactcaaattcgagagttggacatttcgtgggtcagcgattagaccatggggaaatccatgaaaaaaaaattaagaatttacatagaatttacatcactaataataagttttatttataaatgttaatattttaattatgtacaaattaatttaaaaaggtcgtataaataattattttatttgaattgagtaaaatatttctttttgatttaaaaattattctattacctaattattttattatttatgattagggttataagttgtatgcactaaaaaatgcaaaatatgcgcataaatatgcactaatcccccaaatatgccctaaaaaccctaaaaatgcccaaatatgcactaaaatatgccttaaaaactgtcaaaaatggcttttaacttttaaaaaaatgccaaaaattgtgtgtataaattaagaattgacttttaaaacaccaaaacaatgggctaaggagcattttttagacaattgtaaaaatatttttattatatgctaaaacaaaattacatttttatatacataaattttttttacaaaagttcttacaaaaatttaaaattttttcgatttttaagggtgtattttaaaaaagttccaaaaagtcgatccttagggtgtatttttcgcttttttcgcatttttcttatgaaaatttgccaaaaattaaaaaccttcaccaaatcaaaaaattttaatgcagaaatgctatttttgagcccctttcttcatagcatatgcgcagaaaaaatatgcaaaagcatacaacttataaccctatttatgataattaaccattaaatcaactttttgtataagatttattttttaaaattttgtataaacaatttttcgctgcattttttctcttttatttgagaatgtttcatgtcccccgcaacactgtttttgttctcaaagggcgagaaatttgataaaagtttttctctttttaattttataatattttttagtaattataatccattttttcgtcatataatcaaatatttttatacgggaatctttttcagtttattttattatttaaggctattaaatttgcttaaattattgtagtgatttgctttagtttttattattattcatataatataataagttttatttttgtaactgatgcgcattgattaagcttaattttttgttgaaatttttttttttgcgtaatgaaaattaatattattatttttttcgtgtgtatttatgcatttttaatatttatttaaactttttatcatttttaaatttaatttttttt

SEQ ID NO: 45310 - DNA, 1712 bp, Heterodera glycines
ataataaataattaatgaaaaagtcagaatttcgaaaaattttaaaaacaacaagcgttggcattttttcaggttaagttagtcctttacaatggagaaggcctgcaaaatttggagagattatatcgattttagtgcgctaggttcgatgaaactttttaaaatataagcctaaactttttggcctgtttaaaaaggaattaaaaatttttaaaatatttattcatctcccttttgatagaaaaagcatcagagagccttatttaacttttaattaacatttggtgcgtttcagagcactttctgaaaaaatacttatgaattaattttgcaaaaaataaataagtaatgaaaaagtcagaattttgaaaaattttaaaaacaacaagcgttggcattttttcaggttaagttagtcctttacaatggagaaggcctgcaaaatttggagagattatatcgattttagtgcgctaggttcgatgaaactttttaaaatataagcctaaactttttggcctgtttaaaaaggaattaaaaatttttaaaaattttattcatctcccttttgatagaaaaagcatcagagagccttatttaacttttaattaacatttggtgcgtttcagagcagtttctgaaaaaatatttatgaattgattttgctaaaaaaataaaatagtgaagctttaaaaattaataaaaaattttaaattcagaattactggagttagcatcatagcagtgcttttccttgtctttttgatgctctcgcaaaatctggttcgcttctgaccagtttataaaaaaaaagttaagcctaaaatttttcgcatatttaaaaagcaattaaaaatttttagatttttttattcatctcccctttttgatagtgaaagcatctgagtgccctaaataacatgtaaataaaatttggtgcgtttcagaaccctttctgaaaaaaatatttatgaattaattatgcaaaaaacaaataaataatgaactctcttccttaataattttcctgcaccgaaggtactcactcggccgcttcgcggtccaacgcagaattaaagtacaggctatagggaagctattcccgaaggattcggtctccccataaatctgggcgcatcggttcggggggactgccccgaaaacaaaaaaatcgattttttcaagtgtccgtttggggtactcaaacaattatggggagcaaaaatccaacgcagaattaaagtacaggctatagggaagctattcccgaaggattcggtctccccataaatctgggcgcatcggttcgggggtactgccccgaaaacaaaaaaatcgatttattcaagtgtccgtttggggtactcaaacaattatggggagcaaaaatccaacgcagaattaaagtacagactatagggaagctattcccgaaggattcggtctccccataaatctgggcgcatcggttcagggggactgccccgaaaacccaaagaaaaattttttggataaaaattatttaaatgaactgactagataatatttaaaataggttatttctcttcctttcaatatccctgcaaagtttggtgcgcttctgatcagtttctgaaaaaaaagttaagcctaaactttttggcctgtttaaaaaggaattaaaaattttaaaaaattttattcatctccctttttgatagaaaaagcatcag

SEQ ID NO: 45311 - DNA, 822 bp, Heterodera glycines
  unsure (1)..(822): unsure at all n locations
tcataagtttgttttgtagcaaataatttttctgaaattttgcatgctaatagaaaacataaagtggtatcgagtgttaatagattttttcaatttgaacaactatggaaggagtatatatactcaaaaagccaggctgtcgaccagttggccatcgctcagttgtcccacaactgaagcccaaaaatgaggccaaatacacaaaatgagggaacaaaaacatccaaacaacaacttgtatagtaataaaattttgataacaataaagaaagcaaaaacaccaatttgtactgctcgagagtctcttctcagtcccggtatttaaaaaagcataaatattttttttaaataaaaaccgtgaaatttcatacatttttgagttgttttttttggttcattttaatctttgttctcgagtctcgcgaaatttcgactcttgagcatttcgcgaatagcaatgagcaatgcttgaaaaatagatcttcaaagttacatcacaacagaaaattggtgcttaagccggcggtcctctatcgccagggggcattacttacaaattgcaagaacttcaaggacagctaataagctaattttcaagtacataggaagagggtaaattaatgtaaaacctgattctttgaagatttaagatttcatactgttaaataaaataaattacatgtctcaggtcttaaactttcgttgggtggtggcacatgaattattttttggtatggattggcccgaaaaaattttcataattntcatccnaacagggtgatcaagatcatatttttttggatatggattggnccgaaaaaa

SEQ ID NO: 45312 - DNA, 773 bp, Heterodera glycines
atcacctctgctggatatttttgtggattctttgatcccttaataaaccaaagtttaacaaagagacaatcaattatccgtattttaaacggagaatgtgagggaaggacaaatgttttttatatatttttttcgtcttaaaacgggaattatctcttgtacagttcaggccccgtaaatttttttcaattagcaatcaaaaaacatttcaatatataggtttcggtagcacgaatccggcattcatttcggccaattccgaagccctggacctaaattcaaacaaagtcgggaattcacttttactaaaattaatttattgcgcaaaataggtagattttatgcagaaattggtcaaaatgaaggtacttatatgcactttactagccataaaaaaaaatttttttgaattcgtgaaaaagttgtttccataggttttcagcaccgctgatcaagaatctgacgtccgtttcgatcaatatcgaaccccgaacccgaattcgaacaccgacttttaataaaacaagtatttcctctattagatttaaaaaatatcaaatatatttataattactaagaatcaaaacttatacgaaaattaaacaattttctacttattgtttctcaatttatatagaaaaattatcacaaaattcaaaattcaaatttcccaatttctcatatcattacactgtgatgggcgcagagaccaaactaaaaatattttgatcatcgaagagcattttaaaattatcgatattttccaattcaaa

SEQ ID NO: 45313 - DNA, 230 bp, Heterodera glycines
ggggaggggggggggggggggggggggggttgtttttttttttttttatttttttcttttttttttttatttttaaaaaaaaaaaagaaaggaagaagggggagggggggggagagggagagggggagagaaaaaagaatgaattcataaaaaaaaaaaaaaaaaaaaaaaatttttttttttttttttttttttttcctcccccccccccccccccccccccccccccc

SEQ ID NO: 45314 - DNA, 1063 bp, Heterodera glycines
gcgggggagagtgactggaagagagtggaagcgagaggaagagcgcgcgaagcgaactagagagaggaagagcgagggaagacaaatagcgagaatgaggagggaactggtcaggaagacagagcgggcgcgacaggggggcgactgagccgaagacagcggaagaccgaggaagagagaggaagagagtggaagagagaggaagagagagggaagcgaaatagcgagagtgagaggggggagagtgagtggaagagagaggaagagagtggacgagagagggaagagaaatagagagagtgaggggggggggagagtgaatggaagagaagagatacaaaggagaggcggcgcttaaatgtaatgtataaaaaagaaaaacgagtcttttcatttctttcatccttttcattatttatttatttactttctttcaacacactcgttcacttcgcttcacttcatttcattcccttgctgttttgtctccgtttgtttgtcgttttttggccaataatacataattcattttaaattttaaattttaaattttaaattttaaatgccctcgcaattaagtgactataatcaatagggcttgtaattatatggatataaaatcgcgaaatatggccataaaatatggacaagaaatcgcgaaatatggacataaagttgcaaaaatatggacataaatttttcccaattgagcgtacaatttctcaaaattttttcaaattcgcttaacgcaaagtaaaactttcaaaaatggctaaatatggtattaaaaatcattttggaagaaaaaaaccgatacaacttaaaatgtactcatcttagcgaaaaatcaatctgagaagcgaacttttcgcttttttgcttatttttgacataaatcaactaatttttatgaaaatttaaatttaatcaatattttcgacaaaattttgataaaaaatgtcttttttggaaaaattttccgattttggggtgtcaaaatccaatttagctgatggggggccgttctaatagagattttttcgaaaaatgccaaaatatggac

SEQ ID NO: 45315 - DNA, 560 bp, Heterodera glycines
  unsure (1)..(560): unsure at all n locations
ggggggggggggggggagaaaaaaaaaaaaaatttttctcttccccccccgcccgcagggggggggggggcgggggggggggtgtgtgtttttttattaataaaaaaaaaaaaaaaaaaaaaacagaaaaaaaaaacaagcgggggggggggggggggtggccccccccctcccccccccgccccccccccccccaccccacccccnggggggggggggggggaagaaaaaaaaaaaaaaagggagggggggtggtgttttttctttccctccccccccccccccccccccccggggggggggggggtttattttatttttaataaacccccccccccccccccccccccccccaaaaaaaaaaaaaaaaaaaataaaattttttttttttttttttttttttttttgtgtggtggtggggggggggagggggggaggaaaagccccccccccccccccccccccccccccccgcggcgggggggggggggggggggggggggaaggaaaaaaaaaaaaaaaaaaaaaacccccccgcgggcgggggggggggggggggg

SEQ ID NO: 45316 - DNA, 881 bp, Heterodera glycines
tggaaaaaattttgaagaggctctgcggaacggattagcatcggggttacgagatagaaaattgtcctaaaaagagatagccatttttctgagaattaattcacaatttccgcaactcttgcggtaatggaaaaaattttgaagaggctctgcggaacggattagcatcggggttacgagatagaaaattgtcctaaaaagagatagccatttttctgagaattaattcacaatttccgcagctcttgcggtaatggaaaaaattttgaagaggctctgcggaacggattagcatcggggttacgagatagaaaattgtcctaaaaagagatagccatttttctgagaattaattcacaatttccgcagctcttgcggtaatggaaaaaattttgaagaggctctgcggaacggattagcatcggggttacgagatagaaaattgtcctaaaaagagatagccatttttctgagaattaattcacaatttccgcagctcttgcggtaatggaaaaattttgaagagtctctgtggaacggattagcatcggggttacgagatagaaaattgtcctaaaaagagatagccatttttctgagaattaattcacaatttccgcaactcttgcggtaatggaaaaaattttgaagaggctctgcggaacggattagcatcggggttacgagatagaaaattgtcctaaaaagagatagccatttttctgagaattaattcacaatttccgcaactcttgcggtaatggaaaaaattttgaagaggctctgcggaacggattagcatcggggttacgagatagaaaattgtccctaaaagagatagccatttttctgagaattaatttcacatttccgcagctctt

SEQ ID NO: 45317 - DNA, 886 bp, Heterodera glycines
  unsure (1)..(886): unsure at all n locations
attttgctttgctttaataacttttttgctttaataaaccaaaaaaaaaaaagtcgaggaaaaaaaaagagattgaattgggtcaaatttggaaaaggttgtcagaactgagaaaagtgcatttgcctgaaactcgtggggacacaacaaactcatttgaaaaaatatcaganaatttaaaaaaaaattccgggggaaaatgcgggacaaacgaactgcagggattttaaagggatccaataaaaagttttattacatcctggtcctaaatatggccccctttttaaaataattgtaaattttgtacgcaaaacaacagatgtaatacaattaaaataaaaacaatggaatattattgcataaatctgagaattttcaccgaaaagcaatgcctcggactctgtgccgccaacaatcacttccaagggccagtcaagctcacgccgcatttgctcaggcgatttggtgatcagctccccgtcgatcactgggcaaaagtcgagtccctataaatccaatcaatggaaaaatctttttttaatttttcccgtaaattgcacacttttttgtgccggttgaacgccgatttgccgatgagcggtgccgaaattttgtaggcgggaactgagcgcataaatgtgagcaatgagtccagatcagtgtcggcacctgagtgttcaatcaatcagagtgtggggtaataaaatggcattcatttttggtgtgtatttttgtttaaatcgataattattggtagaaatttttaaaaaatgtcgaaatcttttagtaatgaatgttttctattgtaaaaaattaaaaatcttcaaaaagtaagttttttctaatttttttttacaatttttcactgaaaaactaagaatttaga

SEQ ID NO: 45318 - DNA, 1425 bp, Heterodera glycines
  unsure (1)..(1425): unsure at all n locations
aaattaatttttgcattttccggaggccttttctacccataagtttccatttatctaattttcttttgatctatcactcttccaatttgttctaatttattcattttatcttcccggataaatattattcatcatttgtcaacacaatacaaatttttctgtgttttagggatttgattttagttagtaaaattttcaggaaatttttctggataagagccatgctaactgatttgaatgaaacttaaaaatcgaaaaaattttgagccttttgtaagctttttgaaaaaatttgtttatgtaaattttatctagggtaatactaaacggtgggggtcgactgggccccggattaactgggccctccatctgggccccaagggccattcacattttccatttcatattgtcaacaactttaaaagacgatgtattaagcaaataaaggttcgccgccagagaaaaattaaacccaaaaattcacggtcacgaaaaccgtgaatttctcgggctttttggttcacggtcacgattaactggacaattcacgatcacgattaaagggtttttaagtaacggcacaccactagtagttagataagtagttatggacagtaactacttaggtacgtacttttaagaagaaaatgcaagcaaaactaaggtaatagtttagattaaagatcggcattttccaaatacacgggctacgggctccgtaaatgtgcccgtgaaacccgtgttcaataataacacgggcccgaccgcggatttttttgaaataattttttaaagtaaaaatcaacttgaaaaatacaaattttgaattttcgattttttgttcgaattcgggtccggatttcgaaattggtcaaaatgaatattggattcgggttcattggattcgggttccccgactaggtcgaatggatattatattcatgatcagcaaccccgaaaaacccataagacatgttttttcacaaagttctaaatttaagaatttttgtcaaaaagctgtggtaccatctaatttttgactttaaaatacaccgtcttttaataatttttgacaataaaaaatttttcggaaatcgggattccgaccccaaaaatgtcggaaatttttgaaaaatataaaatatactaccaattttttaaatattttaatcggctaaatttaaaaattcttaaccaaataaaagttgatttcaaaaataaatcggtttatttctatatctgattgaaaaaaaactcaataatttttttcaattttattcagttcagttttatttattttagatttagtgattagtctgggaanagctgaatttcttctttgagantagtatatactagttttagaggggttttagtgagtttcttgtttaataatttaaatgttgtgatcagatctaggatttt

SEQ ID NO: 45319 - DNA, 1264 bp, Heterodera glycines
  unsure (1)..(1264): unsure at all n locations
gctggtagatacctgctcaaacggacgtgaactccttgagtttctggtcgattcggaaagaaattgctacaaatttccgcaagcggagcgaaattggacggtggcggcgggcgcaacaattggtcaaattttaattttaaatttcaatttttaaattaaagaagatttattattgacagccccctcccttttccaccatcattttgttaatgatatgcataattagtgtttcataaatttgattccattttaggttatattgtcggtgcccatcatgatgccaaccaagacggaataatccaagcgatgtttgaaaaagctgaaacaagcccagtgatcgggattggcaccgaccagcccggccaaatcagccaaagggggcccctcttcactgaaggcccaaaccatcgctcgacggcactcgcattggctcaatttttgcgccgaatgcattggcaatatgttaacgttgtgctggacagaagcgtacgtttgttgtttttcacttaatgtccgttcgcttacatattttatgcccaattgataaaaatccttaaattcccttcctaattatccgtttcctaattgtccctttgctaattacccccatccctccctcattacttctcattaccatttgctccccttcccttgttgattcttcagagcttctcttcggtcgccctcttcaagcagttcgaccgaattgcctcacttgcgggcatttgctttgccgatttggcaattattggtgaacaaagggggccaaatccgacgatggaacgcgaaagtgaaaacgaagacgggacgggggagggagaagaagcgcatctgaagaggacaaaggcaaagcgcggctcttccgcagcgaaggcatccgccgccacggaggaggagcaaaggcgacgtttcaccggcgttggccctcccagcgcaaatgtgactttggtgttcgcttccgctgagcaggtcaaaaaagggacaaacggaggcgggaagcattgttcacatttgcccattttaggctgctgaatatatgggtgctcgtgtgcaattcggcggcactgtcacgggcattccgactgtccatgtgatgctcggcgatgcgcacaatttccatttgcatgacccaacgaatttggcccaatttgccggcactttgtctttccagggaaaagtgagtgaagaaaatgtcaatttgccaattttggacattataacgtgttgaggattttgccaccgtgngaattccagaccnntgcag

SEQ ID NO: 45320 - DNA, 1269 bp, Heterodera glycines
cagctgttgatgggtgccgacgcctttggagttcgcgtgattttcttcgctttaagcgttttattattttgtttaacatcacttttttattttcattttttgaatgtcttagctagagtttgacctggacctggacagtttggaattgacactcaaagccaaaacatggcgataaacaatggcacaaattggcaggaaagactataaaaatatggaatacttattatacatgtccattattgttatttatttttttatttgtttattaataaaaagcagaaaaattgaacttttaactgctggtctctatttgttttaatgaattttgtttctgaggtttgaggtaattaattggcctttttgctatttttagtggcgggatttcgtctcattaccatttaattaataaattattattttaattaattatttttccaattatttcggttcttttcttttccgtttttctttttttcacctttttttcttctgttgctgacaaaccctccttctccccccatgatttgtgcttccttgaaaaaaaagattctttttgtttgtgattttacattgaaaaaatcgcacgaattttacgatgtttggacagtttaaatgtcgtaagaatctgaacaaacattgactttaattgagcaatttggcatttgattttataaatttgtcaaagggccaatttttgacagaattctaaaaaaaactatttttgctttggtatttaaataaatcttcttatacttaaatatttaaccatttgtacgtaactttcataaaacataaagctcttcaattgagcaaataattcgtcagcgaacaatttgttcggttgggccattctttccgcggtgagtgaatggcggggagggggcaaattgggccaaaatgctttttggcctttaaactcagtcagtctcattcaatctccaaatcccttttttccgcaatgcttttgcctaaaatattttcttaattcgaagccattgtaaatccatcaatttaaaatttatatttaaaattgttgtttttttcactttgaaatgatttgttccattctatcggataaatgcaattaataaaaaaacaatggctaataataattaagaattcaattaataattattagggaagcaacttttagtgaaaaaacttttttttgctcaattgttttgaagaaaggagctcaaaaaacgcatttctgcgttaaaattttttcatttggacgtcacttttcgtcactagaaatcactattttgg

SEQ ID NO: 45321 - DNA, 1241 bp, Heterodera glycines
tgctctgaaacgcaccaaatgttaattaaaagttaaatccgtttctctgatgctttcactatcaaaaagggagatgaataaaaaatctaaaaatttttaattgctttttaaatttgcgaaagattttaggcttatattttaaaaagtttcatcgaacctagcgcactaaaatcgatataatctctccaaattttgcaggccttctccattgtaaaggactaacttaacctgaaaaaatgccaacgcttgttgtttttaaaatttttcgaaattctgactttttcattaattatttattattttgcaaaattaattcataaatattttttagaacgtgctctgaaacgcaccaaatgttaattaaaagttaaataaggctctctgatgctttcactatcaaaaagggagatgaataaaaaatctaaaaatttttaattgctttttaaatttgcgaaaaattttaggcttaactttttttttataaactgatcagaagcgaaccagattttgcgagggcatcaaaaagacaaggaaaagcactgctatgatgctaactccagtaattctgaatttaaaattttttattaatttttaaagcttcactattttatttttttagcaaaattaattcataaatattttttcacaaactgctctgaaacgcaccaaattttatttacaagttattttaggcactcagatgctttcactatcaaaaagggagatgaataaaaatctaaaaattttttaataattgtttgagtacccctaacggtacacttgataaaaatcgatttttttgttttcgggcagtccccccgaacgatgcgcccagatttatggggagcctgatccttcgggaatagcttccctatagcctgttctataattctgcgttggatttttactccccataatcgtttgagtaccccaatcggtcacctgaaaaaatcgatttttttgttttcggggcagtccccccgaaccgatgcgcctcagatttatggggaggccgaatccttcggcaatagcttccctatagcctgtactctaattttgctttggatttttgctccccataatcgtttgagttccccaagcggactcttgaaaaaatcgatttttttgttttcggggcagtccccaccgaaccgatgcccccagatttatggggagaccgaatccttcgggaatagcttccctatagcctgtactataattctgcgttggatttttgctcc

SEQ ID NO: 45322 - DNA, 1511 bp, Heterodera glycines
acggccgcttcgcacacgttttttaacttgttaggctgcttcgcagcctcagtcgggcgtttgcgcccgtttttcaattttgttggccttgtacgggcgcttagcgcccgttatttaaactttgtttacctcaaacgggcgcttcgcgaccgttttttagcttgttaggctgcttcgcagtcttagtcgggcgcttcgcgcccgtttttcaatttttgttggccttgtacgggcgcttagcgcccgttatttaaactttgtttacctcaaacggccgcttcgcgcccgttttttagcttgttaggctgcttcgcagcctcagtcgggcgcttcgcgcccgtttttcaaaatttgttgaccttatagggattataagaggtacaataaatggtagaagaggtacaacagtgatcagaagatgtacaactgtgattaaaaaaggtacaaaagtgattagaagaggtacatcaatgattagaagaggtagaagggtaattagaagaggtacaaaagtgattagaagaggtacatcagtttaaattttatttttttacaaattcaatgtaaattgaaacatgatattctttaattttttattcaaaatttaaaaattatttttaataaaattttcaccaaaaaataatttaattcaaatgaaaaatttttatttattattaataaaattaaaaatattttaaatgaacaaaaattgaaaaacagaaaataaatggtagaaaattaatgtacaccgtccggatccgaacctgccccctcccccctcaaaatgatgcctcagaatccccaatcacacagggattctgaggtcttaacgatgtcaaaagtaaaatctgatcacgtattcgtgatcagcggcccaaataacccctaaagacatatttttggaggattttgggtgaaaaaaattttccacataaaaaccatgtgcacccccctttggtcccgaatcccaaaatcacttttatttttgtaacatctctcaaaaaagtgataaaaatgtaaaataaaatttatattatatagaaaaaaattgcggattttttgagtatattatttttccagaatatcttttcagaaccgagttatgaatttttttctgaaaaatcgaaaatttccagaaattctggaataactttttttcttttgaggatagaaatcccaaataaaccccataaaattctcctgatttttctctatttttaaggctttattcctgtaaaattgatcaacccttcgatttgttatgaattttcaaatattaggccaaaatcccgagggccaaaaaattgccaaaaaataaagaatttttaaaaaattccaaaaattatgaaacttaaaatagacatcatattcgtattcagcaccccaaaataccccagaaaaatatttttgacccccattttcaacccaaaaaaaattttcgaaaatttctagggggcctagctcgaaaatttttgaaaatttccgaacatgaagtacaccgttcgatagag

SEQ ID NO: 45323 - DNA, 592 bp, Heterodera glycines
  unsure (1)..(592): unsure at all n locations
atattctcagaataaantttagaaaaaaaacacaaataaaatttttgagagatttaaaagtaataaaaatttaaattaatcatttttataaattaaattttaattgcataacttaaattgcttattgaataagtaattgtttgttttcaacagcatgatggatgccggtgccattctgattgccatctcaacactgccaaatatggcgatgagttatgccggcgatgactccgcttacggtgtcaccaacaacccgcacgacacacgtcgcatcacgggcaaacattttaatccaattagtgttaatgagggctgtgtgtagggggaggcaaatacgctcccacccgaaaattttctaaataaaatttcaaactttgaaatttttcaagaaaaaaacagaaaattttcataaaaaaatttaagaaaaaaattgtcggaaaatttttcgagcgttattttttctctgaattaaattactaatgtgtttttttcaaaaattttaccaaaaaatcgttagaaacattttaaaaatttttctaagattttttcttgaaaagtttcaaagtttgaaattttttgggtggggcgaggg

SEQ ID NO: 45324 - DNA, 293 bp, Heterodera glycines
ctgcaggtctggtacacaattattgagacaataattaatgtcaaaattgcaaacaaaatccatgcaaatccttttagggcatgaaccgctctcgcgctttttccggtatatttttagcccaatttccggtattgccaacaaaactttcacgcgtctcgttcgcttacctttttaataattcaatcacttcgctaacattcggcttttgtaccattcgtaatacagaagacggtaaattgttcattttttatctatattccatcattgcttcttcaattctcattgtttccgat

SEQ ID NO: 45325 - DNA, 1380 bp, Heterodera glycines
acacaaagagcgtcttcggagggcccattcggctgcccttactgtgattctgttgaacacgctgactagcgcgatggcatcacatccggcactggtcgattcggccaaaatgtgcattccgaccgtggcgatcgtcgactcgaacagcggtgagtggcaataggaaatgaaagaatttgtccaataatccgtgcatcagagcccaactacgtgtgctacccaatccctggcaacgacgactcggttgaatccgtcaactttttcatggaaatgtttgcaaaagcaatccaaaagggccgagcggagagcgacacttttctggagggcgcgaaagagaagaagcatcagcagaaaaggacgatgggccagcggaggcactgaacgaacaaacggagggcgacgaatgatcggagggggggggggggcgaagacggactgattcctctgcttattctttgtttctgtccactttctatgtttaggttttctgaatacacttttacccttttaaattattttgagtgttttcccataaaagtccgctgctatttctccttatttcttttttttttttgattcaatttgttttctgttcgatgtcttctccgcttggtgtgaatgtgtttatcaccggcgccaaccgaggcattgggctcggattggtgaaggaaatgttggcggttggtggaatgaaaaatgtgttcgccggttgtagggacgtcgattcggctgcggtcagtggacgaacccttaggggaaattgaaatttttaacctcagaccaaaaagggaaaaagagctttaaggaattgcaacaactgcacgacaaaaatggaccattgcgactgatcagaattgacgtcagcgacgaccgaagcattcggacggcatttggccaagtccaaaagcaattggtggacaaaggcggactgaacttgctgatcaacaacgcgggcattcttctcaaagtgtgtgtgttgtggcacaaaagcattgtttttggctaaccgttccttttttcttgctaatctttgactctttctctgatcactctttgggctgatcggtctctctgctaatctttgactctttctctgatcactctctttgggctgatcggtctttctcttgctaatctttgactctttctctgatcactctctttgggcttatcggtctttctcttgctaatctttgactctttctctgatcactctctttgggctgatcggtctctctgctaatctttgactctttctctgatcactctctttgggctgatcggtctctctgctaatctttgactctttctctgatcactctctttgggctgatcggtctttctcttgctaatctttgactctttctctgatcactctct

SEQ ID NO: 45326 - DNA, 1222 bp, Heterodera glycines
caaggcagcaccagtatgagagtcagaatgtgaaccgcctttcaattaacgcccactttccgcaaagtcgagcaccagttacatgctttaattgtggaaaagccggccaaaaccatcataaaaaccgattcgggacaggaatgggtcgttttcattggaaaccgtggcaatctgctcccagctacggccttgccaacgacctgcgaaattcgcaccgctctggaatgccatattgtgaattgtaaagttgctaatcaggcacttagcaattacaataattggatgttggaaccgccggtgatgccattcgaaggggcagagagtgaaaaatggctgaaaatattcgggcaggcgccctggattctcgaaaccatccgggccaagttcgtgcaccgtttgccaatgttggagacgccgcgggtaataatcggtgactttacggcccaacaaatcaattcggaaatgacggacacagcgctggtgacttccgtggaggatggcttggcaggaattgtacgtcaatttgcaagcgtcattttgtcctcaaaagtgcgcgccgttctcattgtgtttggctgtgacgcactgctctcaggggagacgatggacacatcaccgaatatatcaaacgcatcaaaggactgtgccttcgttaccaggacgttcaaattgtatgggccatcccgccatatgtccacacccaaaaagtgacatatgatcagtttttggaggcacttttgacactgactgaaaattgtcccactcaaatggcctttatgacacgacaaggacgttcgttggccgaaatttttcgttacggcggtacccacaatggacagtacgtaaatcaaaccgggattttgactgacgcggggatcaaggccgttcttatctggttgtattatgtggcaaatttcccgggagagcgagagatgggacgaaggcgttcagtgattgggaatgtgccctcggggtctcaaaaccgtctaggcgacggtagtgggcgagaaaatgccgaaaacgaggtgcctgtgcgttctgagtcgcgccctgggagttcaaccggtcgccgttctttcatggccaatcatcaccgccgtaatgatgttgggtgtaaccgccacgaccggatttccgatccgcgatcgagtttcggcgcctaaggcgaacgtcgggaatttcggaaattcgcgctcgaatatccccgttagcactccccgcc

SEQ ID NO: 45327 - DNA, 782 bp, Heterodera glycines
atagaataaaattattatctaaaattactattataatattaatttataaaataattttatataaatcatcttgcaactgtcttcttaataagcgtgtgatcgaaataaaagtgtccattgcgactaccaccaaaagaacaacaatgggttttgaagaaaaaaacttttttttttaaatttatgttcgttttcttccttcaatggccgttttaaatgccaatggattttaggatgacgtggtcccattttggttgctcaagaccatttgaaagcagaaaatgtaaaatatttgttacattatcccccacgacgccttttgtaaaataattttctggccaatttgcaggttaatagcgtttataacattgagcatattgttattagctttaaaaaatcaaatgaaaaagaaaattcaattttgtaattttaaaatgtcaattctaaaattttctaattacaatagaattatgaacttttatgtgacagaaaaataacaaagttatacttaatttagattgacccaatgttattggttgaaaataaacagtaataaataatacatttaataataaaaataaattattatataagaatagattgtatgcgacggaaaatgtaaaagtgttttgcctcacgctaagagtaattaaggattcaaaaaagattaaagaaaaatatgaagcaaaatgttagataataagaaaactcaaatataaatagaataaaattattatctaaaaatactattataatattaatttataaaataattttatataaat

SEQ ID NO: 45328 - DNA, 1012 bp, Heterodera glycines
attttgattcactgcgggattggaactaaacatgccttctggacggatccctcggtatattatatcccgcaaaatcccataatcccgcaatttccaaaatgcgggattgcggattgagatccagcaaaatcccgcgcgggactccggcaactccctcactctagcggaaaacttattatactgatatttggtattagagcccggaaatttcaaatttgcgggtcctgttgcgtgattgaattcaaaatttttacacaacgggatccgcagatatatatcccgcaaaatcccataatcccgcaacttgcgaaatgcgagattgcggattgggatctcgcaaaatcaagctcgggattggaattctaaattttgcgggctctacgaatttggtatgatcatgtgagtgtttttcatgtttaagtgctgtgattatgatactacgcagagctatctattgtataatcgtgttttcactgtgctggcaaagtgttaggatttccgctgagatggtaattagttgacgctaatgaatattcctatttataaatatattcgaaaatatgcactagaatatgtaaataaaatgcatattttttggaaaaaaattcttcgcgattggacaagaaaaatgtgttggcaaacacttccgctccatctgtccaaatatttaatacattgattaaatctcgcgcaattattattattatttattattatgaattgtaatacgcacataaaattgtgtatatattcgtgaaatcgtatatgaaattatattcattaatttcatttattatacatattgtttataaaataaattttaaataaacaattcatctggtaaaactcattcccgaaaaactcattgccatctccgagaaatccatccaccatttgcttacaaaactcttttagtgaatttagggcatattcctaatggccaggatcttgagccttgtaaatttgttccgatttatatttttgctaatcggattttctcagcaaaatccat

SEQ ID NO: 45329 - DNA, 758 bp, Heterodera glycines
aatcggaaaaatacacccctaagaaatggcccgaaaaaaataaggatcaaaatttttgaattgattttcgaatttttttttgttacaaacttaagtttttagttaaatttttgaaattttaaagctaaaaggacgcattgagcctcactcaaacatgattgtaccttaaagatttatagataattaaaaaaataattttacctgcaaaaaatttaaaaaaggccagaagtgatcttttctatatgtctcgccccaggagattttgtccaggtttttaatatgcatatttgccctaggggatgagcaatcatctttataagcctcccattctgccctctgccgccttccccattaacgtgctgacgcgtttcgtaaaaaatgccacccatgcgcgtttcgtaaatccgccaatggaacaaaaatatgtaacacataaaaattcataacttagctcaaattctaccaaattaatatttcatggtatcattcaatagccttaattgttctctatcagaatataattttacaaaactttttacttaaatataaaaaagttataaagcattgaacacgctatgtttctttgcaataatcatgcaaacaaattataaacatttaaaattttctagtcataaaatgcaatttagccaaacttaattaatatcattcgatagccctaaaatttctctatttatctttaaaatttcatttagggggtatattctacaaaaatttttagccgtttttttgccaaaaaa

SEQ ID NO: 45330 - DNA, 602 bp, Heterodera glycines
caccagcattccatcactgggactcaacccccagcattccaatcactgggactcaacccaacagcatgccaacccctagggactcaacccaacagcatttcaatcactgggactcaacccaacagcattccaatcactggcactcaattctcctgcatttcaatcactgggactcaacccaacaaaattcaatcactgggactcaacccaccaacattccaatcactgggactcaacccaccagcatttcaatcactgggactcaacccaccagcatttcaatcactgggactcaagccaccaacatttcaatcactgggactcaacccaacagcatttcaatcactgggactcaacccaccaacatttcaatcactgggactcaacccaccaacatttcaatcactgggactcaacccaccagcatttcaatcactgggactcaacccaacagcatttcaatcactgggactcaagccaccagcattccaatcactgggactcaacccaacagcatttcaatcactgggactcaacccaacagcatttcaatcactggaactcaacccacagcattccaatcactggcactcaattctcct

SEQ ID NO: 45331 - DNA, 1724 bp, Heterodera glycines
  unsure (1)..(1724): unsure at all n locations
aattgttcacattgtataaaacttaggaccatttttcccaccaattaaagatgtatttgccgacaaaatcagactaaacttttttacttcatttaaatattatttacattttttttttcaaatattttattaaaattcataatttgtgaaaaaatatgccgtctttttttgggtagcttcgaaaatatcttatgattttgagtattcatgcacaataagtgagggatttattttgaggcatgaaatttctgtctcaatttgtgtcacctttcaattcttcataaagaacaattttcatcaattattttttttttgtttaaataaattaccaaaatctaaaagtttcaccaattgatttctcaaataaaccataaaattcttatcattttaattctttattgagtttaaccaaaaattagctagaacccaattaaaaacccaattaaaattgtttcgaatttggctttcccacgcaaaaataatttgaattttatttttggcataaatacttcaccaatttggttgatgtggttcttttttaattggaatcaccaatttagttggtatggatctttttattgaattatcatcaatttttcggtaccgtcacaattaggtacgtcatgtcaactctttactttacctacattcccacacccgattaccgtatataaataagagcagagccttccgggcattcatttaaaaatttgcattacgccaacaaagcgctgttttccaaatttaattggccaaattgtgcaattgccatttcgtctattacatgtatttgtttgtcatttgttccgcaaatcagggggtttttgctgcgttttttttcctgacggttgatttagccaattttgagccactcacattaattctttttggtcacgaaagaggggacggcatttctgcttcttcttcttcatgaatgcttaaatgcaaattgcgtcttttgcctggatgtcacacagaaaagtcgtggcacaccaaaacccgcaaaatatgataatttgtcttgtctttccatgacaaccatattaacatttccataatatttatgtacataaatatgaattagtacaaatgacattttcattaatggccctcccaccatattattaggcgcgcaaaagtgcaacaaaacttttcacaaccataaacgaaaaaacatccaataacatggcatcaatttgcaatttcttactgtctgagaaaaatatcagtgaattcttttaaaaatatataatatttattgccatcccactgaggacaatctcgaattttctgataatttttgacaattttaattggaaaacatttcacgaaaaagaaaataattattttgtctattggagcaaaaaaaaaggttaaaatgtttgccacactgaagacaacaagttcaagcagacatttgctgccaattctgttcatcttctgctgttgctaccgcgccttttcaaatgtatgtcaattttggcttttttaaattaatttcaatttttttttgccattttagtttggtgatgcggccattgtgccattgtcagccctgggccgctacaaggtgtcacttggcgagctgaacgaattgctgacagaacaacaacgctcggctgacgcagtgccaagcactggcgacaaattgccaaattatgccanagttggacaaaaaaaataatttcaaaattgcattttcccatttttcgatccatacggag

SEQ ID NO: 45332 - DNA, 492 bp, Heterodera glycines
agtcattgccaattcaaatgccttacgcaaatttgcggacggaatcgaaaatttggtcttgcagtatctgttccatttttcagaaaattataacttttaaggaaatattagtttattttttccgaaattgtccgcaaatgtccaactgctattcaaataaatatttttaattattcatttcagaccaatattattattcaaagtcattttattggactaaaaattcaaaaataattaattgcaaaaactcagccggtgaacttaaccgtttaagcgtgcaaaaaaaaatagtaatttaaatttaggaattgatagactcaagcaatgggttttatgacaaaagcaaagacaaagtgacattggcaattgatctcataactgttgctgaaccaaaagtggacaaattaattttgtaccaaagcaagtcgaaagggacactttttatggacattgaaaaagtgtcgaaatttgcgcgggaaatcattttgagtg

SEQ ID NO: 45333 - DNA, 1078 bp, Heterodera glycines
  unsure (1)..(1078): unsure at all n locations
aaggtgaaagtgcgttcttcaaaaaaacgggtcatttcgacctctgcaaactttttttgaaaaagcgaaggcacgttcgagcgaattctgaacataagaattttaagacattttcttatgaatttatcaaattcacgcaaagtcaaattaaaattttcggtacttttactgttgaggcncagaaaaatactcagattttattaaaaaccaaaggtgaccattttgtcttctaattttgttgtcataaaaaacaatgaaaacttgtttacagagggtttttgaagtcgccaattgtgatatcaatttaaataaattccgaaatccctcagcgactccgaatttttaaagcttttaaaaatatgggtaataaaaaccttaaggctatcgtccatttcacgtccgactatgcgtaaatcgcgaagaccgtggtgagcccttgtagcttgaattttgattttgaccaaccttcctaaaacgaaaggattcattgtttacaagtgaataaggtgaaaagtgtaccgtttccagaaaccgtttcaacagccagaccgtttacctcgattgttgacataggaaaattatattatcttaaaaaataagccatgacagcgatcaacactgagatcaattatagacacatccaataagttacgccagaaaatgcatcaaacacaaaatttttgtcggtgaaaaaattgaaaatcaaggtaaattcagaaaaactttaggaaattgaaaaaaatttccgtgaaaaacaactaggcttatctgaaagagcacaaaattattctctacaaaatgattatgaaaccgcagcaaatcctttacatgcagataggaaacgatatatatctctatttttgttgaattttatgcgttttaaggctttggacggttcagtcccacagccatttggccacttcagtcccgggcccataactcggcccgaagtgcgttccgcaaaaaaaattctttcagattcgtgttttacagaccgagaggacacgaatgatatatcattcgtccatttcggtgaggtacacaaattcttcaatttttccaaacattatttttaaaa

SEQ ID NO: 45334 - DNA, 1044 bp, Heterodera glycines
agtgagagatagaaaaaataagagagagtgcgagggatgagaggaggagacaaagggaagaacgagaaaagaagggagagtggggggggggggtggatgagagagagagaatgggaaagagaacggagaagggagaaagagcgagagagagagagagggaagagagaagggagagagtgaagggagcgagagagagagagaaagaggagaaagaagcgagagagagagagaagaagagaggggaaagaggtgcagagagagaaagagaagattgataagagaaaggggcggggagattagagagagtgtggagagagaggagagaatgtgtgaaagaagagtgaagtaagagcgagaggggagacagagcgagagagagagagaaagaatgagagagaaggagacagagagagagagagcgagagagagagagagagagagggaagagagaagggagagagtgaagggagcgagagagagagagagagaaagaggagaaagaagcgagagagagagagaagaagagaggggaaagaggtgcagagagagaaagagaagattgataagagaaaggggcggggagattagagagagtggggagagagaggagagagagagacaattaagagaaagaaggaagagagagagagtgggaagagggaagagagcgaatcgatagagaagggggggagagggggagagagagagtgaggggagagagacaacggagagagagaagagagagaagggagagagtgtgaagagggggagagagagagaagttaagagagagaatggggagagcgagagagagaggggaggagggaagagagaagggagagagagaaaagggagacggagagagaatggagagagagagagagggggaagagagaagggagagagtgaagggagcgagagagagagaaagaggagaaagaagcgagagagagaagaagagaggggaaagaggtgtagagagaaagagaagattgatcctttaaagggggggggggttagagagactggggagagagaggagag

SEQ ID NO: 45335 - DNA, 991 bp, Heterodera glycines
  unsure (1)..(991): unsure at all n locations
aattagcaaaaaaatatgagtgatcgaattttcactaaaaagttaagcntaaacttttgncctgttaaaagggaattaaaatttttaaaatttatntcatctccttttttgatagaaaaagcatcagagtgcctaaactagcatgtaaataaaatntggtgcgtttcagagcattttctgaaaaaaatatttatgaattaattatgcaaaaataaataaaaatttctaaaaatttgatcgtccataaataatttgtaattgatcaggggctcaccaaattttgcagggatacgtatcggaacactacaaatgcttactaattttcctagattttttaaacccggtgaaaattttttgcagacaccaccacttttgcacttaaaaaaatttcaaaaaactttaaaaattcatagaaaatttaaattcataggtactactgctaaatcaacgcagagacgcctttccttgacctttttaggcccctgcaaaatctggtgcgcttctgatcactactcgaaaaatgagtgattgaattttcactaaaaagttaagcctaaactttttgacctgtttaaaaaggaattaaaaatttttaaaaattttattcatctccctttttgatagaaaaagcatcagagtgcctaaactaacatgtaaataaaatttggtgcgtttcagaaccctttctgaaaaaaatatttaagaattaattatgcaaaaaataaataaataacgaaactctcagattttcgaaaatttttttgagccagctagctcggcgcttcatttcagtgtaagttagtcctttaccggggagtatccctgcaaagtttggtacgcttctgctcaattagcaaaaaatatgagtgatcgaattttcactaaaaagttaagcctaaactttttggcctgtttaaaaaggaattaaaaatttttaaaaattttattcatctccctttttgatagaaaaagcatcagagtgcctaaacta

SEQ ID NO: 45336 - DNA, 577 bp, Heterodera glycines
tcccacccttattgttatattttcctcttttagatgaaaataaggcattacccccaaatcggaacatttcttagaaataagaacataaagaaatcctgtattaatcagaaataaaataaattaaaggaaaacgttagccggagtcggtcacgtgggcgggagtctgaatcgcggaggcgggggtgaggccagaaaacctgtcccgcccccggcgggggcggggctcgaaccctagtattttaacgtcctcaccttaacacaaaacacttttagcgcccaaacgccagcgcccaaacggccgcgcccaaacgccagcgcccaaacggccgcgcccaaacgtgtgggtcccctttaaatgagagaaaatgggatcgacaaaagagataaaaagagaaaagttatttgatttgagtcttttatgcattttctaattgcctttgattgttgggcaaatcggtgacccaaaaagacaggcacaaactgctgcaggcgaaagaaagagttgggaaaagggcagaaatgagataaaaatgataactgattatataataaataaaaaaagtacataaaaatatga

SEQ ID NO: 45337 - DNA, 725 bp, Heterodera glycines
cctctcacgctcgagcgcttttgtaacgtataaaatttctcaaaataagagatagtcatttttcttggatataagataaatttaaaaattctctgtgaaattaaatggcgattgcgcgccgcacttcctatcatgctcgagagcatttgtaacgtataaaatttctcaaaataagagatagtcatttttcttggatataagataaatttaaaaattctctgtgaaattaaatggcgattgcgcaccgcacttcctatcatgctcgagagcatttgtaacgtataaaatttctcaaaataagagatagtcatttttcttggatataagataaatttaaaaattctctgagaaattaaatggcgattgcgcaccgccctccctctcacgctcgagcgcttttgtaacgtataaaatttctcaaaataagagatagtcatttttcttggatataagataaatttaaaaattctctgtgaaattaaatggcgattgcgcaccgcacttcctatcatgctcgagagcatttgtaacgtataaaatttctcaaaataagagatagtcatttttcttggatataagataaatttaaaaattctctgtgaaaattaatggcgattgcgcaccgcacttcctatcatgctcgagagcatttgtaacgtataaaatttctcaaaataagagatagtcatttttcttggatataagataatttaaaaattctctga

SEQ ID NO: 45338 - DNA, 1364 bp, Heterodera glycines
  unsure (1)..(1364): unsure at all n locations
gtcgtttcctaaaaaccgccaagtgggcgtttcctaaaaaccgccaaatgggcgtttcctaaaaaccgccaaatgggcgtttcctaaaaaccgccaaatgggcgtttcctaaaaaccgccaaatgggcgtttcctaaaaaccgccaagtgggcgtttcctaaaaaccgccaaatgggcgtttcctaaaaaccgtcaagtgggcgtttcctaaaaaccgccaaatgggcgtttcctaaaaaccgccaaatgggcgtttcctaaaaaccgccaaatgggcgtttcctaaaaaccgccaaatgggcgtttcctaaaaaccgccaaatgggcgtttcctaaaaaccgccaaatgggcgtttcctaaaaaccgtcaagtgggcgtttcctaaaaaccgccaaatgggcgtttcctaaaaaccgccaaatgggcgtttcctaaaaaccgccacccgaagtgaattaaagacaataaatataaaaaatagttattgttatacaacatttataataaattaatataaatctctgtattttttaaaagtttcttattctttaaagtgttcaccaaaaacatgaactgtcaagcataacaacgtctaaaaaatatactatttaaaatacaaaataaatacagacttttgttaatgaacattcagcactttcatacaaacatttgcaaaagtttttgtcgcaatcgtatcgttttatagatttgtttatatagcataaagcatggtaataacagcaatcatcgactatattattaaaaaatgtataataaatttaaaatactttattaaaccttttttaaagttgcaaaaccatattactggtgctataaagcatgagtcaaaaaatgaagtgccacaataagtgccacaatatttctttgcaactttcaaagggaaattctaattataataagaaaaaaaataaaaaaataattaatttatcttttgtggttttcttattagttcataatgaccgtcatgaaagtataaaaatattgatgcagtcgattccttttgttggaggttcgaaagctaaaaattatatgaatttgcatattggaaatatttctaaccgatgtttctaaatctggtgagtacacttgccaacggaaaattttttatacgttcacacacaattatatttattcgaaacattttggtgactgctgctagatccaaattattgatccatttttcaatttcatgggcgcctattgcaggagcaatagcattctctatgtgttacttggcgagttttaggaaacgcnccatggtggcggtttttacgaaacgcccacttggcggtttttaggaaacgccncatggtggcggtttttaggaaacgacctagcacc

SEQ ID NO: 45339 - DNA, 1580 bp, Heterodera glycines
ttaggcgaattgagcactgcgagacattgagtttttggcataattttttagataatcagtaaaaataaatttatatttaatagaaaatataaaaataaataacaatatattaagtaccaaggaattattttattatacttatctataaaaacttaatcaaaaaaagaagcacattttaaaaatatataaatacattaacaatttgccaaaaatttttgaatcataacaaaaataaaatggttgtccttgcataaaaacataaattttatgaatttatgtgaatttactaaaaaaggaaaaaaaataatttaaaaaaattaatggctcttgttcgaatggatgacggacatggtcatgaggttatttgtaaaagggtcttaactaatttttattgatttttttatccattaaaattttgcagaattattaaatactcagcaatgagcggtgcagtgccatttttaaaaaataaaatcattaatacaagagttcaattaaaattattcagcctaatgtaatcagaaaagtacacttaattcaaattaaattcattcaccttaaggacttacttaaattttttaattaaaatttaaacgaatattactaaattttagtaatttagcccttttattgatcaacgattaaaaatcacaaaaattagatttaatcctgatcaaaataaaaaaaatgatataataaaaaccaaaagataaaaaatataaattgaatctagaataaaaaacaattttataatttttcaataaaatattaatgaataataattaaaaaataaatgtaacccaatccttacattttgtcttccaatatatgtctttataattaaaaatacgatatataaaaatatattactaattaaaatatatcattttatttgcaaaaataaaagttaaataatcattttgaatttaaacaaataaaaagtaacgattggtacagatgccgaaaaaacaatagatctcatcatttgtattcccgaacaataatttaaagtgaataaatgtgaataaaatagcatgaaaatataaaagattgctcaacttgataaaaaacatttcgaaaactcataatctaagtaaatatattttgaataattgaattttaaaagtatttaacagcaggcaataagtaaatcctaatcaatattgtaattaacgaattttaaaaataaaaaaatcttaatataactaatacacaggcgctcaaaaaagaacccatgcacaattaagaaatcgacaacatatattaacttagcttaaaattattagcatgaaatgtatacatataaatataaattcaataaaaaattatagataataataataaaaatgtctatgaaaataggtaataaaaattgtttaacaaaaaatcaatggccactttttctttatttccccccccccccccgtttttcgtctcagtcgttcttttgcacaaaagtgaacaaattgattttctattttacacattcagatccccattttttggtctttgagaattgaaataattaaaagttaattaaaccaaaattaataatgtattcaaataataatagggtcaat

SEQ ID NO: 45340 - DNA, 987 bp, Heterodera glycines
ggattgtatgggatgaaaaaagatgttagaattttctttaatttttgaaaatttctaaaaaatggtaaaacgaccattttggtaatttgacttatttaggtagttaaaagaatttgcacaattcttatataattttattgaatgtgttttatttagcaaatttcttttcaaattttgaaaaagtttataaaaatgtgtttttatttaggtcgctgattaatttatgctaataccccattctttcaagttcttattttcaatcccgatccaacaagaattgcaaagtcgggatcatgacttgagtttttgaaaaaccaggactggaacctaaaaatcttgattcggggccaatcccggtcggtatctcgatccaatgtggctctttttttaaacaaaaaatggattacagtatttagacttaaaaaggaagcactcagaaacttcatagtgaaaataatgagaggagaagaaaaacacattggaaaaaatataaaagaaattgaacaaaatatcgtaaattatcaagagaagataatgaattttggcgaagaagtaaatctcaatctcaactttaaagaaggtaattatttagataatttttttaatgaaaaaattcttttttttttaaagtttttttcagaaatcctaaaatttattttgccttctttgattgctgaatgtattacatccaacttattatacggaaaaaagatcgaatggaaaatgttggaaatggcacttgagaaaattgggaaaaaagaattatgggaagaaattgaaaagatttacaatgaatggaagacaaaatttgaaaagaagtctaagaatgacgacaatgtaatggaaaagatggaaaaaatgaaagaaaaattggaggaattgaaagatgaaattgaagaagaaaaggaagagaagaaaaagtaaaaaggaagaaaattagtcggaagataaaacagaaaagagaaaaaaagagaaacagaaagaaaa

SEQ ID NO: 45341 - DNA, 928 bp, Heterodera glycines
aaatttggtgcgctttagagcactttctgaaaaaatatttatgaaataaaaaaatcgatttttcaagtgtccgtttggggtactcaaacaattatggggagcaaaaatccaacgcagaattaaagtacaggctatagggaagctattcccgaaggattcggtctccccataaatctgggcgcatcggttcggggggactgccccgaaaacaaaaataaatcgatttattcaagtgtccgtttggggtactcaaacaattatggggagcaaaaatccaacgcagaattaaagtacaggctatagggaagctattcccgaaggattcggtctccacataaatctgggcgcatcggttcggggggactgccccgaaaacaaaaaaatcgattttttcaagtgtccgtttggggtactcaaacatttatggggagcaaaactccaacgcagaattaaagtacagactatagggaagctattcccgaaggattcggtctccccataaatctgggcgcatcggttcagggggactgccccgaaaacccaaaaaaaaattttttggataaaaattatttaaatgaactgactagataatatttaaaataggttatttctcttcctttcagtatccctgcaaagtttggtgcgcttctgatcaggttctgaaaaaaaagttaagcctaaactttttggcctgcttaaaaaggaattaaaaattttttaaaattttattcatctccctttttgatagaaaaagcatcagagtgcctaaactaacatgtaaataaaatctggtgcgtttcagaaccctttctgaaaaaatatttaagaattattttgcaaaaataaataaaaacgaaagactcagattttcgaaaatttttttgagccagctagctcggcgctcatttcagtgtaagttagtccttta

SEQ ID NO: 45342 - DNA, 891 bp, Heterodera glycines
cggaaattttgttttaccgggctctagtttttaaccattttttcttttcaatttcttctttttttctcagatgaattacattgaagtacaaatcacggatactctcgagggcattgcagcagcgcatgactgcaccattggagggctggttaagctgaacaaattgacttctcgaatggtaaaatttattttgtacttaccactatggaaattaaggtcttccctggccaaaaacttttggtcccttccgttttttcgtcggaaggcgacacaaaaagtaaaaatggctgtgcaacagatgaaaatcacggaaaaggagagcacaaaaccatcaaaggtgggcttattcttataaaaagaattgtcgtcggttcaaaaaaggcattgaatagtgaaatgaaaatgctggcgctacttaaaaaccatgaaagtttattatccggggttttaaaggtcgctgatcacgaatctgacatttaattcgatgtcatggaccccaagaatcccagggaataaattttggtgtctctccactcctctcttttggctgtcatccgtctttttcctacccgacagattccgtccaaaaaggccccggacaagccgttcgtacactttcttctgctgaaacttccccaatacacaatgggttcggtcacattcaatccatggcaaaatgcacattttcagcaggaaaggacagcgccaatcgaacgccgagttgggaaggatggcatccgaattggacaatgatgaccaagagtgcattcagcggtttctcaagacgagggttagtttttccgtggaaattgtttaaaacttaccaatccttccatttctgaaaataataattctttgcaatactgcggcacttttcgacccctcatcact

SEQ ID NO: 45343 - DNA, 1084 bp, Heterodera glycines
  unsure (1)..(1084): unsure at all n locations
gtagggctcaaccgtatatagtaatgcgttttcggggaaaacctcatgttgaagggtgtagaaaaaagagatagccatttttctgagaatatctattcttagttatggagccattttccaaccgaccatttgtagggctcaaccgtatatagtaatgcgttttcggggaaaacctcatgtggaaggctgtagaaaaaagagatagccatttttctgagaatatctattcttagttatggagccattttccaaccgaccatttgtagggctcaaccgtatatagtaatgcgttttcggggaaaacctcatgtggaaggctgtagaaaaaagagatagccatttttctgagaatatctattcttagttatggagccattttccaaccgaccatttgtagggctcaaccgtatatagtaatgcgttttcggggaaaacctcatgttgaaggctgtagaaaaaagagatagccatttttctgagaatatctattcttagttatggagccattttccaaccgaccatttgtagggctcaaccgtatatagtaatgcgttttcggggaaaacctcatgttgaaggctgtagaaaaaagagatagccatttttctgagaatatctattcttagttatggagccattttccaaccgaccatttgtagggctcaaccgtatatagtaatgcgttttcggggaaaacctcatgttgaaggctgtagaaaaaagagatagccatttttctgagaatatctattcttagttatggagccattttccaaccgaccatttgtagggctcaaccgtatatagtaatgcgttttcggggaaaacctcatgctgaaggctgtaggaaaaagagatagccatttttctgagaatatctattcttagttatggagccattttccaaccgaccatttgtagggctcaaccgtatatagtaatgcgttttcggngaaacctcatgtggaaggctgtagaaaaagagatagccatttttctgagaatatctattctttagtatggagccattttcccaccgaccatttgtagggctcaaccgtatatagtaatgcgttttcgggga

SEQ ID NO: 45344 - DNA, 474 bp, Heterodera glycines
cgcctgaaaatttgaaaatattatgcaatttgttaaaagatttatttaaaaatgactaagatttagaactatatttaaaaatatttaggagtttttgaggcgggcagtgccaataagccccatcgaggaaaatttttcagaatttttaacgaattttgttaaaatagctaaattttttaagcagttcctctttttcccttggctagcaacccgccccctttttatgtatgctaataatacaacaaatcaccaagaataagtcagacgaaatcaaaatatgagtagccttttaataaaaatattaaaaaaaaattcattttataaaaaataatcttgcaagaaatcgtctcgaaaaataatccaaaagtcaaattgcgtaccaaaattgcggataaatcccaaaaatcctcaacccgcaatccgtaactccataaaccccgcaatttccgtaatccgcaattgcgccctgccctg

SEQ ID NO: 45345 - DNA, 1157 bp, Heterodera glycines
  unsure (1)..(1157): unsure at all n locations
ttgataaatatgaccaaaccaatctttggaacttccactcttctagggggacgaggggtaccaatccagccgaaagntttcattcgtcgatgaagaggcaattattatgaataaaaattacaatataaattaaaaatagatttaaaaatcaattttaaaataaaatttagagaccttcggcgataaaaaagggatctgtaaacaattttgtcaattttttacaacaaatagttgcggaaagcgatgcaagaattattaagctttctacaaacaaaattttaccccgtaaaagatcaaaagtctatgttgatttagacgcacagctcttaagaacattggatgaatataatgtacaaaactaaagcactaattcataagtgactaaataaaaaaatttaggctacaattgaaatggaaaattcacaaggcgaattagaacaattttattcaacagccgtaaaagttttggatagactaagttttttcttactaaaacttgactgcaaaggtagaactatgaaagatagcagaattaatatggtagaattttcaactgttgcttagaaatttttaatttttaagaaaagaaaattgaactatcagtcaaatgaaggacaatcacagattaaaaaaaattaaaagtcaggaaacaacattaccattgtcaaattcactaactgaatttgaagaaaatcgacaatgttctattttatttgaagaaactagtgaaattattttttctttactcacattttttgattttagcttctgaaactgatgcatcagcggttttagaaataatttcaaataaaggtttgaaattatttagtcatttaaatcattattaatttaaatccgtgaaagaaaattattttttaatcctatgattgtcacgggatatattataacatataatattcacggacacaatggaagatgtcagttaaataaaaataattaaaaatgggatttatttttaaaatcaaaatttgggagaaatgacaaagtaaaaattctaaaaaatttctaatccccagacgcagagcaactgaaaattttcttcccgcttcggctgtcgattggggactttgatttcagccattgatcagccaaaatttcaacaatgcatacctcttcaaaaagattggggagatttg

SEQ ID NO: 45346 - DNA, 1018 bp, Heterodera glycines
ctgaggacaatgatcagccaggcgtgccgttggacgaagcacccgatgccgaacagagagcgttggatgagaatacgcgagtacagaggccaacggaagccgatggcacggccctagaaatttggaaaaaaatggattaagtcgatcgaaatcggtggcacaattctgtaaattgaggaaatacctacttaaaaaatatgagacgatggcacggccctggttatttggggaaaaaggttgatggaaatcgatggcacaattttgtaaatttgaaaaaaataaaatgctaatttaaaccgatggtacttattccatagaaattcgagaatttatggaagaatatagtgaaatctgaggctatggccctgaaatccgtaatttataacaccaaaaattaattttgccacaagaaagtacccgcaaaatctggtggagtgccatgtccgcgttgaaccatgttggccgcttggagaactctctcttccacttgtcggaaaatgccgtttcgtccggcgcttggccaaccgccaaacaacggtcaacacactgaaaaaaatgagtgagtttaattaatttggaggagtttgaaatttcaaagcgaatcaaaaaagggtttcaaatgcgtaaatcaaaaaaaaaaaaaaaatttttttttgaaatttttcatggccaatttcatatgaaagttgaaatgggatatttggaaatgcccttcaatgttatagattaaaataaacggctctttcggaaatccgtattaaaatttgggattaactttcaaaaattggtgggggatgtagcgaaatttcagtcatcctcccctcaaaaaaaaaagtttaaatgtgtcaaaatggcatttttttgagaaatgccaccatttttagcacatacattcgggttgatgggctccaattcgtcctcctcgtccccactccatccatcgatttcctcctcatccgcgtcctcatcgccccccgaaatttccgttggtctgttgctcattgtcaagggaagcaaa

SEQ ID NO: 45347 - DNA, 1043 bp, Heterodera glycines
tttatcttatatccaagaaattgactatctcttattttgagaaattttatacgttacaaatgctctcgagctgagtaggaaggggcggtgcgcaatcgccatttaatttctcagagaatttttaaatttatcttatatccaagaaaaatgactatctcttattttgagaaattttatacgttacaaaagcgctcgagcgtgagagggagggcggtgcgcaatcgccatttaatttcacagagaatttttaaatttatcttatatccaagaaaaatgactatctcttattttgagaaattttatacgttacaaaagcgctcgagcgtgagaggaagggcggtgcgcaatcgccatttaatttctcagagaatttttaaatttatcttatatccaagaaattgactatctcttattttgagaaattttatacgttacaaatgctctcgagcatgataggaagggcggtgcgcaatcgccattcaatttcacagagaatttttaaatttatcttatatccaagaaaaatgactatctcttattttgagaaattttatacgttacaaaagcgctcgagcgtgagagggagggcggtgcgcaatcgccatttaatttctcagagaatttttaaatttatcttatatccaagaaaaatgactatctcttattttgagaaattttatacgttacaaatgctctcgagcatgataggaagggcggtgcgcaatcgccatttaatttcacagagaatttttaaatttatcttatatccaagaaaaatgactatctcttattttgagaaattttatacgttacaaaagcgctcgagcgtgagagggagggcggtgcgcaatcgccatttaatttctcagagaatttttaaatttatcttatatccaagaaaatgactatctcttattttgagaaattttatacgttacaaaagcgctcgagcgtgagagggagggcggtgcgcaatcgccatttaatttctcagagaatttttaaatttatcttatatccaagaaaaatgactatctcttctt

SEQ ID NO: 45348 - DNA, 839 bp, Heterodera glycines
aaactatccttgaatatccggttgccttttcccatccaatttccgcctaattagaagggattttggatctcaaagcggacccaattttaaggggcgttgaaaatgttgtgggaatttccaggagagggcgttaaaagcagtcggtacagcgaaaaaatgaccaaaaatggactatcatggaaaataatggcacaaataaaaacaaaaaacgaagccgctgacaataacgagaaaatgtttgggcatttaccttttgggtcgttcaagagaaagctcaaggtccattttcatgttaatgtgcataaacaataattgatatttcttcaattatagaagacttgttgatccaccttttagcggcattcttgcgacttttgtcgggaaatattgaagcgttcactggcactctttgtgactgtggtaataagggttgcagtttaactgccataagattcgcaaaggccatgttttgttagtagtagagggagggcgaccggttcacggcctcaggtcggacgcgaagcacccgtcttttaattttgtgggagacgttcggccgcttcgcggcctcaggacgggcgcttcgcgcccgttttttaattttgtgggggacattcggccgctttgcggcctcagactggcgcttcgcgcccgttttttaattttttgagaacattcgtccgtttcacggcctcaggacgggcgcgaagcgcccgtcttttaattttgtgggagggatccggccgcttcgcggcactcaggacgggcgcttcgcgcccgttttttaattttgtggggaagattcggccgctttgcggccttaggacgtgcgcttcgcg

SEQ ID NO: 45349 - DNA, 1256 bp, Heterodera glycines
  unsure (1)..(1256): unsure at all n locations
gtcccagtgattagaatgctgtgggttgagtcccagtgatgaaaatgcaggagaagggagtcccagtgattagaatgctggtgggttgagtgccagtgattgaaatgctggtgagttgagtcccagtgattagaatgctgttgggttgagtcccagtgattgaaatgctggagaattgagtcccagtgattagaatgctgttgggttgagtcccagtgattgaaatgctggtgggttgagtgccagtgattgaaatgcagagaattgagtcccagtgattagaatgctggtgggttgagtgccagtgattgaaatgctggtgagttgagtcccagtgattagaatgctgttgggttgagtcccagtgattgaaatgctggagaattgagtcccagtgattagaatgctgttgggttgagtcccagtgattgaaatgctggagaattgaatcccagtgattagaatgctgttgggttgagtcccagtgattgaaatgctggtgggttgagtgccagtgattgaaatgcagagaattgagtcccagtgataccggtttttttggtaccggtaccggtaccggttttttcaaaaatgaaattaccgttaccggtttgtctagtaccggtaccgccggtaaaaatttgcactggtaagaatgggggtctggtcgagaaaagagtaggaaattggtgaagagggagaaatttttgagaaaaaattaaattttatttcatttagtcacgggattacacacatgcacatgtggtgtagtggttaaactttctacctttcataatttttcgcctgggttcaattccccacttggatagaatattcctcacattttcttggtgtagtggttaaactttctacctttcataatttttcgcttgggttcaattcccctcttggatagaatattcctcacattttctttaccattattttaattaaaattttaattttaaaaaatattccaacttttttctttcatgttaagcatcctaaaaacccaaaacttaatcaattggtcattttttttacaaattctgttaacaaatcgcattaaaaattacaaaatttttcccggcggcgcctatcggcaccgccggccctccttgtcccccaaaagtcttggaaaaaacgtgccgcgtaaaaagcggtgtgaancaaaaaaggtcattgatttacattaatttacatgnccggagaccaggtaacaaaatggaaaattggctgctgaccccttttttgca

SEQ ID NO: 45350 - DNA, 827 bp, Heterodera glycines
tagagtctaattggttattgggtttttaattgatctttcattgtcacattttccactaatttggcaacaagcacagaagaacagcagcaacagatgcacacggaacagcaatttggacagaaatgaggaaaacggagaacaaaagcaaattatggcccatttaaaaatgcccatttcaaatgtattaaacatacgaaaactttaaaagtgaattaaaagcaaaaaggatggaaaataacacatcattagtggtgggaataattccttaaatgaaatccctaaatttaagcaaattgggcaattacgattccgagaaattattgaatttcgaataaatatcatttatttggcctaataatttgtaaaaacattccaatcataaggcaaatgttggcattgaaaaatccgtaaaaaaaagtaagagtttaagtgccaaatgatatttttgagagggcaaaagaagattcattcacttcgcttcctccgtctcaacccgacaacacttccccaattccgacaatcgctttggtcgtccgtcccccgcccgtcttctcattggaatgcctggtgtccggtgattgccttgccgaggatcagtgcgtggatgtcatgggtgcctaagaaatgggcacatttcgccaaagtttgtcacaatttggcaattccatgccatttccttcctcaccttcgtaagtgtttacggactccaagttgaccatgtggcgcatcacctgcatcgtctctctcttagtttatcccttccccctttttttgtccattttcccccttttgcctgataatcgtccacaattccattgcctcccaaa

SEQ ID NO: 45351 - DNA, 1049 bp, Heterodera glycines
gtccgtccattttcacgcgctcgccaaccgactttcgcctgctcaacgaccgtctcctcgcccgtcgccgtgtggactttgataatcccagcagaaacccgcgcggactgatcgccttcagcggatcggagctggtggagatggtcgatgaaaagaatgtccgtgcggtgtttgtgctgttttggcacgaggccatccctttgtcggttcattcattggaattgtggtcgcggacaagcgaattgtggcgacaaacgcaaaggaacggtcggtcgacgctttggccaagtgccctcgtggcgattgaccattgcctttaccgacaacagatgaaggaacagcggacgccgctgctgccgtcgttttgggctccgtggcgtgccacgaggaggacgaattgtgccgtgcttttgcggtggcgcacccggcaattcgccagcagcaacagttatttgcatttcgcaatgggcaacgattggcccaacaaattggcattggcgacgaacattttttggtggaatggtaagggacaatggcaaaggcacttagcaaccgccgatgtaatgcattttcaggatccgaatgattctttccgaccctttggtccgtttggccaatgccggcgaagtccacgccgctcggcacggccttctccccggcagcgaatcgcctcgcgctgccgtcacagtgggcacatttcgctccgagcagcaggaggaatttcgcaaattcgcacgggtggccattttattgcacggccgttactctttggcctattggcttgaagaaaagtgggcactttttgatgagtgaatggcacaatgggtgtttaattggcttccgtcagatcagatgcagtgaaattgagcacttttcggcgtgtcaaatccggcacaaattcgtcagactttgtggaaatgcctttcacgggttcggatttcgacgtcagaccgcttctccatcacatcactcatgccagtttgccagacattgtccgtcttctcttcgaacgttgtctggccaatgactgttccgaaccgaccctttca

SEQ ID NO: 45352 - DNA, 901 bp, Heterodera glycines
aaaaaagactttccaaaataatacccctgggagaagggagtgggaaacatgatttcaaaattttcaattttttatagtctaatctactcaaaacggttcagaattcaataaaaataacattcacggtgcgaaaaatggggtttgacaagtttattggggaaaaaaagactttacaaaataatacccctgggagaagggagtgggaaacatgatttcaaaattttcaattttttctagtctaatctactcaaaccggttcagaattcaataaaaataacattcacggtgcgaaaaatggggtttgacaagtttattggggaaaaaaagactttacaaaataatacccctgggagaagggagtgggaaacatgatctttcaaaatttttgttgaaatatttgtcgtgctctgaagggcgtgggagggggggggctgaagacccaccacgaggccgcgaagaaggctctctgagtaccttcggtgcaggaatgaagtgaataaaattttaaaaattttttaattgctttttaaatatgccaaaaaatgtaggcttaacttttttagtgaaaatttgatcactcatattttttgctaattgagcagaagcataccaaactatgcagggatactccccggtaaaggactaacttacactgaaatgagcgccgagctagcttgctcaaaaaaaattttcgaaaatctgagtctttcgtttttatttattttttgcaaaattaattcttaaatattttttcagaaagggttctgaaacgcaccaaattttatttacatgttagtttaggcactctgatgctttttctatcaaaaagggagatgaataaaatttttaaaaatttttaattcctttttaaacaggccaaaaagtttaggcttaacttttt

SEQ ID NO: 45353 - DNA, 1062 bp, Heterodera glycines
aaaaaatttggggcgatttgaatgagaatagaaagagccaggttcgatgaagttttggtaagccaaaaaaaaatcccaaacatttaaaaatttataaaaaatttaaaaatgagaattcatgcgagattttctggaaataagcttaatagggcctagttaagctgtaaaaaaaatttggagcgatttgaatgagaatataaagagccaggttcgatgaagttttggtaagccaaaaaaaaatccaaacatttaaaaatctataaaaaatttaaaaatgagaattcatgcgagattttctggaaataagcttaatagggcctagttaagctgtaaaaaaatttggggcgatttgaatgagaatagaaagagccaggttcgatgaagttttggtaagccaaaaaaaaatccaaacattttttataaaaaatttaaaaatgagaattcatgcgagattttctggaaataagcttaatagggcctagttaagctgtaaaaaaaatttggagcgatttgaatgagaatataaagagccaggttcgatgaagttttggtaagccaaaaaaaaatccaaacatttaaaaatctataaaaaatttaaaaatgagaattcatgcgagattttctggaaataagcttaatagggcctagttaagctgtaaaaaaatttggggcgatttgaatgagaatagaaagagccaggttcgatgaagttttggtaagccaaaaaaaaatccaaacattttttataaaaaatttaaaaatgagaattcatgcgagattttctggaaataagcttaatagggcctagttaagctgtaaaaaaaatttggggcgatttgaatgagaatagaaagagccaggttcgatgaagttttggtaagccaaaaaaaaatccaaacatttaaaaatctataaaaaatttaaaaatgagaattcatgcgagattttctggaaataagcttaatatggcctagttaagctgtaaaaaaaatttggggcgatttgaatgagaatagaaagagccaggttcgatgaagttttggtaagccgaaaaaaaaatcc

SEQ ID NO: 45354 - DNA, 1146 bp, Heterodera glycines
tggggcaattatgccgggatgtgttacttgtttttaaataagctgaagaaattaattatttaattaaattaagaatgagaagaagggaatgttcaaaaaaatggtaaaaatgttcagcaaaaacaaagataaaatgaaagtccaagaagaaaatcaactggaagagaagtaccgaaatttgaacagtttaaaagagacagacccggcaatggcacaaattatggagaaattgcaaatgcacattaaggaggtcaagtcaggtaatgcaacaatgatttatcttctgtaattattgtaatttctctattgtagggaaaatttcggagccgttgaagcaatatttcatttttgtcattcaatttttggcaaaacgacatcacatttcggtcgccgaaattgtgccgattcaaaatatgaaaacaaaaaaagtattaacagagttagtaaagctggttttagaggaaaagcgaaaaaataagcagaaaaatgggaaaaataaggacacaaatggacaaaattgccaatctgagaataaatttaaatcgaacaaagctaaggaagagcgaatgttacgccttttactcacggcattagacaacgtaaacggcacgattaatttatcaatggacggtaagccagaagctgggcattatttgacactaattgtaactatttgcgcagatttaagcgggaccggcgtagcttttctagattttcaggtcccggaaaagcaaaataatgatgtgctaaaataggaaaacagatataaaatcccaggttttgcgggaaaaaaagtattttttgaataaataatattttatttattaattcaggtttatttcattatttttttgtaaactgataattttaagagccctttttcgatttttagagttgtactttttggaaaatcttgaaattttaattcttagagggatgtattttatgttgcattttttattatgacaaaaagatgaaagaaaatattggtttctatcttttatgtattaaaaataaaaaaaaagagaattatattttgttcgtctgagtctcggttagatgaaaatataaaatttaatttttcccttatggcgcatcggctcgagatcaagtcacaaaatccactaagactctagagatcccccg

SEQ ID NO: 45355 - DNA, 1212 bp, Heterodera glycines
aatttggcgagttaattgacttgtgtaaatgtggcctaaggcacaaatgctgtggggaacttagcactggggatgctgaacctaaagttggtggtggtgttggtatacgagtgagtggcgtattgccatggttgacaagccctatgagttcgtggatcggaactccttgcctggggaccagtgtgcttgcattcgaaaaaacacgagacataagcgcccgaaggcctttggcctgaggaagtgtcctaaccgggaaatccggagtgctcgtgtgagtgcctgtgcactgccctcggagctgtgtccagcggcgagatggttcttcccaagtccgggaagctcggatgcctggccagcgctgtgtcattaccacttgctcggtctccttcgctgcccatgcgcacgcttgcgctgaacggagttgtttctgctgaaactatccgtctttacaagacggctgtaatagcggcgcttggcaacgctcgctagcagctatctggttgatcctgcctgaactgatgtgttcatttcaaagattaagccatgcatgtgtaagtttaacctgccagacagggaaactgcgtacggctcattacaccagctataatttacttgaccttgacttcttacttggataactgtggtaattctagagctaatacatgcaccaaagctccaatctccccagagcggagcgcatttgttcgccacaaaaccaagcgccctccgggcgtccagtgttgactcagaacaactaagctgatcgcacggtcttgtaccggcgacgtgtctttcagtgtctgccttatcaactttcgatggtagtgtatctgactaccatggtgatgacgggtaacggaggataagggttcgactccggagaaggggcctgagaaatggccactacgtctaaggatggcagcaggcgcgcaaattacccactctcaacgcgaggaggtagtgacgagaaataacgagaccgatctcttatgaggccggtcatcggaatgggtacaatttaaaccctttaacgagtatctatgagagggcaagtctggtgccagcagccgcggtaattccagctctcaaaatgcatagaattattgctgcggttaaaaagctcgtagttggatctgtgctagccgtccggtgcacactttgtgtgttactggttcggatggcttttctgccgggctctccccggcgttgggc

SEQ ID NO: 45356 - DNA, 1498 bp, Heterodera glycines
acaaaaattcataaaaaatttactagataaaattttgccttttaaggttaaaaaatttcctcagagggtgccaaaaaccttcattttcattaaaaaaatggatcaacatcgcaaaattagatcattttaacgaaaatttttaagaaatcacattaaaatatatgggaaaattttatgaactaagaataaagttgacttctttggtctccgacccccccccccttaattatatttactcacaatggccaattgtgtctctaacatgattgctttgatttaaacattaatttgtaattcgcctctatctgttatgttgctaaatatgtcgttagtgagtgtcaatataatggaaattaatgtttttgaaatgttcaatttgctactgttatgttcttcgtctttgaagactgtctgtgtttattctttagcagttattattgattaattaatgaacacttaaattggcactgctatgggggaggacacatattaaagaaattgctaaaataccaagtaacatggtgacgaattccaacaattttaagccaaaaattccaactgctacaacaacaacaatgcaattttgctacgacaaaacgaaacaaaaacaacagaaattgcgcttttgtattccagccgaactcattaatgagcttctcctttttatggagccactaaaatttttgggcgtaaagcgtttgttgagaataagctcaatttgttaccgtttaattgtctgcagaaaaaatcttaaaaattggcgaatgccatacccaattattgtaagtgaaaaatcgttatctttaacgtcgaatttattttccttaaaagcaataagaaaaataaattttatattatataaaaaacatgtggcattattattcagccaaattcagtattttgatttctttttattcactacgacttttttaaaatattttcagtgacaaaactcacttttttgtctttaagttgactttttaatgctctttttttagtattttgttagaattaatttgataaagaatcgtgtggtaatactattcagccacaatttatttattacttttatttagtgtgactcttttattgttttagtgataataaacatttcgattttttaaattattttttaagaattttttttaatatccatttagaaaaagggtatttttgtttcaataattaagtctgcttagagatttgctaatccatttgggacaaattcacatttatttgcgattttaatatttattatttgtgtgcttttccattataatgaaataataattatacaattaatctggataaaacaaaaaacatttaattcaggagcgcgaagcaattttccaaagcaaattttcccacctccaaaaatggccacttgtgcttcgccttcactcagacaatctcccgtttctttcgattcacacgctggacattgcggccaagtattttgtggtcgccgaaacggactcgccggctgattatctcctca

SEQ ID NO: 45357 - DNA, 551 bp, Heterodera glycines
tctccccataaatctggggcgcatcggttcagggggactccctgaaaacaaaaataaatcgattttttcaagtgtccgtttggggtactcaaacaattatggggagcaaaaatccaacgcagaattaaagtacaggctatagggaagctattccggaaggattcggtctccccataaatctgggcgcatcggttcggggggactgccccgaaaacaaaaaaaatcgattttttcaagtgtccgtttggggtactcaaacaattatggggagcaaaaatccaacgcagaattaaagtacaggctatagggaagctactcccgaaggattcggtctccccataaatctgggcgcatcggttcggggggactgccccgaaaacaaaaaaatcgattttttcaagggggcgtttgggggactcacacaattatggggagcaaaaatcccacgcagaattaaagtacaggctatagggaagctattcccgaaagattcgggctccccataaatctgggggcatcggttcggggggactgccccgaaaacaaaaaaa

SEQ ID NO: 45358 - DNA, 1431 bp, Heterodera glycines
  unsure (1)..(1431): unsure at all n locations
aaaatttgagtttcgtcgtcattttggcattttcaataaatattntcgtcatttttttgcgaacatttctttttttntaatgagaattttttcgaaatntggcaaacttggaggtgtttttgatacaacgaacaacaataaaaaatatgcatttttaagttntaaaccccattttttggttgtttattgtactttttaggtttatttaagcaaatattaaatatgcacaccttttttgggatttttgggggtttacaacatatatttggcattttttatccatattttggtccatatttggccatttttgtcctttttagtccatatttcgggcttttttagtccatatttaatgtccatatttcgcgttttttagtccatataatttacaaccctacttataaccctagtaatatgttaacagaaaataataaactgaagcattcgttttaaaaattaaattttcaaatatattcatttcttcggggtggaaatttcgcatttcgcgccaaaattcgaaacgccaaaaaatgcgaataatgcgaaaggcgaaaagcgaaacctcggtccatccctggtccgtatcactccgggcagtcacagcaccgaggagtccatcaatcgtcagttggccgacaaagaaagggtaaaactaattgattttatttaattattactaatagagcccgccggtcttttacctgacctgtatttttcgggcatactaccaggcccggatcgttcgataaaacgggcttttttgcactgggttgcccgtcccggtcagttgtctaacaataacctggtccagtttctttaaaaatttcggctcgaattattaatatgtttgcaggttgcggctatacaaccattttatgttttatacactttttcatgagatatatttagtaaaacgggatgaaaaaaatttgcatttctttttctctccttttggcgtactattttcatgtctctaacacatgaaaaacattaaattcgctaattgtaataattttggttgtaaggtacaaaatcactttggatatttagaatcaataaaaaaggataaaaattcgcattttggttagaaacagcagcctaggacttggagttatagcgtgataaattaatttgaaagtctcacaactttttctgagatgtcaaattgcttagcattcgcttagaaaaagattctccttttcagaatcttattttagataaaaattttgttcagtttagtcggagatgaagaaagttatggctgatcaaaatanaaaatacaaaaaaggcatttaccagtgtaatttttgaattaacgcgcnaaaatttacgccaaatacgctatttggcgttttgagcaattttgtctgacaanatgtgtataaaaggcgctgttatgatgcgttttctcatatttcactaacgggcgta

SEQ ID NO: 45359 - DNA, 960 bp, Heterodera glycines
gagtctttgctgcatggccaaattcggcggtgagagaactaaggaaaacggaagggaaagggaagaagcgccgggagaagggagagacgcggaggagggaaagtgccgcaagcgaaagaatgccattggggaggggagagaaaggcacgtcattagggggagggggtggacgagaagggcgggaacacttcagccgacggcactccccagaagagagagagagagagagaaagagagagagagagtgtgtgtgagagagagagtgtgagagaggagagttgggcagcagcagaaagacggacagacagacagagggcccccgggggaatgccccgagcaaagtgccgtctctgcccagggaaatgcgcttctctctaccgctgcatttgcttctttacttgcgtaattttagcacagcagtgatgcgagaaacgcgggacggacttcggcggaaagaccgccgaatgtctcttcccttccgccgggaaggccgcggaatgtgtgccgtcgtctgcgggtgttttgggaaaagctttgccacacaaaaagccattcacaaacattggcacaattggccaggtcaatttagcaaaaaccgggcgagaaattagtctttccttggggaaaaaggtctaaaaattcaaatgccttccaaaatttaacaccgccaaatcccaattaaaattgtgttgaagcaaagattccaattttataccgataaataaatgttgtctaaagatgaaaatgaataatgtctattttatttaagtagtgtaaaaagactaattgtaagattaaattagggttttgttagcgaatatcggaagtttcttgcgaagaatgtcacggagacgaacagaagaacataaaaatttgcgaggggttcaaagagtaaaaagggattacatgtgataaacaaaacaaaaacagaagaacacaatatgattgacggagagaagt

SEQ ID NO: 45360 - DNA, 902 bp, Heterodera glycines
ccccataaatctgggcgcatcggtttcggggggactaccccgaaaacaaaaaataaatcgattttttcaagtgtccgttggggtactcaaacaattatggggagcaaaaatccaacgcagaatttaaagtacaggctatagggaagctattccggaaggattcggtctccccataaatctgggcgcatcggttcggggggactgccccgaaaacaaaaaaatcgattttttcaagtgtccgtttggggtactcaaacaattatggggagcaaaaatccaacgcagaattaaagtacaggctatagggaagctattccggaaggattcggtctccccataaatctgggcgcatcggttcggggggactgccccgaaaacaaaaaaatcgattttttcaagtgtccgtttggggtactcaaacaattatggggagcaaaaatccaacgcagaattaaagtacaggctatagggaagctattccggaaggattcggtctccccataaatctgggcgcatcggttcggggggactgccccgaaaacaaaaaaatcgattttttcaagtgtccgtttggggtactcaaacaattatggggagcaaaaatccaacgcagaattaaagtacaggctatagggaagctattccggaaggattcggtctccccataaatctgggcgcatcggttcggggggactgccccgaaaacaaaaaaatcgattttttcaagtgtccgtttggggtactcaaacatttatggggagcaaaaatccaacgcagaattaaagtacaggctatagggaagctattcccgaaggattcggtctccccataaatctgggcgcatcggttcggggggactgccccgaaaacaaaaaaatcgattttttcaagtgtccgtttgg

SEQ ID NO: 45361 - DNA, 740 bp, Heterodera glycines
attagagcaccgatttctagtgaaaaaacttttttttcgctcaattgatttgaagaaaggagctcaaaaaacgcatttctgcgttaaaattttttcatttggacgtcatttttcgtcactggaaatcactattttggagttttgtcacttaaaatagtgaaaattcacttttttggcttttcgtcactatttatttacttcatttgcaactgcaatcagtgggtccgtatcgttttggcgccgacgttttggcgccagcccaagttttcggactataacttttttaattgttaaccaaatccaataatcttggtatcattcgaaagcttaacatgtttagaagctatttctaaactattgcttcgcgattagacaattaccaaaaaagttataacatgaaattgcaaaaaagtcgaaatttttgatgttttttcttaataacttttttacaggctaaatttttttttgtttttttgtaaggttaatagagcatgtgaggaactttcgaatgatactaagatcgttagatttggtcgacaacgaaaaaaggtataataaaaaaactgaggctggcgccaaaacgacctagtccccaatcagtgaataaaaaaatttgttgcttcatttttggctgaaaattatgtcactattcgtcactattttgtcactattttggcactttgtcgtcactattttagttaaactattttgcgatttttcgtcactaaaagtcggggccc

SEQ ID NO: 45362 - DNA, 969 bp, Heterodera glycines
ttcttggatatgagataaatttataaattctctgatcctttaagggcgattgcgcaccgccctccctctcacgctcgcactcgattttggaacgtatagaatttctcaaaataagagataggcatttttcttggatataagataaatttaaaaattctctgtgaaattaaatggcgattgcgcaccgcacttcctatcatgctcgagagcatttgtaacgtataaaatttctcaaaataagagttagtcatttttcttggatataagataaatttaaaaattctctgagaaattaaatggcgattgcgcaccgccctccctctcacgctcgagcgcttttgtaacgtataaaatttctcaaaataagagatagtcatttttcttggatataagataaatttaaaaattctctgtgaaattaaatggcgattgcgcaccgcacttcctatcatgctcgaaagcatttgtaacgtataaaatttctcaaaagaagagatagtcatttttcttggatataagataaatttaaaaattctctgtgaaattaaatggcgattgcgcaccgccctccctctcacgctcgagcgcttttgtaacgtataaaatttctcaaaataagagatagtcatttttcttggatataagataaatttaaaaattctctgtgaaattaaatggcgattgcgcaccgccctccctatcatgctcgagagcatttgtaacgtataaaatttctcaaaataagagatagtcatttttcttggatataagataaatttaaaaattctctgagaaattaaatggcgattgcgcaccgccctccctctcacgctcgagcgcttttgtaacgtataaaatttctcaaaagaagagatagtcatttttcttggatataagataaatttaaaaattctctgagaaattaatggcgattgcgcaccgccctccctctcacgctcgagcgctttt

SEQ ID NO: 45363 - DNA, 1539 bp, Heterodera glycines
  unsure (1)..(1539): unsure at all n locations
tctaatcattaccattagtttaaaatatcaactgaagccctttacaaattacattatttattagctttcttaccaataaaactttaacccatttaaaaaattaatgtacaaataaatatttattatagaacaaacaattaattctataaatactaaatcttccattgatattaataacaattatggcgaaccttagccaataatgatgtgaaaaagtgaaaaatacaatactcattattaatacaaaaaataagtataaaataattataaacaattttttcaaaaatgttaaaaaataggaggaaaagccaaatcaaccacacatcactcgtactactactctacacgacaagaaaaatggaaagttccatttttgtaaaataaatattttaagacatttatacaaagataccaaataattgtcatattacatattttccaaaataccataaccagagttcaccatctatttaaataacaatataaaataaacttatttgatatttcactaaatgaagttttaaaattgttttaataaaaaatttttttaacccaacatttaaaaaaattgactcaataatatatattaataactctataaataaggaaaaggaaactttaatctttttttgtgagaaaatcattaacaaatttacgcaaaactcaaaaaaaaaattatttgattggtactaaaaagcgaccggtatactcaaaaccagtaagttggaggtaaaaaaataaaaaaatttctcaaaaatttaagataatgaattgacattttataattaaaagacctaaaaagtcaactttttaattttagaaatctcttttcaatatgaaaaaaatggtgacaaaaaatagaaaaatgaattaatattaccgtgaacttaattagctctaccataatattaattaaaaagcttaacagaaattagatagactaataacttaaaatattataaaaattaataaaaaaaaagttcgaatggagcatatgttaaagaacagncaaacaatgagaaataataatatttcgagagataaatttttttaattttattgaacagtaatgaaaaaaaattttatttatttattgctaaaattattctcgataatttaaaaacggaattaaaaacaaaaaaaaattcttaaaaatgctttaatcaaaatggataaataatttaattaatatgttacaacaaaaataaaattttaagaaatttggatttttaaatatattttaaatctttccttttaaatcaaaaaggatattttttttatttggaatttttctctaaaaaggattattttttaaaaaaaaaattaaattttaaattttaaaaaaaaatttttgcccgccccaaagggaaaaaaaaattttgggaaaaaaccacaaacaaaccaaaaaatgtttttgggttaaaaaagggggggaatttttttaaaattttgtaaaaatttaaaaaaaaaattttttttttttttttttttaaaaaaggggaaaaaaaaaaagaaaaattttttttttttttttttttt

SEQ ID NO: 45364 - DNA, 1300 bp, Heterodera glycines
  unsure (1)..(1300): unsure at all n locations
aaaatcgagtttttaacttcagccccctccgaaccaggggtctggctacgcccttgatcattgccttcattacaaaacatctctgacactacttttttcctcattttctcggttttttaaaattgttcggttcacactaaatttttgtacgtcagtaacaaattttttacgcgatatttttctgttatcggacccctattatgtttttctccggcggcgacctttttttactcatcaaatttgaattattcgcacttcaatttggttatgcatatatacagtacaattaacggttcacgattattactgtgatatgacaatacaaaatatttataatatatggaatgcgttatagatagaataaatacatcgcacacagatacatatggcataacaatatatattacttaaaacatcaaacgcttccaagtaagaggaggaagggaaaagcggattctctattcttatgcactttggtgctggtaagtcaggaaattgataaaaggtgtcaaattcccttgctctgatgctatgtcgaggcattcatagtattcatcccttttcgcctcaggcagaataagggtatgaagcccgcggcgcacaaagacacagttcatcaattgacgcccggtccttccgtttccgtcataaaacggatgaataaacacctaaattcactcaaaagttttctagttgaatagattcacaaaaatattatgtttcattcattaagttaaatgtatttatttatttatataattatttttttcgttttcaggttcgaagttgggcgcgtttgcactgcgggatgccttttacgagaccgcattttattggttgtcgagctgcatttgcccgggcaacatttgttttatcatgcaccatcttttgtccgagatggcagttagccgggctttgtccattgtcattttgtcggctgtatttgtccggggcggcattttaccgggttttgtctatttgacattttgcgaattgtgttgttcggattgcggcactttttccaaaaactttttggggacagggtgccggcagatgccgattggcgccgtctggcaaaatttttatactttttaatgcgatttgttaacagattttgtccaaaaaatgacaaaatttgcatatttgttagcagattttcatcaaaaatggctaaggcggcactttgccgtgctttgtccattcgttatttntgtcgactgtatttgtcctgngagtattttgccggactttgtccatttcgagaatttttgtctagctgtatttgtccgggatggcattt

SEQ ID NO: 45365 - DNA, 983 bp, Heterodera glycines
ccgaaaacaaaaaaatcgattttttcaagtgtccgtttgggggtactcaaacatttattggggagcaaaaatccaacgcagaattaaagtacagactatagggaagctattcccgaaggattcggtctccccataaatctgggcgcatcggttcagggggactgccccgaaaacccaaaaaaaaattttttggataaaaattatttaaatgaactgactagataatatttaaaataggttatttctcttcctttcagtatccctgcaaagtttggtgcgcttctgatcagtttctgaaaaaaaagttaagcctaaactttttggcctgtttaaaaaggaattaaaaatttttaaaaattttattcatctccctttttgatagaaaaagcatcagagtgcctaaactaacatgtaaataaaatttggtgcgtttcagaaccctttctgaaaaaatatttaagaattaattttgcaaaaaataaataaaaacgaaagactcagattttcgaaaaattttttagagcaagctagctcggcgctcatttcagtgtaagttagtcctttaccggggagtatccctgcaaagtttggtatgcttctgctcaattagcaaaaaatatgagtgatcaaactttcactaaaaagttaagcctaaattttttggcatatttaaaaagcaattaaaaaatttttaaaattttattcacctccattattgatagaaaaagcatcagagagccttattaacttgtaaataaaatttggtgcgtttcagaaccctttctgaaaaaatatttatgaattaattttgcaaaaaataaataaaaacgaaagactcagattttcgaaaattttttttgagccagctagctcggcgctcatttcagtgtaagttagtcctttaccggggagtatccctgcatagtttggtacgcttctgctcaattagcaaaaaatatgagtgatcgaattttcactaaaaa

SEQ ID NO: 45366 - DNA, 538 bp, Heterodera glycines
tttttataatttcctcggattcatttgcattttaagcattcgcggagcatcattttcaatccgttgaacccgaccatacgtattctcggcagccgttgtagtttggcatcaattcacccgccccctcaacaacaacaatgaatctcgaagtaacccatcttttctgtattttttacttgtaaacccccaaaaaacttaacaaattttataagtgtctgatcgcccgaccctttccgacttagtttttgaagtcagcagaaacatcgaccgacaagtggacgcagcgaattgagctcggaatttcgtgcactataaaaattttgaagattcgatcatacaattaattctcttttttcgattcattcaatatttaaaaatatcattatttttcgtgaaaattgttatttatttatgcgattctggtaaagtattaatgaatttcgtattttgaagccttaggaatgtaattttaagactttttcgctaatttttatttggcgggatttcgactcattttggctttggcgggatttcgacg

SEQ ID NO: 45367 - DNA, 910 bp, Heterodera glycines
ccccccccccccccccctcgtccgtattcacatatccttttcccgctgagaggcctttcggcgccacagatttttggagatagttaatgttgtgatctcaaaaattccgttgcgtcgcaggcctcgtccggcggtggacaaaatgccacttttttggacaaatatcaccatacctccttatggacaaaatgccatcttttggcaaaatgccactttgttccatttccgcggcaccgttgtctttcagccttaccccgtctacggcaccggcccgggcgttggcgcttaccctccgccagtcggaccggacagcacatattcgccacagcagaaccgacgatttggagacgaacatttgcacagatattacgacaatgaaggcggacggcaccaccgatattgacgaagaaatgccatcagagcacagactgacaaaagtaatagcaaaacaaatttcttaattaccgaaaagctccgatcgttcatttccccaaaatttactgtgagcccttacagtagtcccaacatttccaatttggcacacattttcgatttttatgccaatttaacaaacgcaaatgaatataaatgtttagaagctgttcacatttgcctattaaatcagcaaatttgggcaattaaagaatgccaatgttttctttttgtccattctctgatgaaaaatgactgtcggggagtgccataatcaatttgtgtgccggccaagtggtgggcggggccagtcgataatgaattgcgctgggtaggggggggcaatgcgggaatctgtcaattttagcagcaaaagtgctcaaaggcggaagcacatggaaatctgaaagcagacaaacgcagccttttaaagcagtaataaaatgggagggagagaaaaagacaaaaaaaaaccatt

SEQ ID NO: 45368 - DNA, 1279 bp, Heterodera glycines
  unsure (1)..(1279): unsure at all n locations
aaatcctaaatagacaacgacgcttttcattataaagctttaagggaggaaaaagtaatacgaatatttcatttcttacttatccgaataacaangataggttacacacgaacatttttatagaattccggctgaaactaaaatccctcttttgttcttancctatgattttggcnncattatggatgaattaagtatagaaggcgtcgcagaaatacattcatattttctaaatcggggtttcagaaaattaagatttaaaagaggctaaattacagatgcttttcaaattttgggtgtatcctaatagaaagaagttggaaatcagtacttttcacgcctataaaattcgggccgaaaaatattggtgtttgtgactagaaaaatagcaggtgcatatcaaatgactacagaaaattacagcctccaagaaaataattgctttgcacaagcaatattttgtagagcccatcaaacacattgtgcttataggaaaggcagaattaaacaataggggcctttttattatgattacaacaaatcagcatggcgtctcactgatatggtatgtttcagttaaggtttagccgatctacaaatttcggcactgtctattttgtaaaagcgaatcaaattcctttggattccaaagtggaattacagaattgcgacggcaaatcctaaatagacaacgacgctttcattataaagctttaagggaggaaaagtaatacgaatatttcaatttcttacttatccgaatagacaaagataggttacacacgaacatttttatagaaattccggctgaaactaaaatccctcttttggtcttaacctatgatttttggcccattatggatgaattaagtatagaaggcgtcgcagaaatacattcatattttctaaattcgggtttcagaaaaataagatttaaaagaggctaaattacagatacttttcaaattttgggtgtatccgaatagaaagaagttggaaatcagtacttttcacgcctataaaattcgggccgaaaaatattggtgtttgtgactagaaaaatagcagatgcatatcaaatgactacagaaaattacagcctccaagaaaataattgctttgcacaagcaatattttgtagtgcccatcaaacacattgtgcttataggaaaggcagaattanacaataggngncctttttattatgattacacaaatcagcatggcgtctcgctgatatgggtatgttttcagttaaagttttagccgatctacaaat

SEQ ID NO: 45369 - DNA, 927 bp, Heterodera glycines
gcaattaaaattaattaaaaatgaataagttattatctatgcctttgtaaacttcgcgaatgcaaagaatgattatgatgaacataaaaatagcgaaaaagacgatgccgcccttttctgaatccatttcctgagagaacagctgtaattattacaatttgattttcttttcgcaattcatccacaaatttaccgttttataaatgacttttgcaaaaagcaaaatgccaaacagagacaaaaggaccaattgaaagagttggattggccgcagacgacgacgctggggacgcattgcggcgggcaaccgatcaaaatttatgataggcattgaaacgaatgaattttaaaaagtcaaaatttgttatggattttcataattaggatcggacggactttccggcaaaaggaatttttatgcggcggcgctttgcaaaatcaaacaaatttccattccgaaacaaaaatcccaactctcgccaatggcattttcactgaaattgggatcgaatccggaaaatcttcgaacaaataagaacaaaaatcatttttaagcagagaaaaagaaagtgggaggcaaatggaagcaaatacattccaccaattctcatttcgcttcaacatttgtttattttgtgtgcaaaatctgtttatcatcacagaaaatgagcgaacggacagcgaatgaacaaattccgattaaaaatatttaagaatgaaattaattaagcgaaaaaacatattttttaatttttttctaactttcataactcgcagctaatgattggcgggagggttagtaacggtgtgaaatttatatttactatatgttagacaacgttttgggggtatgtgtccctctcttctaccttttcataatgaaatcttacaagacaataaattacatgtaattttttaaattccttt

SEQ ID NO: 45370 - DNA, 917 bp, Heterodera glycines
agggagaggggggcggggggggaattcgaattgcagcgaaataaccttaattaattgaccattagcaggtggtcttctttagcgacgaattgccgcccaaattagtcgcatatgacgaatcgattttaagacggacagacaaatacgaactgctggcccgagtgaatggaggagacaaagaatggatactgaggataagggacgttcaggtaggaatagtcggacaatcaaagcggggggaattaagaaagtgcaaagcattcgagactcttgctgttgggtgtcgaaaacccgaaaaaagcccgagggaatgaatgatacgaaagatttcaccgaactcggaaaattgtaggaggacgacgccggaatgtacatctgtcagctgaacacgaaccccgtgctcagcaggaggggatttttggagctgcgcattccgccgtccatctcgcgcagtttgacccccgcggcgatcgaagtgcgcgaggggaacaacttgacgatgacatgcacagcgaatggcaatccaaagccagccattgtgtggcgccggtcggaccggcgcatcattcgctgcaacgaagcggacggatacggaggtgggcggggggcgaacgagggggaattgggactgatcggtggcgattccgatcacttcctagccaaattgagcgatccaagaaaagggatgggttgttgtttttggcctcgagttcaattgtttttcgcagaaactatgcacaaaggggctgaattgccattgagccgagtcagccgaaggcatatgggcgaggtgggggagaagatcgcgcagcatttgcctccttcttaagcaatccatttttagtatttttgcgtggcatccaatggcattcccccggacgaaacttgggtcattaaatggcacgttttatgtgagt

SEQ ID NO: 45371 - DNA, 988 bp, Heterodera glycines
ccccaaattgtccttcccccaggcgtttccttgaggcggtgctcgcctacacagcggcgcctaaaattgacgtcatcactcattcggttggcgttgtgttggcacggaaagcgatcaaagggggcgaactgatcgccacggacggaaactgctcacttggcaagtgaatgagaacagaaaagccaccgggagaaggacatttaagctttgaccggaggacccataaacaaagggattaaaaaagataaatggcactaaaaatatttactggtttatttaggcacaacaccgattcatggcctaagcattgtataattttaattttgatgctttaggtcgcccgctgtctgaccgagtcgacacttttcttggcaattttttgctaatatatattaaataattacagctttaaatattgcttatcgtcaaccactttttgttcaggaattgccggtccaaattacggactttgcatgtgccaattggcacagacaatgcccgcctggtgcaatgcgctcgatgtgagtcatgaaagtctttgtctttcaatggttgggggcaatgatttggtggcaaagaaattttaaaattcttacgaatggacaaacgactatgaaaagctccccaaaaatggataaatcacaatatccctgtttgggaatcaaagggcataaatgacttaagggtcaaaaagtctgtgaggccaagcggcggcactaaaacctgccctaatactattatttattttttctacccttgaatagtaaatttattaatcaattaaattttgctctaatccctccccccagggtttgtatccgggctattcttgcgaggatcagttgctctgcggttacacccaaaccccgtgtgaccaggtcaactactcggcctttctggagaagctgaacagagacccgagcagagaagcggactatgtgttcgcattttggtgaaaaacggcagaattttggcaattttaaatttg

SEQ ID NO: 45372 - DNA, 976 bp, Heterodera glycines
tcctaagttcccaaaaagtttttgaaaaaatcgcgctgtaaaaaacgtgtaaataggcactccttttcccaaaaatgttctaaaataatgaaaaatgacaaaaaaagattttgataaaataattgaataattttttcaagcgaatatactaaaaacatttgtgaaataccttttacttggttaagaattaaaaaatttagcctattaaaatatttagaaatctttttattatattgtatattttttgaaaaatttccgatttcttgcaccgcaaaaaagtggttttgaaaagaaaaaaatagtcaatttatgaaccgttaataatttgatttccgatcaactttttaccgtcggatccaatcgaaaaatcttagtcgacccatcaaccccttttaatgcatcccgccagcccttaaaaatttatttttcagcatttttagatttttggaaattttttgaatttaattgaaattttttcgaattttccaaaatcccgcacgggatcccgcaaattttaatgcgggatttgcgggattaatcccgcgggatcccgtcccgcaaaaaattttgagttccagtcccgcagcgggatccgcaaatttgaaatttccggtctctatttaataccacatttcaccatttttgaaattgttattttacatttagcgaattttatgaaattttaagaaattataccctcaatttggaaaccatatttttgcaattcgttaggaccacaattctacttttcgactagggttataagttgtatgcactaaaaaaagccaaatatgcgcataaaatgcactaaaatcccccaaatatgccctaaaacccgaaaaatgcccaaatatgcactaaaatatgccttaaaaattacccaagatggcttctgaccctaaaaaagccaaaattgtgtataataaaaaatttactttaaaatatcaaaacaatggctaagtagcgtttttagata

SEQ ID NO: 45373 - DNA, 1008 bp, Heterodera glycines
cgagtacacgccatggtattcgggccaaacaatttgccagccaaaagggcagcggagggttcatgaaggtaagtaagcggatgagtgtccgtcagggatgtcgggggatcgaggatgcgggaattcgtggtccgaagatgtcggtggatttcgggatttcaagaattgtctctaaaatggcgggaattcggctccgtgcatgtcgaggggtcgggatttcggatattctctaaaatgacgggaatttggggtccaggaaggggcatttgagggtgaagggagatatggtttagactcgaaaaaagaagcgggattctagaccggggaggacacaaaataaaagatttcgggatttgcggaggtaggtccagattattttgttttgttgaagatattagaagtttgaatgcagatcatatggtgcctcgagagcggagccaattaattaaccaatcaaaaataaaactaattgagggataattagtgcctcaactgggcaaactgagagaaatttgagcgactctaatgaccgctttttaaaggtgcgcgacgttttaccgcacagccaagggggcaaggatattccggaagatgacaagctcaaatccgaaggcattgtccgactacaggtgtcccccgagagaatttttaaatacctttaattaccgtaaaattttcattagtcgggcaccaacaaattggcatcccaacggggcatgaccggctttggcacaccgcggaacacgatgagcaagatgggctggaagaaggaatgggtggaggagtacgaggcggcaatgcgcgaatttgaggagcaacgaccgcccgggtcggcatcgtcggataatctgtgagtttggatggggggggggatacggtactttttgaaatatggtagtgggccgattaattaatggggaagagagaaaaaggggtggagtagatagagagattaatgaaagaatcctaaagggtactttttgaaatacggtgctttgaaaaaggtaa

SEQ ID NO: 45374 - DNA, 827 bp, Heterodera glycines
gatgttaaattagccgtacgaaaaagcatttcataaatccgccaagtttcgaaaatattttttctttaaatttaaataaatcgcaaaaaaaaatataacccacttttaattatatgattaataataataattttgaacccacttttgattaatataaattaaaattagttattaattgattaaaaggctgaacgcgctggcagccttatccgatgggatgaactacctccagcatcttcctcactcggtaatgagacgaaaatttcctaaaatataccccgcccccccccccctcaattagaagccccttttgaggggattaaaaaatgaaaccccaccccctcaaatagaaccaacttttgaggaaggttgaaaaccagagcccttgggggctctatttaggaaatacggtaatatatatatatttatatatatatatatatatatatataatatatatatgtatatatatatatatacattagaataatttaattattataaaattaaaacaaaacaaaataggactgccaacctatcgactaccgacagaggtggaaaagttagctcaaaagccgctttcactgatctctgaatggtactcatgcacaagcatttacgattgtttatgccaattgtttggaggtaattaaaaatttattaaatttttataagaatttataattttaatcagtgcgcatttatattttattcatttctaaagtttttcgatcgattttgaaggtccagaaattttagaatataattctcttgccaaattcttaaagaaatccaagtcacactgaaacaattgcaaacatacatgg

SEQ ID NO: 45375 - DNA, 1130 bp, Heterodera glycines
  unsure (1)..(1130): unsure at all n locations
aaatttactcgagatcagaacgatttccattgcgaccaatccngaaacaacagcaaatcaattggcgacacaaataaaaaagaacagtgcncaaaaggacgaggccaatgattgtgaaaaagttggccaaaagagaaagcattgacagatggcttttcgtggggaattcggggtaactcttggagcaatcttcacagtgcaagtccttctgagtcaattggtcgggagaacagcactggcgacagtaacccatcgtatggttggcaaagccctgtgcacattcgtcgcattggagcggacctttttgggttgcgtctttttcatgtccaacgaagctcccttcggcttaccaggcccatggcaagttgcgcacgacttgtcgcactccaaacaaacgctttgcgcactttcgaagtaaccggcggagcacgaattccttctgagcacgcacttggcttggattgtcagtctgtcttaaagacaaagttcagccgacgtcctacccgacgagggactcctctcttacaatccgcgaccaatccttcgggacaagtcgcgacacaacggccatggtccaaatggccgtaatgtttgacgtctatcagcagttttgcatcgtggcacttgtcacatagttccgcttgtgaacacgtctcgcagtcggtggcgcatcgtttgcatttgtcgccgtccgcgtaaaagccctcctcacaatgctcaacacaccttaaaagatttgactgtaaacagtggaaaattcaaacaagaaaacttttggaattacaccatttggacagatgacgccctattcactcattgggaccgggaccatttgtgtccaaggggtctcccagccaatcccgccctcgtcgtaacagccctatgggtcgaaataccccgcctcgtacagtccgtagggaggttgtttttgacgaccccttacagaataatcgggacagtaaaaattttatattttgtgactgcaaattggagacaattgccgatgaaatttcatggtttttaaatttatttgtgtgttttttattgtcagtgtttatgatgagtgtgtgtgatgatatcaatcagctcgagttatcaatacaaaaagttttgactgctaattatgaaaa

SEQ ID NO: 45376 - DNA, 1345 bp, Heterodera glycines
  unsure (1)..(1345): unsure at all n locations
tttgagtttttttttcaaanaaattagcaatttttgtacaattctgnttaataaatgcatttgaaatttaaaattttttttattatattttatgttttgnaaaaattccgacttccgagttctgacttccgacatttctggagtcagaattccgacttccgaaaattttttgggcctcggaattccatccctgctatataccagtgatgatgattcgcccagacttgtgcttggcattccgctcagactggtgctcactgttcggctgaaaaaggcgggcgcttggcccaatcggcgatttgccaccgctgcagccgttaagcaaggcaactccatttgcttgatggggtcggcgtttccttcaaattttagaattccaaattcaaattttttcacatttaaaaagtacgccctccgccgtggtcatcgctcggacttcgcccaatgcgacgcatggcatgcgaacattggcggaccgatgccgaagagttgcattggcgtttaacggcataaaaaataaatgaaatacagtcaccttttttaaattacactgactttggcattttgttgctgcctctgctgctgcggttggcactgcaattgcgtcgtgccgccgcccgctccgcttaacgcatgccgacgcgcactcgtctcggcaaattttcggcagcggaaggaactcgcggcggaccctccggcgaatgtcggaaagccgtgaagagaaaccaaagcacgttgctgaaggaaggagcattaaataatgaataaattaattggttttattaatttttgttaggggaggggcaagaacataaatttcggttttatatttgataaaatcgatcaattaatcaattaaataaaaaatatgggcggcgactcattgatataattgattgattttttttataaccgcataattattttatacaaaatattgtggtgccagaaggaggaagcggagtgtgggagaaagtgggataaaggatatgggagaagccataaaagagtcgcccgtagttcagtcggttcgagcgttccatggatggaaaaaccgttggttcgagtcacaccgggagagttatcctttactttctaattatgcttttgcctgcaaattatgggacaacaaatgaacggccgtgtcaagtggcgtcagtgatgcgattgtcgtgcattggtcaccgccgccagcagtttgggccagcgaacttttcttggaccaatcgccaccaactccagacaatttgcagcgcttaaaggcggaaatatttttttgaatttattattttattcgaaaaaaaattggtagtggtatcaaggcgaggagagggggggggggggg

SEQ ID NO: 45377 - DNA, 886 bp, Heterodera glycines
agttttcttgataaaatagccaattttttcagaaatttagaaatttccctcttttccccttcgctctgaccacccccctttttcatttatggccagcaggagtcctgctaaaacagcagaggacttcattcagtctctgtcttgtcctgctggtccatctaggaaacactgctggcccgggttttttcaaaatttcgctctctactctttcaaaaaaagtgttgatacattgaattgcatttaatttaggccgatgtctccgccagatcaaagcgacgaaaaagtgttctcgactcccgggcccagtgatcagcagaagaaggagtgatcattttgggaaatgaccgataatttgcgttatgattagaattggatgatgttttgtttgggatgaatcattatttgagaaacgactgttttttttttgtgttatgctgaatgggaaaagattttttgaaagtctcgagcttttcggactctggttaagtctagggaaattttcaatctcgagtataaaaataattaacaccgcctacggtcagcagaaatttgttgtgccatggcatttattgaattgtgctgctatgtaacgaaattcgggaaaattattagcaattttatcaacgattatttactcacaatgaatttcacatatatcaggggtggagcgcgcacagaaaaatcctgcgcatcgcgcattcaaattgccgcgaccgcgcaaaaaaaaatgccgcgaatcgcggtcgcgcattttttcctattttttaaagcattttttacacttttaatttttttgaaaaaaaatttgaaaatttgactggactttgttacgaaaattgcatatattcaaaaatgtacccattaaattttttaatttttgtttggg

SEQ ID NO: 45378 - DNA, 1123 bp, Heterodera glycines
cattccagacggcgtttccatttgtgtttaaacgattttcaaatgtgaatcaagtaattccactgcaaaatgtgcctccattacccactacacaatgttaagtgatgtcatccagataatatgactcatcggtatcaatcaaccggccattaattggcgcttaattgatgttgcgtttccttgtctattatttgccattaaatctcacaaattctcgctaattttttgatcattttattaaatgaaaatgagtaatttcatttcaggtgatttgtcggcattattcaaaatgttttcattgccatcattcccattatatataattaaactagcgggtgcgtgaaccgtcggctatttagctggggaaaagcgcttcgcgctttgggagcttcgctacctaggctgtgaagcgatttaaattgatcgaattggttggggaggtttttttgaatttttaaaaaattattaggggtttttagtccacatcgaggctcaagaacgggcgcttcgcgcccgttttttaaatttgttgaactcatacgggcgcttcgcgaccgtcgtttcggctgctgttggccgtggactctcggggccatggcatattcacgaatgcaaaaatagaaacggtcaccgcattaaaaatagattaagaatgactttggaaagggcggctcaattgccacgttcctggaaatcatggcacattcttttgaaattaggggatgggagagaactaaaacatccgtatttggtgtcacaggcagatgactatgctagagaagagaacacgctaatgtccacggacgcccttgacatgtatcaaggatcgtcagaattaagtatagatttgtcgacgcttaaaaatgaattgagagagaactaaactcaaaaattttccccgttaaaattctttgaagcaattctcatcacaaaattttgtgaaaatcaccagaaaaattctcaaaatatttattgacatttttttctaaaagtttttagtgtgaaacttctgctacgcaatatcagaaagatagtgcgcagggggggaggggaacgagctgttttccctcctggcacctgtgcgagactattgcgcaaccagtgcacaacaaaagggatacca

SEQ ID NO: 45379 - DNA, 1140 bp, Heterodera glycines
  unsure (1)..(1140): unsure at all n locations
aaacaaaaaaatctattttttcaagtgtccgtttggggtactcaaacatgtatggggagcaaaaatccaacgcagaattaaagtacagactatagggaagctattcccgaaggattcggtctccccataaatctgggcgcatcggttcggggggactgcnccgaaaacaaaaataaatcgattttttcaagtgtccgtttggggtactcaaacaattatggggagcaaaaatccaacgcagaattaaagtacaggctatagggaagctactcccgaaggattcggtctccccataaatctgggcgcatcggttcggggggactgccccgaaaacaaaaaaatcgattttttcaagtgtccgtttggggtactcaaacaattatggggagcaaaaatccaacgcagaattaaagtacaggctatagggaagctattcccgaaggattcggtctccccataaatctgggcgcatcggttcggggggactgccccgaaaacaaaaaaaatcgattttttcaagtgtccgtttggggtactcaaacaattatggggagcaaaaatccaacgcagaattaaagtacaggctatagggaagctactcccgaaggattcggtctccccataaatctgggcgcatcggttcggggggactgccccgaaaacaaaaaaatcgattttttcaagtgtccgtttggggtactcaaacaattatggggagcaaaaatccaacgcagaattaaagtacaggctatagggaagctattccggaaggattcggtctccccataaatctgggcgcatcggttcggggggactgccccgaaaacaaaaaaatcgattttttcaagtgtccgtttggggtactcaaacaattatcgggagcaaaaatccaacgcagaattaaagtacaggctatagggaagctattccggaaggattcggtctccccataaatctgggcgcatcggttcggggggactgccccgaaaacaaaaaaatcgattttttcaagtgtccgtttggggtactcaaacaattatggggagcaaaaatccacgcagaattaagtacaggctataggggagctactcccgagggattcggtctccccataaaatctggcgcatcggttcgggggga

SEQ ID NO: 45380 - DNA, 1524 bp, Heterodera glycines
ccgtcagcggacgggggcatttggtgttgccaacgctagcccaacaggacagcaggtaggtggtgaataggaatcacttgggtaatgatccagcagcaggttcacctacagctaccttgttacgacttttgcccggttcaagccactgcgattaaatcggttccagtctgcataccgaccgaagccggaacactaaccgtccccgaatttctcgaaatggctcagtcccgggcagcgacgggcggtgtgtacaaagggcagggacgtattcagagcgagttgatgactcgcccctacaaggaattcctcgttcacggacaataattgcaatgtccgatcccaatcacggcaaattttcaccggtttaccaacccctttcggggaaggacaagcacgctgattttgccagtgtagcgcgcgtgcagccccggacatctaagggcatcacagacctgttattgctcaatttcgtgcggctgaacaccgaaaatccctctaagaagttgtgcccacagaagcaatgagccaactatttagtaggctagagtctcgctcgttatcggaataaaccagacaaatcgctccacgaactaagaacggccatgcaccaccatccaccgaatcatgaaaaagctatcaatctgtcaatccttacggtgtccgggccgggtgagtttccccgtgttgagtcaaattaagccgcaggctccactcctggtggtgcccttccgtcaattcctttaagtttcagctttgcaaccatacttccccccggaaccggaagactttcgtttccgggaagctccccaccagggcgaataaatccgccggcggatcgctagttggcatcgtttacggtcagaactagggcggtatctgatcgccttcgaacctctgactttcgttcttgattaatgaagacattcttgccaaatgctttcgctgtagtccgtcttgctacggtccaagaatttcacctctcacgtagcaatacgaatggccccgtttgtctctgttaaccattatctcggtcagcaaaaccaataaaatcggaccgaaatcctcttctattattccatgcacgaacattcaagcgaaacgcctgtttgaagcactctgatttgttcaaagtaaactcgccagcccaccgacgccgaccggtaaaggccaacgccggggaaagaccggcagaaaagccaaccaaaccagtaacacacaaagtgtgcaccggacggctagcacagatccaactacgagctttttaaccgcagcaataattctatgcattttgagagctggaattaccgcggctgctggcaccagacttgccctctcatagatactcgttaaagggtttaaattgtacccattccgatgaccggcctcataagagatcggtctcgttatttctcgtcactacctcctcgcgttgagagtgggtaatttgcgcgcctgctgccatccttagacgtagtggccatttatgaggccccttctccggagtcgaacccttatcctccgtta

SEQ ID NO: 45381 - DNA, 778 bp, Heterodera glycines
ttttcaaatgtatttaattttttaaaatcaaaaattattactaggggttataaaaaagggaaatcagcgatacggctgcaaacactgcaatttcaagcatgatcgccctcagtctgtcgctgctcacggtgcgcgagagcacggcgatgagacggcatgcgtggatttgctgtacaactttgagagtcaattgttggcgatgtccaaggattgctttggcgtagagcgcttattcgaaaaagaaatccgtcgccgcaacagattggtgagtgtacttgcacattttttaccaaaattacattcccaatttaaggagcgttttgcccgttcagctgcgaattcaagttcctccttcggaggacgcattggaagcgacgaaaatttgcagaacccaaacaaagaagggcagcacaaattggcacaacagcagcagctgacaatgaaaatttcgcatccgaaaatgttgacgaaaaatgaaaacgccgaggacagagaatggacgccaagggaagaggctaagaaacggcgtagcgaaggcggataccgcttctttggcgtaaggtgagtggaacaaatggaaatgccgaaaataattacgaatgcaattgacatgtctaatcatcatgaaaatttcgttgtttcagaaaaccaatggcacagaaggcgcgtgacgaaatgatcaaactgcgagaggtcagcaagagacttggaggagcccaatacttcagaaaacgcggcaacgaatcgactttttgcgaggcgagtcttattttaatgg

SEQ ID NO: 45382 - DNA, 881 bp, Heterodera glycines
gagaagctttttgagcgtaattacgatttttactttacccatttttttgctaggcttagatcacatgcgattttcggcactctgataattttagcgttcataatgggatgtataaaggcgattgtagaaggaattggatgcgctaaaattgtttgagaagctttttgagcgtaattacgatttttacttacaccatttttttctaggcgtagatcacatgcgattttcggcactctgataattttagcgctcataatgggatgtataaaggcgattgtagaaggaattggaagcgctaaaattgtttgagaagctttttgagcgtaattacgatttttacttagaccattttttctaggcttagatcacatgcgattttcggcactctgataattttagcgttcataatgggatgtataaaggcgattgtagaaggaattggatgcgctaaaattggttgagaagctttttgagcgtagttacgatttttacttacaccatttttttctaggcgtagatcacacgcgattttcggcactctgataattttagcgttcataatgggatgtataaaggcgattgtagaaggaattggaagcgctaaaattgtttgaggagctttttgagcgtaattacgatttttacttacaccattttttgctaggcttagatcacatgcgattttcggcactctgataattttagcgctcataatgggatgtataaaggcgattgtagaaggaattggaagcgctaaaattgtttgagaagctttttgagcgtaattacgatttttacttaggccattttttctaggcttagatcacatgcgattttctggaagatgataattttagcgctcataatgggatgtataaagg

SEQ ID NO: 45383 - DNA, 1517 bp, Heterodera glycines
ttggctgtggacgaggatttggttgccctggaggcaaatttcaaatcatcatcgccaaagaaaaaactcttcaattgccgcgtcagtatttttggcaattgaagttggcgggtctggcaggctaaaatgcacacagcttaagttaaagcagctgtgcagccgccaatcaatgtcggctagggcttcaagctctgctactttatgctgtgccagagtaataatgccttgcggattgtacatttggtcgttgtacttgttccacaattctatggcattactcggctggccatagaccaggatgctcacaaagagccatctcatctgatctggccagcgcgacagagctgcctccgccagagttttgtcccaaattttgtcgtcttcaagaagaccatgcattattgcagcctcagtgaatgaggtacaaagcaacccattaaccatcttaagatggtctgggtctccaggaaagtgacgcataagtgaatagagcgcgaacctttccgggtccgatgggggtacaggaacaattcgaccgattggtggtctctttgttaggttatatttccttttgttccatttgtcctttgcccatataaaatgctcagggactttttcaaaaagcatgtccttgagcttcggatcatgcttccattcattttgccattgtttccaataggcagaacattgcgtctctggcagttcgccttgctggatttgttgagctttgctcaccagctgaaaagccctgtacacaatcggttgttgattaggcatatggatgctaagtttgacaacctgatgtgaaagtttggcaaatggcagtgaatggacaatggcatatgcttccgttgcaccacggaagttcatcttggcatattgagccggctcatcaattccgattttattgccggactcttgtttgcactcgacataacaatgccctggccctttgaaagggtacttgagtgcgtatttaatatttgctttgttaccatatgcaaacagtacattatggtgtactcggtaacgtagcagaatataaggattatacggcacgacatgtgagttgtcgtatattaggccgtttacctctaattgggcaccaccatcagttggtgaaggccggaaatacatcgcgggcctgtccgggcgcaaaatcgtacattttgagtaaggggctgggaaccccttcttgcaccgcccgtaaattgggtcgctaggaccacaccaactgtcactgcatctgtgcagttgcatatgcattgtttcgcggatttcgcgatgcatttttgcaatgggcgtgtcgtcatctttatcaggcaaagatggaatgtgcgcccatatgtattcctgaatgacatatggaactgcgtccaggtctgtttgcgccacaatgtgggcatgtgggcctcctcggccttggaactccatggattcaccgtaaccaaggattgttccaaagaactttttctaaaaaagttcttctcggaactcagcgattttgctggtccaaa

SEQ ID NO: 45384 - DNA, 1633 bp, Heterodera glycines
aatgttagcataaatgtgtgcaagagacaacgattagagagacagatgagaagagagtcatgatatgggcaattttaatgaattttcacttgaattcaactcaagacttttaaattttcatccttttatttatattttataagttcaattttttcgttaggatattgctaaatttaggccaaaactgttgaataataatcttttgaagttttctcggccgacatggtgtttaaaatttgttaagtttatatgtgttggcgaagtgtttaataaaagcaacagacaaatgagattcagtgccggcattcatttttagttattttgttcacaattaatatttgtagctcataaataaggatcattcgttaaaataattgttttttatgtcataacaatcgaatctgatggacagaatagcgcttagggtattgttttgcataatgtggtgagaatctcggccgacaaggtgtttaaaatagtgccgttatatggcttttagcgaaatgtattttaaaattaaataatataattaagtctcagtaccaagccaattattttgttttagctaattgtccttatttttatttaatttatatttgtaggaactaaaatttatgttattcgcttttgatttaattattacttgctaaatgaggatgaaaaaactatttaaaccatcagttcggctttttctcggccgacatggtgtttgaattagcgcgttattgatattattaatttatggctaaatgtatttaaaagtgatttcaaaaaaacagatgttttgattagtaatatgaaaagtgtgaaattattgtttattaagctaattaagatttaataaggttatttcttctatatttctaatgattattcgtacaaatttcactaatttaatttgtctaattttaaagcttttagataacacattttttttaaattgctttaaatctggagatgagccgacgacctcaacatttcgtccgtcgaaattgcgggcaatttgctgaaatttaccaaaacaggtttaatttcattttcatcattcatttttagggggagaaaaaaaaattattaattcatcaactctctttttttttaaatttgtttccagccctcaggcttgggtttggatttaaagatttaggatagatggggaaaaaaaatttttgaaattagtggttgcctaatgctaaaataaaaaaaaatgtggttgaagttgattaaactaattcccattccccttttagtatggcaaaaatgtttgatttgtcgctggacaattggaccttggcaacaaagagatcaagcgcagtggacattcagttcggcgcttgacgttttgaacccggaacagcaggtggtcaagcagtactaagcgtcaacgacaagaggtaccagtgataggcagccgtttttttttttttaaattttttgttgtcggtcaacgcatagagagcggttggtcgttagcgaacctatttctaatattttcttttgcttttgctttccaagcaacaaaaaaaaaacatcaaaaactaaattgtgagaagaagcagggaaaggaaaaaaaattttgtcatcaagttttgagggtttttattttttgtaaaaccaaaagtcactaagcaaa

SEQ ID NO: 45385 - DNA, 1093 bp, Heterodera glycines
cgtcgccggacaaaacgtcgccgcaaaaaaaaaaaataaaaattttctagatttcaagaaaacttaaaagtattttagctttttgaaaatctaagtgttaataaaaactaaatttgctgaatttccggaaaaacccccaaaaaacttgaaaattttttaaaaatttccttgaattttcttgatagaattttttttgtttagatttttctagaatttttttcgtattaagctagctaactaaatttatgacaatttttctagatttttttctaaaattagaaaaaaattttgcggcgacgttatgtcccggcgcgtttcgggccggcgacgttttgtcctgctccctccaaaattgaagttttggcttgagtatgaattgcaaaattgttattttttggcgctaaatcgttaataattcctgctttttcatccctgtgcggaaaattttttttcaaaacaacactggagaaaaaaaatttttggcacgatgagcaaacaataagagctcttcggatgccctaccgaaacttttttctgatacgggcctgggcctcgttggggaaaaacgcagtgtaaacaccatttctcctcccctcccccgttgtttctttgtttctcctttcaagatctttaacaaaaaccttgaaattttaacgaaaacgttgaacagttgttctttaaaaaatttcttgatgagaccaaaaattgttggatttcatccagaaatgcaccaagccgatcacattgtacaacaaatccacgtggcgacacccccaccgcatggtcatcaacggtcttcagtggttcctcaccaaaaagggcttggctgcgacaagtcatctcgagtctggcggctttgcccggtccagcacagaagtgagcctaagtttttatggtcatggtcttagagtccattttgtttgactttactcaatttttttttggcttattttcaagttgttgtgtctgtgtttgagtcacttccaccaatcccttccccacattcccatttcggattgatcaccccgacttgcaattccatttccttccgtcgacggttcacgaggacggcaggcaaagtccgaattgccat

SEQ ID NO: 45386 - DNA, 495 bp, Heterodera glycines
tgttgcacagtttgcaggattattaaagccatgctcttccctttattcatctgctgctgcccctgcttttcctttccctccctcttcattcatccatttattcatttgttctcccatttttccatttgtccccccccccaattctttttcccctcatttttcctctttcgtttcctttgtttatttttgccccttaaatcccttagaagccattctttcattcattcactcattctttcattgtgccaaatgttttctgtcatttcgttttgttcgtcctttggccaatccgttcggccaacacttttttttttaaattatttttttttccaaaatttcaaacaaatccattcattttgttcttcgttcgtttgatcattttttgcttttcaattttctccaccgttcgtttccctcccttcgcccccccccattttccccctttcgtcccccttttatccctcctttatccgccctttcgtccttttgtccccc

SEQ ID NO: 45387 - DNA, 1307 bp, Heterodera glycines
  unsure (1)..(1307): unsure at all n locations
aattgttgcgcataatgcatttttgacgggagttttttgaaatcattaattttttggnttaaaatagttttttcaaatgtttggctaattgttgagctgtcgttttgttgatgtactcattcaatggcacagtgtcaggctaaaaagcgtggaatttcaagttaaaagtgaaaactcgaaaattttcaatttaaatttaaaaaattattttacaattcaattatttgattgattatttttctaatttattttatatacaattattattatttttttaatagataaaaaattctttgtagtgacggatttatgaaagccccatgttggcggatttataaaacgacccagcacgggttaatccaacctcatccatatcaaatttaacattaattcaatgtttaaaattaaactaaaatttatatattaagatttaaaaaatgatttttttttaacactaattatataaatgcaattttttttacatttgtcactgatcactgatttaattaagactatgtatgagtgggctgctgatgaaaataatacaagcgattaaaaatgccaattttaaatatattaaaaaagaaaaattccggtcctatccaactcaactcacttttgtggatgaagaatgccagaattggtcatcccccacaaagtgccattctcgaatgtgaaacattcgtccgctgtttgtcggcacttcccgaaacacggcaaatggctttataatgtacggcaaatgcacccaaagtgattcggtgagcgaagtgttcaccaccgacttttgcaggagtggaatttttggtgaaacatttgccgacattaatgtgttgagcaacgaaaaatttgccggatttgttgcttaaaattttaaatttataaaagatttcattttttgcattttcaaaagggcagggctcacatataaaattcttaggaccctaattcataaaattgtctatttttggtataaaatatattgataaattgcataaaattctcaaaatttgctctttggcatttttcggcacgaaattcccattaatttttttttaatttggtctaaaaaggccagcaaaatcgtttttctcgtttccgaaattttttttttaccgggctctaatttttaggtaaaatctgttaatcgaataagcaacttgttgtgatttccgtgtgcaaccgattgtacacaaatgccactgcttttgggtcattaagtcgtaaaaattcgtcataatatgtgccatcgtcgggcaccaaaatgtcgtcaaaatcgccaacaatcanaaaatcggctgcatact

SEQ ID NO: 45388 - DNA, 1340 bp, Heterodera glycines
cgatgttgaggaggaagcgccgcacgacaagtgagcattttttggaagaagaagggatggtttaaaactggtgaccctcaattattacagattgctttattccttcgtggcctgctgcggcgattttggtctatttggtaagtgctcattgacatagacaagcggaggagggaggttcaaaagtaccagggatgggaagttcttcgctgactaatagcataaaaaataaatgaatgatttctatatttagctagcaaagtgttattcatttgacacgtactacaggcggaatgcaaagcgatgggagcggaatggaaagtgtgaatgtaggactggaaaggcgagcaaagagctccgtctcttacatgttgcgtcggcgttacgccgatatgttcttctgatcgggatgaccttgcaaacgggaccgggccgggacttcccggtcatccgagctcccggtcccggttcccggtcccgggttttgaaaagctcaggtcccggtcccggtcccggtagggcaaccgggaaaaacaagcactggtaagaatggggtctgagtgaaaaattagtgaagaaaattggagtcaaagggaaaaataaaaaataataattaatatattctttaaaagtaagactgcccaagtgtgcaaatggcttaatggctagtctccttgactttcccttcttctttcccctggttcaatccctctacagaaattagattaattcaatttttttttttgtatactcgtgggtttcctataaagaaaatatgattcctcatagtttttttttaaatttatacatattttatcattttttaaatgaaaatcctaccaattgagcttaataatcgcaaaaaccaaccttttttttgttgaaaatctgttaacaaattgcacccaaatttttaaaatttcccccggcggcgcctatcggcaccgccggaccccttctttcccaaaagttttttgaaaaagcgctccgaaaaaaagtgatgtgaaaatcaaatctgaatttctattaatattcgatgatttagtccaaaaatgattaattgtttgaaataattgaagaaaatttgtttgaaaattttcattaatttaatttattataaaaaaccaaataattttgtattattttcacttgatataaattaaaatttgaattttttttttatttttaaaatttttttgaatttttaaaatttcccggttggtcccggttcccggtttttcttgcggtcccggtcccggtcccgaaaaaaaatcgaggtcccggcttctcaggtcccggcaagtaccggtcccggtttggcaaaaattcccggtcccgtggca

SEQ ID NO: 45389 - DNA, 719 bp, Heterodera glycines
tatcattgtatcaattaggtactgttgtccgactcgactttcattaattagtgtattgaaatacgacacacaaacagaattttggaaatcggcatacattttctgaaatcggaatcaaatttttgctcggccttttgtagtctgtgttactataccgtatacacatatataattatatcaataaatattaaattttaatgaactgcctaattgctcattttttattaatataaaacaattacatatatacggaatagaagagagattgagagagtgcaagaggctagtgacaaacacaaattcatataaacaaaaaccactaaactaaaacaatgcaactttcttgtctctctctctctctctatatatctctctctctctcggcctctatacaaattccaaaatggcttttcttcccccgagggggcggggggtcataaaataatatgtacatatataacccattaataatgctaacaaaaaaggggatttatcgatttttcctccgctcattctcttaccacctcaaatttcaattgatctctctgctgcttctctctgctacttgtggtggttgctgcttctgctgctgttttttttcgggacaaacatttaaaaaggcaaatgagctggtggttggtgcagctttcattttccgcaaaaaaaaaaatttgtttgtgaaaaatgtttttaaatttttcacatgctcatctcttttt

SEQ ID NO: 45390 - DNA, 961 bp, Heterodera glycines
tagcattattatggtgccacatggtggtgcattttattcccctgattcgtttctcctctcccaaacctccatttaattctaaattccaattgttcatataaattactcctaccaaatctcagctcagctcttggggctgggtaattaggcctaaatccaaggcaaattttctcattaattgattaccattactatcaatcactaaacacttttggtatctcttataaattatgtctttttttatttaagtataccgaaaagtcgccgcgagaagtgtctatgaaaaagggcgacgtgctgacgctgctgaacgcgtccaacaaggactggtggaaggtggaggtcagcgaccgccagggcttcgtcccggccgcctatgtgaagcggattgagcccggctcacagcaccaccatcaggtgggaaagccgacatagctaaaataaaaaatcctaatcttaacggacaaccccgtttttggaattttatgagcaatttaatgagagaaattcccaaaattttcaaaaaataaccccttgcaaatgaatcaattataaaaataatttattttttttttaaaactatttcaataaaattaaaatgattcaaacacacaatcgatcagtggacctgtgattttcgagaatcttgaagccaacataatttcgatctcacttctcggccaaattttccataacaaagctgctttatttgtcaggcgttggccggccaaccgatgaacaccatcaatgccaagcagagtcagattgaggaccaatacaagcgcctgttgatgctgggcgagcagcgcaagcgcaagttggaggaggcgtgcaaggcctaccaggtgagtaaaacgacggttagatcattttttaaacaaaatgtttgtcaaaatcttgctcaaagcaatataattttaattttccacctgttttaagtgtgcgcgaagcaaacgatttg

SEQ ID NO: 45391 - DNA, 1552 bp, Heterodera glycines
caccatagggttggcattctggttggaatgccaaaacatttttgccccctccgctgccgccaatggaaaagccctggccgaagccgggcggcagttggtactcatttgtctgcggagggccggacaaaaattgctccaccgcctttccgatttgttggagttggtcaggggcttcggttgctgcgggcggagctttcggagcagaaatctttgggaggcaaatgcataacaattgaaggcgaatgccaacttcgtaagtcttttctgggaaaaagccgccgggacgaggggcgatcaaagtgtcaatcaattcccgagcgtgtccgtccaattcgaagtactttgcctgagggaaacttgggctatcatcagcagcaccgtaagcaatggccaaccaattcaggtggtacggtaggtttcggtgcgtaattttgcccgttgagaagggaggcgtcaagttgggcaagaacagagaagcgcggcgaaagatggaatatggagagaaagaggacaaagacggatgaaagccacattaaagagggggctaaatgaaaatggaaaagaaaatttgaaaaatgaaagggggaggggggggggagcttagaatggaaccggtcaattggagacagaccaatgagaaagaccaaatgcatatgtaagtgagtggacagcggaaggggagaggaggagggatcggatcggatgtgctgttccatgtagtcggtgatggtcgccagccactctcactcactttaagagaggaaaacggcggaagggaaaggaaaatgcgcctgccgaagggatgcagcagcgaatcgaccgtccgtccgtcaagagaatttggaagcggacagcgacgcccgagggcggaaatccaagtgaaaatgggaaggatggattggagaaacgaaatcgaggaaaaagcgagaggagggcgaggggtgtcagcaaatcccccttccccttccgtggcgattcgatttcggcggatgccatcgctcggcttcgcttcccttttcatccgtccgtttgcttttggaatgctttttgttcgtgtgattgtataagcgataaaaagacaattggtgggggggggggtgaatggatgaatgacccaatataagtgcccatcgtcagtgatgaccccaatgtgttgggtgtctcttgcggaaagtgactctcccttttccctccctttcagcgcttttcgtttcgcttttacgtggaataaaaaacggaaaaatatttcagctgtggaattcgagaataaagctataatcagtgaaaagaattacaaaaaaagatttgtttttacacaattaaaaagtgggagatcattttagaaaggaaattaaattgtcgacgatcggaaagactaacaataagaaatatggagagagagaaaagaaaaggcagtttcattcatttaattcgttgtgctgctcgaaagtgtgccatttcccgacagaaaacatcttcattaatgggcaacattttatggttttagccaaatgctttcatcaatacacaaaaaagaatttgtattttttga

SEQ ID NO: 45392 - DNA, 702 bp, Heterodera glycines
tttgacctcacgtgtgcggaaatgaggaaaatgatcagcggaaacaaaaaaatgttggaaaaaatccattccggtgacaaatataagccatttgaataaatgttaatcattttcattgcataagataaaaattttaaatgttcttggatttcatgagttttccccattatgcccttgcaaatcggcataccagtccttggaagccgactttggacgatacgagccctgaaatatctacataaaaattgcgataattttttaaagtttatttgaacagtttaaattttacggagagagataatgtaaaaatgagagactgctgacaaatgagtttcagtcccagtcatacaaaatatttttgatgaaggagggtagagaaaataatttcaatagagagtgctatgggaagagaattctcttcccttcttcgctgaatcttttggtaggagacgcagattcatcattatgttctctgttctctctctgtcttaatctctttccttaatactctcttttaaattaattcttctttattcttcttcatcaaaaattcttttgtatgactggggctgtattaaacagtctcacttttgcgttatctctctccccattatattttccgccaaaagtcattttttaaaaaatgactgttcattttaaaaatttatcgaaattttaaaaatagcgttgacaagcgattta

SEQ ID NO: 45393 - DNA, 612 bp, Heterodera glycines
ctcatataattatggtttactaattacacgcacttactaattaccccccccccccctccctctcccattaaattcatcataaaatgctttgtttcattcttcgcccgtttacccttccgctgtgcgcccgtttcagcttccggatgccaatgcgtacttcaccgttcgccgcttcaacagttgcgtcgtgtaccttcttgtcgtttagtgtcagtgtcaaattcggctgcgggtgtccgagaagtgtggcgaagacagaaaactcttcgccgccaattttgaccagcttttcgtccgtgtagcgtcggagcttcaaaagttcaaaggttttgtatatttgggccaaagcattgtgcccccccacctgtattttaggcgcaacttcgaacttgagcttggccgacggactgcgttctccgctggcctgaaaagtttttcccattttttcaggcgcatttttcgccatttgcggatgaccaatgcgacgcgtgaatctccgacatcgatctctgcaaaaatggatatctccagtgtagcgcgcaggtcaactgcatacgcaaaacacttcttctacatgaatcccactccattgcggaatcaagtggaccgctc

SEQ ID NO: 45394 - DNA, 1514 bp, Heterodera glycines
  unsure (1)..(1514): unsure at all n locations
tttttggcaaattttccccaagaaaaaagcaaaaaaaaggggaaaaaaacccccccttaaggttcgatctttttggaaattaaaaaaatacaccactaaaaaagagatttttcaaaatttcggaaaatattntagttattttgtccagttccgaaaattttcgcttaaacagaatgaggttattacaaaaattttgggttgtatttgatttgcaattgtgaagctagatttaataaaaaattggcattttttaaatgttaaatccattttttggcagtttatagcgtatttttaagtctgttttagcaaatattgaatataaatacatttttcggaattttttaaggtttaaaagatatattttggcagtttttagtccatattttggtacatatttggccattttttagatttttagtccatatttcgggcttttttagtccatattttatgtccatatttgacgttttttagtccatataatttataactctagtaataagtagggatgatatttttatgtgctaaaaactgccaacatgggtaggttttaggttctaaaaatgtgaaaataggtgccaaaaagtcccgaatttagggggtgtaaaatcgaaaattttctttaaaaagcaaaaatattatgccaaatcattaatgagatatataatcttaaaaaaaaattctcgtcaaaataaataaattttcgagatgattttttgagaaatttttaatttcttaggatgtattttataaaaattaaggtcgattcttagtggtgtattttttttaattttaggtcgattttagggttgtatttttcgtttttattgcatttttttgataatattttgcgcaaaacgccagaatagaatcaaataggttttacaaaattttttttggtttttaggctctaaaaataaaaatctagaaaataaatgccaataacttgaaaatagcgtaacaacaaccaaaaaaacttgtttttcgtgcgtttcaaaccatagaagctcagaaaaaaaaacagttaaaaacctaaaaatatcatccctagtaataaattggctttcggctctaaaaacccaaaataggcactaaaacctcaaatttagtagtgtaaaataacaaatttatgaaaaataaaacaaaataagccaaaccagtattgaacataattttttaaaatcaaaaatttgtcaagaaaataaataaataaaatttgtagacgaatttttgagaaactttttaggagtgtatattttaagaacagcggttgatttcgacactgagtgatttcaaccgtgtgatttcgacaatgattaaaaaattttcagtaaaattttctaagattttaagcaattttcttaataaaattgcattaaaatactcaaaaattttcccggcggcgcctattggcaccgccggaccctcattttaccatatttttgaataatggaggccaaaatggcaaaaaatattattttttggcgaaaacggcgaaaattttgtaaaataca

SEQ ID NO: 45395 - DNA, 1303 bp, Heterodera glycines
  unsure (1)..(1303): unsure at all n locations
tccaaattggaaaatcttggtatcattcgaaagctctcgatgaggagaagctttttctaagcaaatgctaaacaattggatgcattaaaaaagttataggagttcgaaattttattttaaattttagaccaaaataaaagtgattgttttctttaaaaaagcgattgaacaattctatatttttttctctatcgatatacaaaagttaaagaaaatctgcctgaggaaaaaaaaggtatgctgttcgaagtaaatgttgtttttcgaaataatgaaaatattatatagtacgccaaaaggagagaaaagttagagaaaaaaagttctctgcactctctctttattgacacatgtctcgatttttgactcggggtgggtttgggcattttttccgtcgtcactttcatttcttttaatgctttgtgtcctcaatgattgccaccgcttcgatttcgactcgtccgttcttcggcagtgctgccacctgataagtgctccgtgcagggaaagtgtccccgctgaaaaaggatttgtacacgccgttgaccgtttggaagtcgtcgatgttggccagcaaaatggtgactttgaccactgaatcgggtgtgcctttctcttggcttctaaaagtgccaaccgttgccaaatgatgtgccggcagcgcttagaatggcacccaaattggtcatcgcctgtcgcgcttcgttttcgacccctcccgccaccaattcggacttccccggcacaagcccaagttggccactcacatacaatgtgttgtgggcgagcacggcttgactgagcaaacaaaacaacaaaggccacgccctcccctcccccatttggccaacctgtaaggcccaatcgccgcgggcgcatttggcgtcgaaattgaacgaatattggacataataacgaattgcttatttgggagtggaataatagaaaatgttgtacaaattatgagccaatagagaaacgtcgagaagttattaccgttttaaaaacatttttaggtaatttttctttccaattaacttttcaatgaatttttttaaatcaatttaaattttatttatctgatggcccaatttttatcaatcgaatgctttgctatttgtgtgttaataaacgagcaatacaatgataagtaataaaatacatttgttttaacaatgcaaacgttacaaaatgatttaggataattaattgatagaggcgataacataagtgctaatagttaatagtgtctttctcccagagccanaattctccnttacttttgttaggccaanggaaaaaa

SEQ ID NO: 45396 - DNA, 853 bp, Heterodera glycines
acggtactttcgggttttgtgtcaacaaaatttttctctttgttaaattgattttaaattaataaaaagtcgtttctatgggttttcggggtcgtagaacccgaatatgatgtccgtttcgacccatttcgaactccgaacccggagttcgaacaattatcaaaattcaatttttttttcattttttctcctaattattgtatcatcgagagaactcacatcatattgccgttgccggtcggtgtgggcactatgtttggttcatggagggtaatgctgcataatgggcagtattgctcgccgacaaatacgacgctgaatggagcattcggacggatgatgtcgacgcggaaatgggcaaaacgctggcttttgactctgagcgcagtacgcatccaatcgaggcaatttctataaattgatattatattgtaaatagagaatatttagggtcctattgataacccagatgaacttggagaaatttacgattcgatctcgtacgcaaaatcaaattcaatcattcggatgcgcttcaatcatttgggcgaagcgatttccaaaaggccattcgggattacttgaaaaagcaccaatacggaaatgcagagaccaacgacctgtggaagagtttgtccgacgcttctgggattgtgagtttaaacaataaattcaatgtcgaagcaaagaatttccgcacattaaatatatttgcaaactttattttcaagaaacaaaaacactaggaaaggaaaatggttttaccttttgggttaaggatgtcaaagcactgatgtcaaggcgcttcgcacacgacggaggaggaagggaaaatttcctccgccaacttcgg

SEQ ID NO: 45397 - DNA, 1444 bp, Heterodera glycines
  unsure (1)..(1444): unsure at all n locations
aaaaaataaagaatttttaaaaattcccaaaaattatgaaacttaaaatagaccatcatatcggtactcagcaccctatttttacccccagaaaaatattttttcacccccatttttcgtcgaaaaaaaaattncngaaaatttctagggggcctagctcgaaaaatttttgaaaattttacatcatgtagtacaccgttcgatagagcttaaaaagctctacaattttgctctaaggcattttttggctaaaaccgacnccctgacgagttatgggcccgggactcaaatgtcccgcttaggccaaaaattttttctatttccggaaaaaaatcgaaattttttcaaaaaaaataccattcgatagagctcgaaaaactatgttttggaagtggtcttcgttttcccgggaaaattcgttaaaaaatcataaaattcaaaaacccgaaaaccgttttttaggcctaacttgaaaaattttgaaaattttcgaaattttaaaacttggttggatagcctttcaaatactacacatttttgctcagaaacaatttttcggtcaaagcaacccctggcgagttattcgcctggtactgaagtgtacattttgagcacacttcagttagccaagcgtgcaggccagggggtggctctaataaaaaaataaaaaataccagcatgtagaggacagttgtggggagtgccctcacagcgggcactttttgattcgggttttagaaaaaaagttaggggccctaaactgcaagaaaaagtgagaaatcggtccccgggactcagtcgtccgcgctgaatttttctctatagttttcccggatgcgcctcaaaaagttgtaagacccttccactactttcagggcgctcccggccttcggccgggagattttgtttttgcaaacgaaactccttgtcaatataacatatatagtaataaaatatcatttcgcaatttgcctgcgttaaattgatgccaatttagcgagggaaaaatgaggtggcaaaagcgggagagaactgttatttacgcaaaaaccaaaacaaattgggattttcacacaaaaaatgtgtgtagaagcatacagaaatgcataaaaaactgtcgcaaattgtgagggcttgtttcattgatttttttttttgaaaaacctttgaaaatcgtaaaattacataaatctcaaaaattccatggatacaatttatttttactcagaaaaaaacttaattaaaagatcatggctttttatgtcagtattatttgtacacaaaaatttgacaaaactccaaaaattgcgcaaaatttacggcgaaatcgattcatcaaaaatatatttttttgaaaatcttaaaaatccaaaaacttacactaataaattcaaaaaaataacaaaattacttatatttttattctaatttgtattttaattta

SEQ ID NO: 45398 - DNA, 927 bp, Heterodera glycines
cccttttgaaaaattttttcacttttttcatatattttttttataaatgattttttttcatgcaattttagcaaatggttaaagtttcaagatattccattaatccgctcatcgcttttccaacattggacgatataaatttgagatggcttttttccaaaaactctgaagagattttacaatttttggcacacaacggacttatccaaaacaaattgttgtgccaaaaacaccaacaaatgtgaaggattatgggcccagttgaagcagaaaacaaaaagaattcatggcaccagtatgaaattgacagaatcatatatgcatgaacaaattttccgattgaatgctagggctaaaggattgtctgtttttaaggcttttgtcgatttattacatcgtaattataattttttgtgattaataatgctaattgtaataaaaaaaataataaaaatatatgaaaaaaaagtgaaaaaaattttcaaaagggaccacttttacagtagcgcccaaaaaaaatgtcatcgatttacatggcggaccccttcgcaaaattggctggaatgccggagaatcgtccaagtgactggaatgatggtgattgagtgagtcccagtgactggaatgccggataattgatgcaatttatatgccgatttattatgcatatttggatttgttacactgatggaaaaaagtcttgcctcaatgtgataaaatttgcagaaattaaaatttagacttgaaaattgaactgattatttttagtttatgtgtttttaattactccaatatatgcgcttttcatgcaccaaaaacatttttgatcgactcattcattcccgagaatgagtcacgtgatcacaaatcgctcaaaaaacgacggaaaaaagtcctgcctcaaaatttttaatcgaccaaaagtca

SEQ ID NO: 45399 - DNA, 1430 bp, Heterodera glycines
ctgaatttgaaaaaaaacttggtcaacctgaatatacatatacttctgaacaattctaatgctaaaaaacaggcactcgcgcgaaaactgaataaaaattttgtatttggaaaattttgtccaaaaatttttatgttctaaaattaccggtttttaccggtaccggtaccggtaccggttgaaaaagttggtaccggtaccggtaccggtttttgcagtaccggtcagtaccggtaccggtttttttgcaattaccgattaccgctcaactctatatgtacataataattatttcgaagagaaatgtgctaaaaaagttttagtcaggaaatcttgtattcttgtcttgccgacaaattacagctaaatatgccattttccacgttaaatatttcataagggaatattctaaatatgccaattaaatagtgctaatggatataattattaatttggtatgtttatttccaactttttgacggatttttttaaatttggaatccgcataatttctgctacttcaatattttacttattattcagaagaaataaaatatccaacgaaggggtgaccacttacacgttagattttagtaaattaatatcaagtccaaggagctcttttacagactgaatttttgtttaactcaatccatttacaacagatggagcatctgttatatctttgttgagtttagaccatattaaggccgttctgttgataaaagaatttgaagttttactggattgtgattttaacacaactttacgtctaagattataagggatgtgaccagaaaattgtgggaatatgtcttttttaagatgagtgagaccattaataattttgaatgcctgaactaaatcaattgtttttctcctttcttctaaagtttgaataaatcaagtctttgtttgtaaggtatgtaaagaagtctgcatttaaataatgcaatttttgtaaaatatttttggcatctttctaatttatttatatcttttttgtatgtcggattccaaatttcaggcgcatacatattctaaaagaggacgaatatatgtcttataaactttggtccaaatacgtatagagcgggattttaaaattttggcaatattgcgaatccttaaataagcagctttagtaattttagtataatgattagtaaatcttaatttattatcaatcaaaatgcccaaatcactaatagattcaacctcattaataatattgttaaataatttatattgttgttttgaattatttttgccaataaataaaataaatgttttatttttgggagatgtttaaaccaaatgcattagcccattttccatattttctaatgcatatttaatttgcttcttcatcacgagttttgtaagagacataaattttgacatcatcagcaaaaagcttgatgcaaact

SEQ ID NO: 45400 - DNA, 1086 bp, Heterodera glycines
agagagagagagagaatactagtgagagagagagagagaaatggagagagagagagagagagagagaaagcatcctttttaattaatgttgaaatgaccaataattggaaaagcaaagtatatgttcataaaattgccacttccaaattccgaatgttgcagaatttcctggtcggtcccctggagggggccgtgcccggcgacgtcgccgtcgaattgggcattttcggctttctgctgggcgacacgcgggacggaagcattgtgcgcaacactcagcaaggattcatagcccgcagcagcacaaaattggtaaacgcagaagcagaagaaaaatacgaagtgtacgactcgctgaatttaatttaagaagccatttcaaaacggaagaaagaaatgaccaagtgattattgtgataaatgataaagacgataagccaaggttggctaatcatttttcattgcttttcaaattaaatttttgtccatttgaatatgttctaaatataattacattttctatcctatatatatatatatatatatatatattattaatatatgtttttatttatatatattcactttttgctgttctcaccctcttttttaattaataaatagtttaatgggcaaaaatactcattgacttagaggctcgcaacccttactcttaccgtacattcgaaaaattctatctctacttttgacattataagagaaactcaaaaatgagggctatttttttgtttttggcatttatgagtcatatcctgagaaattaaaaaaacgttatttcagtgcaattaaaaaacaatacaatcaaattcgatctgctgggagaacacaaaagtttttaaaaacattaggaaaaagtgtcttaattttcttagaattgtctgtacgcaactacagctttaagatcggctcggaagaaacaaattccgtccaatggattttgaaatttggaaaacggaagaatcagtcatttgttcattagcaatgctttacatagttttttgttatttgcttaaataacaaaagcattttactttatcaagtttaattatgactctagagatcccc

SEQ ID NO: 45401 - DNA, 835 bp, Heterodera glycines
  unsure (1)..(835): unsure at all n locations
gacgtcaacatcgtaaacaatacgtttgcggtagattatttttctcaatttaaaaatataactaaattataaaatgtgtcaaaattattttacctcttcacatactcgtctcacttcaatggaagacattttttcaacaacatggcaaagaattgtttcgacaagatttgtaacttgtctttgttttgcgagtggttccttgtagtacataaggggcgttctggtgttactttgtttgttttttagttagagaaaaaccaagataaattttcaggtcatcctgaaaggatcagatcatggttgtgcaattgattttttgatgagataaaaagttacaatagtatgaattttttagtatcaaaacttgatgctataaatttgttacagcaatttaggacaattttcatttaaaaaattatcgaaaaaaattattgaaaattattcccttttaactgttccattttttatatcgttcttaatattgattagggaagtatgactggtaaacagcttatttgaccccacgcgaagtagttgggatgaaaaaaatcttgcggctataattttagtacagagcttatgtaaacaataagctaatttttaaatatagagaaaaatggcaccttatccaacacttacgtatgtggaagctgtttgtttagcttgtattcggtccatcacgttacccgtacttgtngtatttacgatgatttcgttagcagggcagcctatttgaagaaagcagacatttattttgaagncnacttgctttatcatctcanaaggattagaaaatcaattgctgattggtaaaaagagaaggcactcatgaaag

SEQ ID NO: 45402 - DNA, 827 bp, Heterodera glycines
  unsure (1)..(827): unsure at all n locations
aaatgggcgttgtctaagttttgtattaagttataattcaaccgaattcacctttaatatttaaattatgttatttgaaatagttactgagcacaactccttcttcgaatgtcatgcaaaagaacgcacctgaaccggaaaagctgacctcaaagcctatcgggacgcttaatgagactaaaaaaatggaagagacaaatgcgacaaaagcgggaaatcggagccaggaaccgttcatgaagcctactacgattgtcggtgaccattctaacgagacagaacatacgcaaaagccaattttgacctatacgccggaaccaagccctgaagacactgatgagccagaagagtcggacaaaacggaacagccaacgaccaaaaactccacttcagagccgatcgaaaattctacgacttccaccgatcgccatgatgagaccgaaacgtataagccaattgtgaccgaaacgactaaaatgccgagttccaaaccgatcgaaaagcttacaactaccaccgatgactatgatgttgagacgagtgaaagcaccaccgaaaaaaaggagaagatccgcagcggcaaaccgaccaaaagtaccagaaaaacgactaaaagcaccaagtcagtcacggctcatagcactgaaactctgaccaataccacaacggcatcggcaatgccggataatggcaccaccactgaaccgagtgaagggacggcactgccccccgagcaaagcactgcggcaaaatttattttcggctttgaatttggacgtattttttttaaatatttgaaagttggttaattaagaggaccnntgcag

SEQ ID NO: 45403 - DNA, 1453 bp, Heterodera glycines
  unsure (1)..(1453): unsure at all n locations
gcatttaattaaataaaattattanttcgctataacaagctaattaatgcaaagattctgcgcatgccatcgattcgattggcatgcgcatcctcggcattggcattggcgtggatgagaaatgtgccgatgccacccatgcacagaagagacttcatgcgggtaatataaatggatgaaacaaagtgggagaagggagggatttggtatttccaccaaattaattttggattttgtcggatttatttggcttattttcacttttcaaattatttcgactatatttatttattttttatctcagtttgcctttttcagatggattggttggtcttcgctgcagacaatttgataacggcgcttccgcaggcgccgtgccgctgcgttcctcgctgaccgggcgcagtacgctcgccgttaatccctcgcataaagcgggtgccgttgtgccggtcgatcagtcagtcgttgctgtgccatcgtatgacgacgacgatgacgtaacacatcaattatcattaacagttgattgcataattaacatttatttaaggcattcttctcatgaatatgggaataaagaaacaacacacaaaaattgcgggtgatttgttatttatgccattttaattttgaaatttgttttttctgatgtaaaacagtttttcttgaaaaaagcaataatattccaaatcattccaaatggtaattttgatcaatttgtgcgtaatcgatgagcactttgaaagtctttgaaggaacaaatttggttctggaatattcccgcaagtcattaacaaatacacaaataaatgttggcattgaccttttttatagaaagcttaattatttgcgtgacaattcattttttaaagccaatggtcgattggccaatattcacatttttgataaagccaaatttttttttaaatgtacgaaaggatctcacttaaagcaaagaaggaatttaaatattcagagatttgaatcaaaataaaaaaaatccaggttttttttttgtttttttattttatttgaagaatttctttttttttagtttttctttttttatgttatgtttggtttttgtcatttattaattcgtcataaaaacattaaaacgtaaatgcatcatttcttaatccaatgacatgcttcccaagaaggcattgattgtaaacgtgtcacaaattctttataatattttatggctaataaataaatccatttctcgcatgtgtaatcccaaatcctcgctttctcttcataaatttctgccctcatttattcataaaatttttgtataatttaaattaaaagcgcccataaaagcgaaaccacttttattaccttttgaaaatgttaatttttactccccattaatttattaatcgccattttatgtctgctttcatctgtcggtacaattggtaaaatgtgaaaaacataaata

SEQ ID NO: 45404 - DNA, 823 bp, Heterodera glycines
ctcggacattcgcggcttttcccccatggcggccaattcgacgccttaccaagtggtggcctttttgaatgatatgtgagcaaatgattgcttttgaaattggagagatccccaatttgtgtcgcaggttcagcggcttcgacgcaatcattgccaaacacgacgcattcaaagtggagacggtcagaagcccttcccccactttcatttccctacggcatcagattggccacacttatatggtcgtctcgggagtgccccgagagaatggcaacgcccacgtgcaacacattggggacatcgccctcaaaatgcgaactgtcggtccattctctcccctctttttatccccccccccccctccgtttcttcctcagttcgtctccaatttcaaagtgacacaccgtcctgaagaaattatcatggtccgaattggcttccacagcggttccgtggcggcgggcgttgtgagtttttttggggcgggggaaggaaaagcattccccggcggaaggtcggactggcggccccgcgctactgtctgttcggcgacaccgtcaacatggcctcgcgaatggtcggtctctctctctctttctctgatttgcttctttccgataaccccctattattacccccccccccgaaggaatccacgggaatggccaacaaaatccaagtgattctcccactgtccgtttcgtggtgtaaattccgttcgttcagatcagtgagccctcctacaacctgatcaagtgcttctaccccccattcattgtgattgaacgggggaaaagtggaaattaaagtaaataaaaaggga

SEQ ID NO: 45405 - DNA, 725 bp, Heterodera glycines
agataaacattttccttattcctaatcttctttgtaggcatttttctctgcttctgctccattaatcttctcaattattgttcatctggtttcgacttctcaattaggtcagcatttcatttgactccattttcccatttgaactggccaacgaattggctggggagaaattgaaactgttacaaaatagctattttgggatttggttcgggggcacgaaaatttcgcccccgcggggacgggggcgggggtttgatttgaattaactccaaaaaattttacaaaaaattaattttttatgaatgtttagaccggcggtaccgatagaccgcctggcgaattttgaaatttaagctcgatttctaacagatgtttacaaaaaaaataagatttttacgataaatttttgtttttttaatatattaaattatcatgatttactcaagcaaaattggaacttagatttgtaacatattttcttgtggcacatttttccaacaaaaaaaaaaacttggtgaatgtgcgagcgtagaggtccggcggtgccgataggcgccgccgggaaaattttttgaaaactgatggatctgttaatagattttgtccaaaaaatgataggtttttgcaatttttagagaatttttttaataagatttacgaatttttgggccctgcgatgccgataggaagcgccaggcgaattttaaaattaaaaaaataaatta

SEQ ID NO: 45406 - DNA, 1079 bp, Heterodera glycines
attcattacccaaaagttttttacaaccacttattgccaatctaatttcttgcagatttaaagccatccattgcctgccggttctcggcacagcaaagcactaatagggtgtttgattcacttcaaaaaataattccttaaacaagttttttacaaccacttattgccaatttaatttcttgcagatttaaagccatccattgcctgccggttctcggcacagcaaagcactaatacggtgtttgactcacttcaaaaaataattcattacccaaaagttttttacaaccacttattgccaatataatttcttgcagatttaaagctatccattgcctgccggtctcggcacagcaaagcactaatagggtgtttgactcacttcaaaaaataattccatacccaaaagttttttacaaccacatattaccaatctaatttcttgcagattgaaagccatccattgcctgccggttctcggcacagcaaagcactaatagggtgtttgactcacttcaaaaaataattcattacccaaaagttttttacaaccacttattgccaatctaatttcttgcagatttaaagctatccattgcctgccggttctcggcacagcaaagcactaatacggtgtttgactcacttcaaaaaataattcattacccaaaagttttttacaaccacatattgccaatctaatttcttgcagatttaaagccatccattgcctgccggattcattacccaaaagttttttacaaccacttattgccaatctaatttcttgcagatttaaagctatccattgcctgccggatctcggcacagcaaagcactaatttgggtgtttgactcacttcaaaaaataattcattacccaaaagttttttacaaccacatattgccaatctaatttcttgcagattgaaagccatccattgcctgccggttctcggcacagcaaagcactaatagggtgtttgactcacttcaaaaaataattccatacccaaaagttgtttacaaccacatatcgccaatctaatttcttgcagattgaaagccatccattgcct

SEQ ID NO: 45407 - DNA, 893 bp, Heterodera glycines
aacgtacgatcccaatgatttttttgaaaagcaacccttctgactcaaaacagctcaacccctaaagaagtgtcgttcaacctccgccatttttgctatggtgcactcttttgccgaaaacgtacgatcccaataatttttttgaaaagcaaaccttctgactcaaaacagctcaaaccctagagaagtgtcgttcaacctccgccattttttgctatggtgcactcttttgccgaaaacgtacgatcccaatgatttttttgaaaagcaaaccttctgactcaaaacagctcaaaccctaaagaagtgtcgttcaacctccgccatttttgctatggtgcactcttttgccgaaaacgtacgatcccaatgatttttttgaaaagcaaaccttctgactcaaaacagctcagaccctaaagaagtgtcgttcaacctccgccatttttgctatggtgcactcttttgccgaaaacgtacgatcccaataatttttttgaaaagcaaaccttctgactcgaaacagctcaaaccctagagaagtgtcgttcaacctccgccattttttgctatggtgcactcttttgccgaaaacgtacgatcccaatgatttttttgaaaagcaaaccttctgactcaaaacagctcaaaccctaaagaagtgtcgttcaacctccgccatttttgctatggtgcactcttttgccgaaaacgtacgatcccaataatttttttgaaaagcgaaccttctgactcaaaacagctcaaaccctaaagaagtgtcgttcaaactccgccatttttgctatggtgcactcttttgccgaaaacgtacgatcccagtgatttttttgaaaagcgaaccttctgactcaaaacagctcaaaccctaa

SEQ ID NO: 45408 - DNA, 1133 bp, Heterodera glycines
tatttttttaaataaaaatataaatattaataattaaataattttttaaattgtttaattgtttttctttattaaaaaattgtttttaaaatctctcaaaatgataaggttgaaaatttcaaatgtaaattaaattatttaaatcattttgtttgtaaaagtaaatcaaaaagcttaatttaaaaaaaataataaaacaagtaaaaaaataaatttaaaaaaatattttaatattttttttatcatttaataaactaattgttttaaaaatttctcataatgataaggttgaaagtgcaaaatgaaggttaaattatttaaaaccatgaacgaaatcaataggcataattataaaaaagtaattacaaaaattaaattgatacaaataaaattttaggaaaatggaacaaataaaatttgttaccttagcattggcaccattttcggatttgttgaacggaagaatccattcattggatgatgatgatgcttttggttcaatgtgtgccgaaattgccactttttgttgtccagattgaatgctctgaagcggtttcccatctaaggtctcctgaatatgaaaaaaaaaaataaaatttaaattttagcattttattttttgtcatcactttggcatttcgtccatccgggaattggtcatcgtcacggatttgcgcatttttcagctgttgatcattgccaaacgtatcatgttgctttggtagctgtactgcttcaggagggtcttcagtgatcggaatttcatcgccatcatggattttgatcttggaagaactctcagctaaaagaaaaagtaaaaacaaataaaattatttaaataataaaataaattatttaaagaatatttttgataaatatattttttaatgttcatgatataattattaattaatttttcattaaagaattttatattatatatatttttttatttgaaaataataagttaaatataatttttaaattatttcaaaattaaatagttttttttttgccaattcaataatgcaaattataagaaattaacaaaaaattaccaaaaattccggccgaagtgtcattgtttgtgtgctcatcggttgcctgttttcctaaattacgtccatattttt

SEQ ID NO: 45409 - DNA, 1327 bp, Heterodera glycines
cccccttcaaaatgatgcctcagaatccccaatcacacagggatctgaggtcttatcgatgttaaaagtaaaatctgatcacgtattcgtgatcagcgtcataaaatagccctaatgacatatttttggaagaattttgtgaaaaaaaattttccactcaaaaatcctggtcacccccctttggtcccgaatctcaaaatcacttttatttttataacaattcgcaaaaaagtgataaaaatgccaaataaaatttatttaatagagcaaaaaattgcggattttttaagtatttaaaatttcaaaaacacctttacagaaccgagttatgaattttttctgaaaaatcgaaaatttccagaaattctggaataactttttttcttttgaacattataaaaccaaataaaccccataaaattctccttatttttctctatttttaaagctttaattcatttaaattgaccagtcctccattgagttatgaattttcaaatattcgcccaaaatcccgagggccaaaaaattgccaaaaaataaagaatttttaaaaaattccaaaaatcatgaaacgaaaaacaaacatcatattcgtgctcagcaccccaaaaaaccccagaaaaatatttttgacccccattttcaacccaaaaaaaattttcgaaaatttctagggggcctagctcgaaaatttttgaaaatttccaaacatgtagtacaccattcgatagagcttaaaaagctctacaattttgctctgaggtcatttttggctaaaaccaactcctgacgagttatgggcccgggactcaaatgtcccgctcaggccaaaatttttttctatttccgggaaaaaatcgaaatttttctgaaaaaaataccagtcgatagagctcgaaaaactatgttttggaagtggtcttcgtttttctgggaaaaatcgttaaaaattcttaaaattcaaaaaccaaaaaaccgttttttaggcctagctcgaaaaatttttaaaattttcgaaatttttaaatttcagaaaatcgagcttccaaagctctacaataagtctgctggccaccctgcgctcaggtcaaagcctaatgagttattcaacggggactgaactggaaaaagttggtactgaaaagttgccaatttctgcagctcttccaagtataggtagaggcctggaatttttttttaaaattagaaaacacttcaacttagtttcctaccagcaagcattttttgatcagagttttagaaaaaaagttacgggccttcaaacaagagcaaaagtgagaaattagccgccgggactcagttg

SEQ ID NO: 45410 - DNA, 671 bp, Heterodera glycines
  unsure (1)..(671): unsure at all n locations
atagatagttttaatgaaaacaattaaaatttcantgaaatcttgttaaaaatcgcattgagaaatctgtttttatctacgttaccaatcgtggaacatagccttaaaacagattaaatcaaactaaataaagctcattatttcatcaaaaaattcacattagcatttatagcatcaaggattacttaacatacattatcaaaaaaagaataattaaataacacattattatttttaaatattttaatgtattgaatataatttgaatccacaagatataaattatatcttttgatggcagtttttcatgttatgatgaccaaataaaataaacaacagtttttaataaaaattgaatccaattaagcaattgagcaaaagaaaaatatttttattaattaccttcattataaacaataataaaacatatagtaattatcttttatgactgtaaaaacaattggttaaaattttgaaagtcaattaatcaaataaatttttgtcactgcaactacttcccgtgggccaaaattatatcccacgataaaaattttccaccccagagggtttttttcagaaaattgccggttttaagcaatttaatggtgtttaggtaaaactgaaagagcggtctgattttttgcatttattaaatgtttgttaatgctcga

SEQ ID NO: 45411 - DNA, 993 bp, Heterodera glycines
  unsure (1)..(993): unsure at all n locations
gcttccctatagncctgtactttaattctgcgtttggatttttgctcccncattaatgttgnagtaccccaaacggacacttgaaaaaaatcgattttttttgttttcggggcagtccccccgaaccgatgcgcccagatttatggggagaccgaatccttcgggaatagcttccctatagtctgtactttaattctgcgttggatttttgctccccataattgtttgagtaccccaaacggacacttgaaaaaatcgatttttttgttttcggggcagtccccccgaaccgatgcgcccagatttatggggagaccgaatccttcgggaatagcttccctatagccagtactttaattctgcgttggatttttgctccccataattgtttgagtaccccaaacggacacttgaaaaaatcgatttttttgttttcggggcagtccccccgaaccgatgcgcccagatttatggggagaccgaatccttcgggagtagcttccctatagcctgtactttaattctgcgttggatttttgctccccataattgtttgagtaccccaaacggacacttgaaaaaatcgatttttttgtttcataaatatttttttcagaaagtgctctaaagctcaccaaattttatttacaacttaattttagcactctgatgctttagtatcaaaaaggaagatggagaaaaatttttgttttaatttttcctttatattttggttatatcgttttgctttggtggggtgcttggaacagtggaatcatgcgcacccgtccgatctggcaagttaagcaacgattgctgactagccaaaaggttcggtgccgtgatgaaacgaaccagcactgcttaccccgcggcacccggcacggtcccccgaaggaatggatttaattaaattctctccttcggggatttttttcctattaggtcgtccgttagcgttcgattgctctagtcaatttttaaaaatttttg

SEQ ID NO: 45412 - DNA, 994 bp, Heterodera glycines
agcgtaattacgattttacttacaccattttttgctaggcttagatgacatgcgattttctgcactctgataattttagcgctcataatgggatgtataaaggcgattgtagaaggaattggaagcgctaaaattgtttgaggagctttttgagcgtaattacgatttttacttacaccattttttgctaggcttagatgacatgcgattttcggcactctgataattttagcgctcataatgggatgtataaaggcgattgtagaaggaattggaagcgctaaaattgtttgaggagctttttgagcgtaattacgatttttacttacaccattttttgctaggcttagatcacatgcgattttcggcactctgataattttagcgttcataatgggatgtataaaggcgattgtagaaggaattggatgcgctaaaattgtttgagaagctttttgagcgtaattacgatttttacttacaccattttttgctaggcttagatcacatgcgattttcggcactctgataattttagcgctcataatgggatgtataaaggcgattgtagaaggaattggaagcgctaaaattgtttgaaaagctttttgagcgtaattacgattttacttacaccatttttttctaggcttagatcacatgcgattttcggcactctgataattttagcgctcataatgggatgtataaaggcgattgtagaaggaattggaagcgctaaaattgtttgaggagctttttgagcgtaattacgatttttacttacaccattttttgctaggcttagatgacatgcgattttcggcactctgataattttagcgctcataatgggatgtataaaggcgattgtagaaggaattggaagcgctaaaattgtttgaggagctttttgagcgtaattacgatttttacttacaccattttttgttaggcttagatcacatgcgattttcggcactctgataatttt

SEQ ID NO: 45413 - DNA, 982 bp, Heterodera glycines
caccagggatgggccaaattgaaaaataaaaagcgaaaagcgaaatttgcgaaactgaaaaatgcgaaatgaaaaaaaaagcgaaatgcgaaaggctaaaatatgcgaaaatgcgaaaggcgaaatgcgaaagcgaaattttttctgcaactttttaatggttaaaatcataaagcaaaaattatttttttaaattttattccaaatttaaaaatcaataaaacgcttttttgaggcgcgctttttccaaaaaactttttgggaagagggggcaggcggcgccgggaaaatttttgaaagttagaataaaatttgttgacaaattttcactaaaaaatgatcaaattttgtgatttttatcatttttctaatgagaaataagagttttggggcgccgctgagaacagtttttcatcaaattaccaaattttgcgattttgggccatttttctaagaaaactaggagttttgggggcgcggcggtgccgataggcgccgccgggggaaaaaattggaaattttgatcatttataaacaggttttcagccaatttataggtaaaattttgaaaaattttatgggaatttaatccaattcttaggggtgtaaaagtcgcttttcgcgcaaaaagctaaatgcgaaaagcgaaatgcgaaacgctaaaaaatgcgaataatgcgaaaggcgaaatgcgaaaagcgaaaccaaggcacatccctggtcggcaccacagggaaaaatattgttcttgaattttggtgttttacaatatttttccgttttgtttatttctgcttttaggaaaatacaaataaaataaccatatttattatttcaatcctcgtttatttatttagtataatttaaaatttaattttccttcttttgtacccacaattttaaaagaaaatttttttttatttaaaatattttttcttatttcatttttacaaaactattttcctgtcaaattttcgcgatt

SEQ ID NO: 45414 - DNA, 1474 bp, Heterodera glycines
  unsure (1)..(1474): unsure at all n locations
tcctccccacggagttggtaatcagtatttggcattcgtctcattgactgaaattccgaccccgatattttagcccattttcgaaaatcttccgcttctccgttgaatagggattctggaacatgttttatcattaaaaacaacaaaaacattttttaaatgtggcgtaaatgtatacctaagtacccaaaacttttaaaaactaataaaatgaaaaaattctaatgcataggtttgcaaaataaaaaaagcttcgaattataagtagggccacgatttataattttttctagagtgccacgggaccgggccgggattcccggtcatccgaggtcccggtcccggatttcctgaagaaaatccatacaaattgagcctaataaatcccaaaacctgccttttttggtgtaaatctgttaacaaatcacatccaaattttcaaaattttgaaaaatattaggtatacatttgtcggcgtgcccataaactgtcataatgccccatattgtaattgtcaatacacccgatcatttgaattgtatctatatgtattattgttgatgtgtgcgcatatataaactaatcaaaatgagaaattttcactttgtcactttttggctgtttcggcacttctgacttatatagaggggggatttttaaaaggatcgaaaaatgactaatttggtatcatttaaaagctctagatgagatataacggacagattttcccacagccgtcaattcggagcataaccaaaaaacttgagaaaagtgctcaaaaaacgcatgttttggattgatgggaatatgcatgcgcgggaagttcattcattgctttgattggcccatccctttgacccaagggcgtagccagacccttggcttcgggggggagggaggctgaagacaaaaattcgatttttaggggtgtatttttgcttttttgaaatcccgaattagggggtatattttgcaaaaattttcgtcgttttcgccaaaaaattactattttttgccattttggcctcaatttttcaaaaatatggtaaaatgggggtccggcggtgccgataggcgtcgccgggaaaatttgttaagaagattgcttaaaatttcaaaaaatttactgaaaactcagaaagtgctcaattggcaacatcaacaaattttttgtgcatatttttcactttttatgtgcatattttacgattttatgtgcatatttttggcatccctatttatcacataaaattttatcaaaagtggtttaaaaagttaaaaaatacaagtataattgtttgccttttatcccaagaaatgccattcttaagggtatattttcttcaaaattcactaattgcttgagactttcctcagtataaaaaaataaataaaatcanngtagggttcagtttacggtagaaacttgaaagagtactcacccccgcggggggcgaaaggtcgcgggagtctg

SEQ ID NO: 45415 - DNA, 790 bp, Heterodera glycines
  unsure (1)..(790): unsure at all n locations
atcggcgtcattatgctgagagtgcggttggaattctcttgactgtagccagaaaaagagatagccatttttccaaaattttcacgatcaaatgcgctgagaaaataattccagaacaattagtatcggcgtcattatgctgagagtgcggttggaattcccttgactgtagaccagaaaaagagatagccattttccaaaattttcacgatcaaatgcgctgagaaaaaaattccagaacaattagtatcggcgtcattatgctgagagtgcggttggaattcccttgactgtagaccagaaaaagagaaagccatttttccaaaattttcacgatcaaatgcgctgagaaaaaaattccagaacaattagtatcggcgtcattatgctgagaatgcggttggaattcccttgactgtagaccagaaaaagagatagccatttttccaaaattttcacgatcaaatgcgctgagaaaataattccagaacaattagtatcggcgtcattatgctgagaatgcggttggaattcccttgactgtagccagaaaaagagatagccagttttccaaaattttcacgatcaaatgcgctgagaaaaaaattccagaacaattagtatcggcgtcattatgctgagagtgcgggtggaattcccttgactgtagccaaaaaaagagaatagccagttttccaaaattttcccgatcaaatgcgctgagaaaaaaatccagaacaattagtatcggcgtcattatgctgagagtgcggntggaattcccttgact

SEQ ID NO: 45416 - DNA, 842 bp, Heterodera glycines
  unsure (1)..(842): unsure at all n locations
ttcaccaaaaattntaaaaatgactagagcaatcgaacgctaacggacgacctatggaaaaaatccccgaaggagagaattaattaaatccattccttcggggaccgtgccgggtgccgcggggtaagcagtgctggttcgtttcatcacggcaccgaaccttttggctagtcagcaatcgttgcttaacttgccagatcggacgggtgcgcatgattccactgttccaagcaccccaccaaaagcaaaacgatataaccaaatataaggaaaaatttttttaaaaattttttctccatcttcctttttgatactaaagcatcagagtgctaaaattaagttgttaataaaatttggtgcgctttagagctctttctgaaaaaaatatttatgaaacaaaaaaatcgattttttcaagtgtccgtttagggtactcaaacaattatggggagcaaaaatccaacgcagaattaaagtacaggctatagggaagctattcccgaaggattcggtctccccataaatctgggcgcatcggttcggggggactgccccgaaaacaaaaaaatcgattttttcaagtgtccgtttggtgtactcaaacaattatggggagcaaaaatccaacgcagaattaaagtacaggctatagggaagctactcccgaaggattcggtctccccataaatctgggcgcatcggttcggggggactgccccgaaaacaaaaaaatcgattttttcaagtgtccgtttggggtactcaaacaattatggggagcataaatccaacgcagaattaaagtacaggctatagggaagctattcctgaaggattcggtc

SEQ ID NO: 45417 - DNA, 951 bp, Heterodera glycines
gatgacgaaacggagacgaaacgaccgaaggaagggcaaaggacggcgtctgagaggatgaaggcattggatcgcaaaaaggtgaacgaatgagtgcaatgcaaaacttctatttaacctcattacgccctaattaaggtccataaaatgcacggggcaatccgactcaataagcttatcttggaaaattcgcgcaacagtcaattggttcttttttctctcccaaagccgcctttctttgaggacgaagtcgacgactacatccattatttggaggtgtactttgacttttaaacccaacaatataaaaatgttcaggtgatttcggacaatttgcaaaaagtgctttttgtgcgtggaacgggggcagaagtgatcacatccaaagcttaagcctattctctttccctgtattgttttgtccggtggtaatatgtaatatatgtttatctacacctgtatagttgcgttgtaacgaggaataaaaaatgtgttctagtcagttttgtgcatcccatcgcattttaggcgaatggaaaaaagatcatctgccgtatttgctctaattattccctccccccccctaaagaaattttgtatttcgtctatatagtttaaatacagtcgcactatgggtcaactccacttttctactcatacaattttaaccaaattttgcatatcgacagggaaaaaattcttcatcgattaatacgtttccatttgtaaaagctcggggttagtgccgtggagatgacgaagaccattttcactgcacgccaagtggcctcatgccctgggggtgatgtgggtcttgaggatcgacaaaaacaagcgatggttaccccacgatgctcaaattgctgctgcaaattatggacgtattcccccataaaaaataaattagaaattttttattttccttgggggtacgttttaaaaattaaatta

SEQ ID NO: 45418 - DNA, 1378 bp, Heterodera glycines
acccaagggatgcgattgccctctaaagccaaatactcgtggatcgttccgccgattggggccatctgaaaacccaagggttttgagagtccacctggtggtgaccgagtgtggccagaaggtcaccaggggctgttgcgtgtgaacggtcggtccgccgccgttccgcggcgccgcggtcgacgcgctggcgacggtcactgcgaatggggggattgttgcggccgccggcatatccgtcgccagcggcacgaagcaaaagccacaggtgcgggcgcaatatgtgctggtgaaggtgggcgcggtgatgcagtagcgccgtttggccaactccgcgcagtcgacgcgcaaatcttcacaggcgggctcaggcacgacgggcggttgttgctgaaggccaaacagaattttggcataacatattgtgatttggcaaagcattcgccccggtttgggtctcggtcccgcgacacccatcaatatatttcatagcaacgaaaagagactttgaattggcaatttgtatgaatggatttcgtcatttattaggggctcctcccaccccttccccaccggacttcgtttagtcgaaccatccatccatccccgaatcgatatttgtggattctcggcatactaatgccactttttccagtcgataattaacctttccgtccctaaggtcgggaccaaccctaaaattgttcatttgcttactgtgacagttaccactggtgcaattggcaccggcgatggcattccgtcgccgatggaggacgacggcttgcgaacacccgaacaccaaccgcaggacaggggactaaacaatcagaagaagcggggacaaaaggaaagcaaaatgggggtaattagcaaagcaatcattagaatattagcactaattaattattcggatttgccgacactgtttttgtgttttcctcagtttcccatattttcccttccaaaattaccaatggtcgcgcatccattgtgggtttcgtgtgcaccagccttggcgagccaactgatcgcagtcagggcgagtgtttcgacaaaacttaagaaaagcaaaaacatcccttaattaccatatttgcttgtgtgccacagtaccctggctgtcgtggctgccatttgcgttgtggtgagtatcgctaccgtacccggcgccgttgtggctggttgtgccggaggcatttcggtggaaccgtaggaacctccggcaccgccaaaggacggacattcgtaactgaggagaaaatggagggaggaagtcatattggaaattatgatgataaataaatttatttttatttatttttttgcctacagtccggggggatccacgcgtccaatttgctaaatacgctccgtt

SEQ ID NO: 45419 - DNA, 1518 bp, Heterodera glycines
aatttgaatttaaaaaaatattcaaaaatttgagaaatcttttgctgaaaaattaaacaaatttaacgtggtgatcacttatctcgaatatgaaaatcaatttaaaactttgttggcaaaattggcctaaatatgcccgaaaactattcaaaaaaaaaaaaaaattgactaatccactcataattgttttaagaaaacactaatttaaatcacttttttaatattttataaaatattttactaaccctctcataattgtttatttttaaaccacaataatttaatttttaagaattttttaatctaattattttcccaattttataaatatatttattacattgccgcaggcattatttaatttttttttcaattgtttggcatttttgtcatatttggcaatttcccattagtttttggccatgcttttccatcggtttggcacattggcccatatcattgcctccaccgagttgtggtgctgttcccgtcggccaatggacgcgatcagtgaggaggaactgatggcacagaatgccgtggaaattgccaggtgggggcgtcatggcaaaattatttgatgcggatctcggcttttatagcccgaaaatcattccatagaaatctatttttcggcatttgttatgctcctaaatgaatgacggcgtccttatttgcattttgtacaatttggcccatatttagggcactattttgggatttttttccgattaaaaaattaaatagccttttctttgcatataatttttaaaaaaatctaaattttgaatttaaaaaaataaatcaaaatcttttaaacaaagaatatcaaactactccaattttttaaaaataatgtaaaaaaatgaaaaaaaggagatgaaaatttcaagacttttggatttttttttgataattaataataatttggccagaaaaaatggatcaaaatttgtaattgcctaatttggaatccatttgatcgttcgtgtccagagagttgcaagcaatccgtggcctcaccgactcgtccgattctggtgtacatcttcaacagcaacaacagcacgagttgcaactccgtcatcgccgtccgttcccagcccaacaacaaattcatccaaacggtgcaaatggagggatttaaatagatactaaaaagtttaaaaaattttttatctaaattttcttataaaaaaatttcagagacctagcacgctttcccaaagcttctcaatttgtgcttatttgttagataattaattagtttaattaactactcaatttgcgcatagctttttcggccgagtcgccgccgcctcccccaccgccgcagcggaacagcggacgagcgaacggcgacgcagcgggcatgccggcagcagcgtctgtgccgccagcgggcgttggcgttgcgtctgcggctgctgctgctggccgtagaggtgggggcgccgggacggagcagcgccgcatggacacgctggacgcagcatttcggcgccgcttcttcgcgct

SEQ ID NO: 45420 - DNA, 1609 bp, Heterodera glycines
  unsure (1)..(1609): unsure at all n locations
ataaaagtcagttcaagaattttataccaaggaaaatttttntcgtgtttcacttcattcacttacacgctttggctgaccgagagcttaaatttttatccggcatgccaaacaattaaatcaacaaaaaaaaaaccaaaatagttcttcaatctttttcccaaaaattgtccgtaatttgctgttataaaacaatgaatccaatattaaaaacgagcaactacatactatatttattaactaaacttctttaaaaaaatgggttattcgatgttgaatgcatgagttgatcagatcactctttaagggtgatgttcaactcggaaaacccacaaataaaactgatttggtcaatcaataaggcgatgagcagaaaggggtgctagcgcgtttgttaaaaactgccacccatgcgcgtttgttaaaactgccagcgcgtttgttaaaactgccaatgggtttgaaaacaaaaaatgggtaaaataattaaattaatagcttggctcaaattcaaccaaattaatatttcgtggtatcattcaatagctttaattgttctctttcagaatataattttcctaaatttttaacttaagtataaaagaagttatggtcacaaaattgcaaaaaatcttaagtcagcattttttgttcagaacttttttgaaactcaatgaaattttctaaaattttaaatataaatagagaattcttagggctatcgaaatataaattaattttggttaaatttcattttaaagactttaaaattttaaatgtttattattatatatgcattaccattgcaaaaaacatagcctgttcaatgctttataacttcttttatacttaagttaaaaatataagaaaattatattctgaaagagaacaattaaagctattgaatgataccacgaaatattaatttggttgaatttgagccaggctattaatttaattattttacccattttttgttttcaaacccattggcagttttaacaaacgcgcatgggtggcagtttttaacaaacgcgccagcacgcttttctcgaatattcaaaggttatttgatattctcgattcatgagtcatgacgatggatgggactaatgagttttaatttgtctcgtcgagtccctttaggttttccattcccgacgtttttctcaagaaaccgaaccctgtccgaatttgtccggtccggaaccccgatttccggattatttttgaaaaatgcacccggatcatggccccaaaaatgttcaggaaaatgttgtagtcaaaacgcagcctggacataaacgtcgcgatgttttgtccggcgttgttttgtccctgcgacgttttgctctggcgacattttgtcccgcgaatttttcgtaaaataccggctaatggcctgtctgtgatcagcaacattaatttgctgcccttcctctacagcttgcgatcaaatgggagtgccacattcggtggcactgatcagcgcagcggtgccgccgtcgcccctgtggcgctgccggatgtgccgtcgcgaacgagtccgttcccgttgccgcgcagcggtaccccagcgccagcggtgggcgcgacacgccgtccgtac

SEQ ID NO: 45421 - DNA, 1155 bp, Heterodera glycines
agtttggcaacattttttttctttctttttggcatggcaacggtcgaattttgggaagggcacgaattcttttcttttttcttttaaaacagtgaaagtgaaaggtgcttatgtcaaaatgccatcgtaaaaatgtacatttttttttgtcaaatgccacctgatcatggcaatttttatgatttttatgaatataatattataatagagtaatccatctcaatagctcaattataggtaattaaattgagggcggattttgttttcccctgggggcattcgttttgcttaatccactcgatgttcataaatatgtattgtgttcattcagcgtcagagatttgacctatcaggcaggagctttacttgatcgaatatttgcttttaaaataaccactcaatttttggatcaatttcagtttttctcaattagaaatgccagtgtctctcgttccatgtctttttttctttttttcatcgagtaattcttccactttctctcatcattcctcgcttccttatttgtatgtacttttgtcgtcgttcttttttgcttctcctcctctcatttcctctcactctctctttctttctctctctttttcacctctcaattcatcgttctccctcttattcttccttctctattttccctccttctatcactcctcttccccctcctgttcttcttcgtctttttctcctcttcccatttcctctcattactcttctctctctcgcgctcttttctcttcctcctccttctctcactcttcctcctcttcctcctcttcgtcttcctcctcctcttccacttcctcttcttccacctcctcttccgctgccgcctcttcctcctcaactttgggctgttccacctccacctttggcactgtgaagctctcctcccgttgtggcgtgctatcctccttatgtgactataaatacatttcaaaaatttatctacaacttctattgcttcttcaaactcacctcccgttcttcaaatttctttttgtatttgtcaaacggatgcctaaatttaattttaaaattaaaataaataattaaaagtgcttttctaaaactatactctctctctctcttctctctctctctctctctcttttttctctctctctctccctctctctc

SEQ ID NO: 45422 - DNA, 693 bp, Heterodera glycines
tatttccaattcttcatcatattcctcgctgctttttacattctgaaactttttcatattaagctaacagatgataatctcaggaagggaatttaccgaattgatttaaaatgctttaaattttatggaaaataacgccaaaatatttttgcatgattttcagcgacatacgcaaatataataaatttggagttttcataaatattttattgaaaaaaatttaaaaaatattaaattattgcctctaccgaattagaagagtgacccaaatcgtcagtttttgaagaacacgaattgctctgatcaccggcttgtttctcgtcaatgccatcactgatcatttcgtcgtatatttctttttttggaaactttaattttgtccttacattcattgcattttgttcttcgtccgaaaatgtctcttttttgatttcttctaatatttttggcttaatatcttcttcattttgacgctcactgctaacatcttcagcttttaagcttgtcgttaataaacttttgtcaaaattatgaatattttgatgaatccaattttcgcgttttattccgtgtctttcgtaatttattgctaacttttgtggcttcatgggtatcaggaggtttttccataaatctgcgaataagtcttcttcagtaccttgaatgccaataaaaaacaaatggacgaaaaaa

SEQ ID NO: 45423 - DNA, 1535 bp, Heterodera glycines
aaagggatatttggaagctcaaaagccatgcgaaagagaagtgccgtcgctgatcacctgctgcaagtcgttgaacacgagaatggcctcggcacaccaacagccgtttttggaggcgccgaacgacaaaatgtccacgccgctcttccaactcatttcggccgccgtgcagcccaaggcggccatcggaaaacggggggagacattcaatttggatttgaataaatgtaatataatttagattaccaaaacaatgttggctaattgtgttccttacaattattttatttttagaaattttcgaaataattcttgataattcattttgccttttctgcccattttccctcaatatttcctcggtttctcactgcgtttgcgaatcgcgccccgtccatgtgcaagggaatgccatgcgaatgcgcaatgttcgcaatacgacggatctgtgccaatgagtagagcgtgccgctctccgtgctttgggtgatggacacagccatagggcggcccgcgtgcacagacacgggatttggcggatagcgttggattgcctcctctaatgcctaatcaaacaaataacaatttacaataatatttaaatgtaattaaattattttacgaaaattaataaaaataaattctttcagtatgtacttaatattagccagtaatcacttatacttaattatctcctaattaaccactaattacttatatttggttatcccctaattagggccactgatcacttgtacttaattatccaataaatagagccactaacagatttattatcccctaattagccagtaattacttccggctcaatgcgtccctcggcaccgcttacgccgaccaacctggcgccgcccgtaaaatattcgggcgcgccgcactcgtcctcaatcagatgggcatgccgatgcgcgaaaatgatgccacccgcgcgattcacataagccattgacaacgcattggcagcggtgcctggggcaaaaagtgggaatttagccatgaaaagtgccaatttggccacacctgtcccaaccagaaaaacagccaattcagtctcaaaaatttcgcagaatctcctctcaactttcttgtccagctcactgtcgccatacgcggcgtccgccccggtggaatggcgcgaaagtgcgtccgaaatggccgaatggcacccggtccaattgtcggagctcagattgatcattttaagtgcaaattgtctatttatccttccttcattaacctaatgcttcaataaggtgaaacggcacccaccctttggcacaattcaaattatttcaaccttgccctacggcataaaacaaataaaaaaacaaatttaaatatttatggaatgtatttttttagggttgctccccgaccccgagccctccgacccccgacccgacccgagacgttttgggacctattccccgacccgacccccgacgtgtcactccccgaggtccccggcccccgacatttttataaggagggctcggggagcaaccctatatttt

SEQ ID NO: 45424 - DNA, 681 bp, Heterodera glycines
ctgtctctctgctgtccacactctcgtctctccctctctctctgcatgctctctctctcatttgcacccgctctttctttctttcactccgtctctccggcggtctgtccgttcatccgattggcgtgccggtggcgacccgccacgcgtccgcttgttgcgcagcagtcgcgccattgccgccgcccgaaagcggcacgtcaagccgcggccgcttctcaagcggcggcgattggggcggctccgacttcagatgaaatgttgccggatggtggtgctgctgcgggtggtggtagtcgttcagccagccgtcatgcaactgaattttgtggggggcattgaattttaaattcaattttttatgcaatttattggaaattcaaaattttgccggaaatgaattggacggattaatcgcacaaactcagctgagcgatcatgaatccgcacagggctctatagtccccaatcccatgtactccttccgtcccctgtgggtaccagggctggacataactgatattcaattacggaaacccataatccgtaattacggcgttttttcaattaaggaaatccattattggcaaaaaagcagtaatttccgtaattacgtccatccctggtgagtacgtccatgggcaagagaccccaaccccgctataaaaaattagagactcg

SEQ ID NO: 45425 - DNA, 1113 bp, Heterodera glycines
cgcagaattaaagtacaggctatagggaagctattccggaaggattcggtctccccataaatctgggcgcatcggttcggggggactgccccgaaaacaaaaaaatcgattttttcaagtgtccgtttggggtactcaaacaattatggggagcaaaaatccaacgcagaattaaagtacaggctatagggaagctattccggaaggattcggtctccccataaatctgggcgcatcggctcggggggactgccccgaaaacaaaaaaatcgattttttcaagtgtccgtttggggtactcaaacaattatggggagcaaaaatccaacgcagaattaaagtacaggctatagggaagctattccggaaggattcggtctccccataaatctgggcgcatcggctcggggggactgccccgaaaacaaaaaaatcgattttttcaagtgtccgtttggggtactcaaacaattatggggagcaaaaatccaacgcagaattaaagtacaggctatagggaagctattcccgaaggattcggtctccccataaatctgggcgcatcggttcggggggactgccccgaaaacaaaaaaatcgattttttcaagtgtccgtttggggtactcaaacaattatggggagcaaaaatccaacgcagaattaaagtacaggctatagggaagctattcccgaaggattcggtctccccataaatctgggcgcatcggttcggggggactgccccgaaaacaaaaataaatcgattttttcaagtgtccgtttggggtactcaaacaattatggggagcaaaaatccaacgcagaattaaagtacaggctatagtgaagctattccggaaggattcggtctccccataaatctgggcgcatcggttcagggggactgccccgaaaaccaaaaaaaaatttttggataaaaattatttaaatgaactgactagataatatttaaaataggttatttctccccctttcagtatcccctgcaaagttttggtgcgctttctgatcagtttcctgaaaaaaaaagttaagccttaaaattttttggccctggttaaaaaaggaaattaaaaaattttttaaaaa

SEQ ID NO: 45426 - DNA, 1017 bp, Heterodera glycines
aattctccaggacttcaatcactagggactctattctcctgcttttcatcacctggactcagtttttatgcattccaatcactgggactcattctcctgcatttcaatcactgggactcaaccctccagcagttcaatcactgggactcaatccaccagcattccagtcactgggattctgttctcctgcattccaatcactgggactcaattctcctgcatttcaatcactgggactcaaccctccagcatttcaatcactggtactcaattctcttgcatttcaatcactgggactcaacacaccagcatttcaatcaccgggactcaattctccaggacttcaatcaatgggactcagtttttatgcattccaatcactgggactcattctcctgcatttcaatcactgggactcaaccctccagcatttcaatcactggtactcaattctcttgcatttcaatcactgggactcaacacaccagcatttcaatcaccgggactcaattctccaggacttcaatcactgggactctactctattctccagcattccaatcactgggactcaacacaccagcatttcaatcaccgggactcaattctccaggacttcaatcactgggactctactctattctcctgcgtttaaatcacccggactcagtttttatgcattccaatcaccgggactcattctcctgcatttcaatcactgggactcaaccctccagcatttcaatcactgggactcaatccaccagcattccagtcactgggactcaacacaccagcatttcaatcaccgggactcaattctccaggacttcaatcactgggactctattctcctgcgtttcatcacccggactcagtttttatgcattccaatcaccgggactcattctcctgcatttcaatcactgtgactcaaccctccagcatttcaatcactgagactcaattctcttgcatttcaatcacagggactcaattctccaggactgcaatcac

SEQ ID NO: 45427 - DNA, 968 bp, Heterodera glycines
taacaaaccgttctcaagaagacaatctgagagatcaacttcaatttgagcagtctgacttggaaatttaacagagaaatttattgaagaataggaagaaaaaagcgccacgaagtcatttgcatcaaaagccgcgggcttttcctcgggcttgccttattttttacttcaaaaaacttcaaaatcgtatattaaattagggttacgggtccgggtccaaccgggtcctgaaaaatccaaaaaaaaatcttcaaaatttgtttcatgaaaataaagcttatactttaaaaatattatataaatattttcatgaaatatatttattaaaactttattatttgtccatttttttgccattcaaaccacctcctttttttgcggtgcatttttttaaacttcggggacagttgggggtccggcggtgccgataggcgcagccgggaaaatttttgaaaatttacttcggatttgttaacagattttttcaaacaatgaacacaacttgtggttttagccaatgtgttttacagaatttgtatcaaaaatgctcaaattttcaaagaatattaggttaaattctagagttgcacgggaccggaaattttgacaaaaaccgggaccgggacttaccgggaccagaaaaagtcgggaccggggccggaacctcgattttcgtccgggaccgggaacaacggggaaatttccaagagaaatttttttttgaaaaaattggaaaaattccgaaaattcatcaaaatgcataaattaatgataatttaaacactaaaatgtttctctaggtaaatgaaaatttctgttccattgggcaattgaacccaagcgaaaaacaatgaaaggcagaaggtttagccaccacgaccacatttgaatttggtctatccgaaaataatgttctctgattttaagacattaaggaagcagagaagaaagagatttatgacgttttt

SEQ ID NO: 45428 - DNA, 1004 bp, Heterodera glycines
aaattaattaaaatcattgaaaataacgtaaaaatgcacaaaaaaataatgttacaccgtccggattcgaacctgcccccccccctcaaaatgatgcctcagaatccccaatcacacggggattctgaggtcttgacgatgtcaaaagtaaaatctgatcacgtattcgtgatcagcggcccaaataacccctaaagacatatttttggaagatttttgtgagaaaaatttttccactcaaaaatcatgtgctcacccctttggtcccgaatcccaaaatcacttttatttttatatctttttttaaaaatgtgataaaaatgtaaaataaaatttatattatagagaaaaaaattgcggatttttgaagtattttacttttcaagaatgacttttcagaacggatttctgaatttttttctgaaaattcgaatttttccagaatttctggaataacttttttcatatttatgctagaaaatccatataaaacccataaaattctcctgatttttctctatttttaaagctttatttgctcaaaattggtcaacccttaggctagatatgaattttccaatattagcccaaatttccaagggccaaaaaattgccaaaaaataaagaatttttaaaaaattccaaaaattttgaaacgaaaaataaacatcatattcgtgcccagcacatcaaaataccccagaaaaatatttttgacccccattttcaacccaaaaaaaattttcgaaaatttctaggtggcctagctcgaaaatttttgaaaattttacatcatgtagtacactattcgatagcatttaaatgctctacaaaaatgttctaagacaatttttcgctaaaatcacccctgacgaggtatgggcccaggactcaaatgtcccgctgaggccagaaattttttctatttccgggaaaaaatcgaaattttttcaaaaatatcaccaatcgatagagctcgaaaaactatgttttggaagaggtct

SEQ ID NO: 45429 - DNA, 1052 bp, Heterodera glycines
  unsure (1)..(1052): unsure at all n locations
gtattttttcatatttaaaaaaactttgaaattacttccgcttccacgcgcaattcccggtaaaaaattgcgggatntagagtgggactccattcctacaaaaatttggcctcgtgcattcagctaccgtttttaccaatttctcgtctagttaaagtccttaaacacgaaatacctttaaaaagcctttcactgattagcagtgggccggcaataaacagcaaaagttgagtggtggtggcgctggcaaacatttttgtcaattttgaacacataaatttttaatggattcagtgtcaaatttaattgcttataaatggtgcaggttttaatcctcatgagtaagcactttaatgagcctatttgttgttattgttgcttttattgtacagagtaatcatttgcataatccgtttgtactgtaccattagcagaggacgcagggggaaattgtagaggggactgagtgcaaattgaaaaagagacaatgagaaaggtcgagagttgtgaaagaaagaaagagagagagagtagaaagaaagagagagaaagttagagagagagatatagagagagagagagagagaggagaaagagagagagaatccgttttgaaaaaagagagaccggcgaaaacgtgtgaaaaataaaagaattagagaaagaaaagggacgatgagagagagggtcttaaaatcgtagcgatttgcataaatttatgagcgatggaaaacgacaaattatgcggtgacagataaaataatcccccaaaatgttttcagttgatttacgaaataggtttttcatgaccaggattctacttttttcaattgaccatgttggattggtaaaaacccaactcgtacaatggaaataatttcttgagcttttgctcataactttaaaaccttttcataatgtttgcctgctaatagacaacattaattgcactcgaataataccaacattttgatggactttgttattctaaatccagttatgtgcccacgactgcaatggtccaaggctggtacttttctgtgttgagaccc

SEQ ID NO: 45430 - DNA, 891 bp, Heterodera glycines
  unsure (1)..(891): unsure at all n locations
cagcaaaaatgcaattcattttttcaatgttacaacagcggcgagctaatggggaaaaaggcaaaaacctttcctcccgaacggcaggggagagtcatcgccgcaaaaagctaatgtcgcgacggggagagcaaaaaatgggggaggggacgggagatgaattgctttccgtcggctgccatgtttggcacgaagaaaaaagaatggcaggacaaatgcaaaactttggacatatggaattaattaaagacgcagtcaaaagcggggaaattgcaaatttaaagaaaagaaaattcaaacattaatttcaattgaatcgggttcaattgaccacaaatatgcgcgaattacacaaaaggaaatgccggcaagagtgaaaatgatgccgccaattgtccaagcattttccgaaaaaaatgaggaccaactttgagggacaatttttggcttaagttgtccacaagtccatcccaacgttgtattcctttcttcggttggaaatattaaattagtcggctggcatggatgggcacaaaaatggtcacaaatttctttatccactgaaattcctttaatttgattttcttgaggggactctacgatttgaacgttcaaactcaatagcagaaagatcattagcaatttcatgcaagcaattcttttgtccggcccgcaggcatgggaaaaaataattaaagaaaaacttttggtttttggcatttaatatgaattttgcgtttgggttgaaagaaaggcaaaatatttcaggaataattcggaatgcattttggtcttctttggagcctatgattgccaaataagagggcggggnggtgaaatgaaaacattcgcaaacatgccggcacaaggaaatggcgaaaatggacaaaa

SEQ ID NO: 45431 - DNA, 930 bp, Heterodera glycines
aaatttttcaaaaaatatacaatatacctaataaaaaaatttctaaatattttaataggctaaattttttaattcttaaccaagtaaaaggtatttcacaaatgtttttagaatattcgcttgaaaaaattattcaattattttatcaaaatcttttttcgtcatttttcattattctagaacatttttgggaaaaggagtgactatttacacgttttttacagcgcgattttttcaaaaactttttgggaacttggaggagggtacagcggtggcgataggcgccgccgggaaatttttaaaaatttcagttcaatttattaacaaaattgtacaaaacttactagttttttgaaaaaaaaatttaaaaaatttccgacttttcatcaaaaatttcggaagtcggaattccgaccccaaaaatgtcggaaaccggaagtctttccgtgccatacctggtgcctatcgacatctgcgagaaattttatgaaatttaatgcgatttgttaacagattttgtctaaaattgaccaaatgacgcagtttttgactcaatttctacaggattattaagtaaaagcctatccggcggtgccgataggcgccgccgggaaaatttcacaaattttgaatgaaatttgcgatgaaaaatgagttaactttaattaaatttattatttaatttatttaaaaatatttggcattctgtcttagaaaaatagttcaaaaaaatcaataaaatcccgcataatcccgcacaaaaaatcaaatttgcggatcccgctgcgggattggaactcaattcccttttgcggggacgggatcccgcgggattaatcccgcaaatcccgcattttccaaaaaatgcgggattgcggactgggatcccgcaaaatcccgcgcgggatccggtcccgagccggtctctag

SEQ ID NO: 45432 - DNA, 1259 bp, Heterodera glycines
tttttattaatattaatttcaaaaaaataatttaattattttggcattttttggccaatattttatgccatttttttggctttttgtttataaatatctgccagccatttaaaattagtaatgttaatgagcacacagaacacgaacatttgcagtgccacttggcgatggcagctgctggatgggttgttgctgttgtgtcaaaaaatctttcgcaacggtgccaggactcaaccggcttacaatgcccggctgctgttgttcctgccctaagaaagtttttgttgtcccgttgggactcagatggccgaatagggtgtgcaaaaactttaaggcaccttaacattttaaatcaattcattcctataaaaaatattttactcggcgagttgtttattggcgttgcgtgcgatccttggacctttttgaacacttcaataaagccttccgcaaacgattcttgcgcacttgtcgggttttttgtgaaaaaatttgatggtgtcggtgtttcgaggatttgatgatgttgctgcggttgatgggcctggatttgctgttgttgctgtgtaccaactataaaatttcactgtcaaatggagaaggttggaaaaaataaacgcaaaagcaatggcccaaagaccgaacttttgaaaaagccgggcttctggaaagggaaccaggccaggaaaggaaaattttgttattttttttctttttaagtttttttttaaattttaaatttattgttttttttgggatcaaatccctgttctgtcggaatcccgttcccaagagcagggttggattcgagctttcacaaattgaaaaattcaggcaaattttctaaaaatcgttaaccactagagtaagtaacccaatgtttaatctctttaatcccgataaaaaccgatgagatcccgaccccgtcgggtctctaattcgatcaatgagttaatcaaagagctcttgattagaaaaatcaaatatttgaataaaaaaacatgcatttgaaaaaaagttttacgcatatacgcaaatacccgaggcgctaatgttgggactaatatttaaataattatttttatacatcacttaataaatttgcagcttagccatcatgttatactaccaaccagcgacataaaaatataggaaaaaaatgagcgttacatttaaaaaaggcaaatgaggggaaaggcaacgattgatgagtcacacaatcacctcacagtcttcgtccctcaattccccccccccct

SEQ ID NO: 45433 - DNA, 1744 bp, Heterodera glycines
  unsure (1)..(1744): unsure at all n locations
cagtggtcancaaaaaagaagaanncaaaattgattgcccatcccatttgtctttatattattatttctgcaaatttcaagcttttatattatttaaattttattattattttatgtttttttgtcaattttcaaaattaattttaattttgcatttaatgtctnaattgttttcncaaaaagccaattttcatttatattttaattatttttgtgagtttccaaaaaacgatttcgggatttgttttttgggtttttagcnccagagaatttttctctggggttttggcattaaataagcgaaaaattatggacctatttttgtttttttggggacttacaaatcctttttttgggttttaaaaccccaaattaattttaatttggggtttttgactcgacaaactaaattctggcactttcaaatcctttttttggggtttaaaaccccaaattaattttaatttggggtttttgtctcgacaaactaaattctggcactttcaaatcctttttttggggtttaaaaccccaaattaattttaatttggggtttttgtctcgacaaactaaattctggacgtacaaatcctttttttttgagttttaaaaccccaaattaattttaatttggggttatttttgctttttttgggttttttagccccagagaatttttctctggggtttttggcatgaaataatcgaaaaatgttggacttattattgtttttttgggttttttaaccccagagaatttttctctggggtttttggcatgaaataatcgaaaaatgttggacttattattgtttttttgggttttttagccccagagaatttttctctggggttttggcattaaataatcgaaaaattatggacctatttttgctttttttgggttttttagccccagagaatttttctctggggttttggtcatcagaaagtgaacatttgttggaattttttaagagattgctaagaaggtaaaaaaattattgtaatttgtagtaaatgatcagtataagttttcttcaaaaaaatgaaaaaaatttaagaaaattttcggttttttgccgaaagctggcactgcccaattgggtaatccagcaaccccgaacggcagtgaaccttgtgttaacgccttcggggtgcgcgcgcgcggggccgtgttggactctctgcagagaaccttcgtgttatcgctaagagttcaacatggccagcccttcccaagcgtagtcccccttatagatatgtttagttttaagaagtaggtcaaaattttaaaaaaaactaacagaaaagaatcgtttaaattttgtttaataacaagttttttttctgacaaattgttttgtaaaaaatctgtcatccttttagataaatgattttaactccggaattggttcacgggttaagaaattataaaatgtgttatcctaaaaaaatacttttttgggtgttcgggagcggcaaattcgacccagccaaaccggtcctaaaattctaaaaaaattgtattggcattaaattaaagatgctctatcgaacggcattagttttcagaattttagaccatttgggcggtctcaagatcagtttaagacctcgggatcgggaaactcggccgatcaaaaaggggtttaaaattctgaaattgatgccgttcgatagagcatctttaatttagtaaaagtttaatttttttagaattttagggccgngtttgtctgga

SEQ ID NO: 45434 - DNA, 961 bp, Heterodera glycines
atctccaaaattttgtcatcccttcagaactcattttagcgaaggtgtaaaggtggccttcgtaagacaattttactttttgttttttggttgcaattgggttagccatatctgaaaaatgtccaaatcagaatgtacatcaaattggttaactattaaaaaataataggatttggaataagtaaaattgtaaaaaatgagcgaatgttaattaaacctagcttatgccaagtggcgagggatccctcaggcttagtttttagaatcttaatttttaaaaaagcacacttttctatttttgggttggggcccaaacgaccccggggcccaaaaacgggggcccaaacgcgggggcccaaaaacgggggcccaaacgctctggtcccgaataattctatggccaaattaaacaacaaacacatttttaaaattagacgtaggtaaataaaagtaatcgttccatccgcccgaaccaattaattaattacccaaactaaaaattgaataaattgcgtttctccgctcgctgctcgaggcttaatgtttcatcttctgctgatcccttgctcatttaattaaattaaccgagagaagttgacattttcattcattctccgcacatttttttcatttttgttttaacattttgtcgtcatttacttattgagtcagttcttcagttttgtacgtctgccaccgccgccgccgccgttgctactgattttgcgggggatggaaagaaaatttattcgtatccgctgaatgaataaagcagcaaatgacaacgagcgccgatggatgaacgaagaaacacagagagagaagcaaatagagcagcaaaagaaagggaaatgatggcggagatggaagaaaagcaatcggacgacgacgaagaagaagacacaacgaatgaatgatgggaaggggaagggaagggggagaaggaaggggaagaagatga

SEQ ID NO: 45435 - DNA, 865 bp, Heterodera glycines
ctcaatggggtggcgcattggcagcattggccgcctctttcattgcccaccataaactcatcgccagtggagcccaattcaatcgacgaattcggctctacacattcggtgcggtgcactgcggagaccgtcggtgggcactcgaattgaaacgggcggtgcccgactcattccgagtaattaaccattgggacatcgtgccacaaattgcgagaagcgttcgcatcgattattaccattatggaacggaggtgaaggaaccaaagggaaagaaagggcaatcagtgcttttactttgtcaggtgtggtacaacaatttgatgttgaaagggcacccattccgacaatgccacgacggccaatccgccttctgttcggtggtcgttcaccctttgctttggaattggcttgatcatttgttttattttggcacttttgtgttcagttcttgtcaattgtgcatgatggcataacaaatgagcagacaaacacttatttatttattaagcatttaaatttgaattttaaatgaattatatacaattaacatttgcattgtgtgtgttttattcgtgctttccttcccctttcaatccaacgaaaatcggtactcatggactttgtatccacattttttttttttcgcatttttcaattttttttacttttttattgtcacaattgctttaaatatcaaataaaggagctttatgtgcttattggatacaattccgcgatttgggtccacaaattaaaaaaaatgtccggtcctccaaattgcctaccccacaaaaaatcggaaatgtatgaggaaaaaagtgatctttgctcgccaaatatcgattcgtgttgctgtttaaacttc

SEQ ID NO: 45436 - DNA, 1022 bp, Heterodera glycines
aatatatttgtgtttactggttagtgcttcaacactgacagtatttcttgtagagttcgacaccggttgacgttttcatttgaatttatttttatctgattaatgcagggtttctttatgttcttatttctaagaaatgttctgatttagggcgtattttcatccaaaagaatgaaatttctgaaaaatttggctaatttctaacaaaattcataaaaaaaatttcccccggtggcgcctatcggcaccaccggctcccaaaaaacctattttttcttaaaaaattagaatacatcaataaatttggtcattctttagacaaaatctgtgtaatttatgccaaaaggaattgaatcgaggcgatacattgactaaaggaatgtggagccaacacatcattcataaaaattaatttttttgtgagattttttggagataattcaaatcaacccccgcccccaaaatgcgcactaaaaaatggaaaataagcacaaaaagcctcaaatttaatggtgtaaaatgaccaaaatttacctctaaaaattcatgcctgctaaaattttctttttctctaaaaaatttcgaactcggaaattttttatttcttaattcatttagtagatcatccctctatatttctttattagtgttgtttggtcgtcgtctcttaacttagaacatagtgtgcgcttcttaaatatctcaagtggtaataaatgaaaaacaaaatctcgtaaacttgcgaaactcaaccaatactacaacaaacttttctaggtaatttgatgcgctaattaagaatgacgtcaaaaatttaagatatctacggttttttcaaaaataaaagctctaatttgtaaggggagaaagatgtcccaaccgctgctttcaccgttaatttctttacaaaaaacaaaaattcgttcataactagggctaataattttatgtagggttcggaccccgcccccgtcacccccgcccccgccgggggcgggacaggatttttggtctcacccccg

SEQ ID NO: 45437 - DNA, 1242 bp, Heterodera glycines
ccccgacccgatgcgcccagtttatggggagaccgaatcctcgggaatagcttccctatagcctgtactttaatttgcgttgatttttgctccccataattgtttgagtaccccaaacggacacttgaaaaaatcgatttatttttgttttcggggcagtccccccgaaccgatgcgcccagatttatggggagaccgaatccttcgggaatagcttccctatagcctgtactttaaatctgcgttggatttttgctccccataattgtttgagtaccccaaacggacacttgaaaaaatcgatttttttgtttcataaatatttttttcagaaagtgctctaaagcgcaccaaattttatttacaacttaattttagcactctgatgctttttctatcaaaaagggagatgaataaatttaaaaaaatttttaattcctttttaaacaggccaaaaattttaagcttgtgtggtaagtgtgaagaactgtgttcctccaggcaaaaaattctaagaaaatttataagcatttgaagggttctcagcagtttccctgcaaaatttggtgagcttctgatcagtctagaacgttgggtgatcaaatgcaaaaaataattaaaaaaaaataatgctggtgtggtaagtgtgaagaactgtgttcctccaggcaaaaaattctaagaaaatttataagcatttgtagggttctcagcagtttccctgcaaaatttggtgagcttccgatcagtctagaacgttggggatcaaatgcaaaaaataattaaaaaaaaataatactggtgtggtaagtgtgaagaactgtgttcttccaggcaaaaaattctaagaaaatttataagcatttgaagggttctcagcagtttccctgcaaaatttggtgagctttcgatcagtctagaacgttggggatcaaatgcaaaaaataattaaaaaaaaataatactggtgtggtaagtgtgaagaactgtgttcttccaggcaaaaaattctaagaaaatttataagcatttgaagggttctcagcagtttccctgcaaaatttggtgagctttcgatcagtctagaacgttggggatcaaatgcaaaaaataattaaaaaaaaataatactggtgtggtaagtgtgaagaactgtgttcctccaggcaaaaaattctaagaaaatttataagcatttgaagggttctcagcagtttccctgcaaaatttggtgagctttcg

SEQ ID NO: 45438 - DNA, 983 bp, Heterodera glycines
  unsure (1)..(983): unsure at all n locations
aggcactgcctctgacatgttttttatttatttagaaaaataaatttattttttttctttttgattattttaattgtatttcatcctgaaattttttaataaacattttcaaactttcaccttattaatttaaggcgaattttgccttttttaataaattctcttgtgaaaaggcaaaaaaataggctcttttaaatatgcctatttaaatgactttaattgctggcctttcgcttacgaccataccacgttgaaaacacgccatcccgtccgatctggcaagttaagcaacgttgggccttcttagtacttggaacggagacgtcctgggaatcgaaggtgttgtaagcttttttacttttttcacttataaatttatttaaattttcaattttttttggcttttttcaaaaaaattttgtctattttttcggaaggcactgcctctgacaatgttttttatttatttagaaaaataaatttattttttttctttttgattattttaattgtatttcatcctgaaattttttaataaacattttcaaactttcaccttattaatttaaggcgaattttgccttttttaataaattctcttgtgaaaatgcaaaaaataggctcttttaaatatgcctatttaaatgactttaattgctgtcctttcgcttacgaccataccacgttgaaagcacgccatcccgtgcgatctggcaagttaagcaacgttgggccttcttagtacttggaacggagacgtcctgggaatcgaaggtgttgtaagcttttttccttttttcacttataaatttatttaaattttcatttttttttggcttttttgaaaaaattttgtctattttttcggcaggcactgcctctgacaatgttttttatttatttagaaaataaatttatttttttctttttgattattttaattgtatttcatcctcgaattttttaatanacattttcaaact

SEQ ID NO: 45439 - DNA, 884 bp, Heterodera glycines
  unsure (1)..(884): unsure at all n locations
catttaatttcacagagaatttttaaatttatcttatatccaagaaaaatgactatctcttattttgagaaattttatacgttacaaatgctctcgagcaggataggaagtgcggtgcgcaatcgccatttaatttcacagagaatttttaaatttatcttatatccaagaaaaatgactatctcttattttgagaaattttatacgttacaaaagcgctcgagcgtgagagggagggcggtgcgcaatcgccatttaatttctcagagaatttttaaatttatcttatatccaagaaaaatgactatctcttattttgagaaattttatacgttacaaaagcgctcgagcgtgagagggagggcggtgcgcaatcgccatttaatttctcagagaatttttaaatttatcttatatccaagaaagatgactatctcttcttttgagaaattttatacgttacaaaagcgctcgagcgtgagagggagggcggtgcgcaatcgccatttaatttctcagagaatttttaaatttatcttatatccaagaaaaatgactatctcttattttgagaaattttatacgttacaaatgctctcgagcatgataggaagtgcggtgcgcaatcgccatttaatttcacagagaatttttaaatttatcttatatccaagaaaaatgactatctcttattttgagaaattttatacgttacaaaagcgctcgagcgtgagagggagggcggtgcgcaatcgccatttaatttcacagagaatttttanatttatcttatatccnnagaaaatgactatctcttattttgagaaatttatacngtacaaaagcgctcgagcgtgagagggagggcggtgcgcaatcgccat

SEQ ID NO: 45440 - DNA, 1219 bp, Heterodera glycines
cattcttaatgaaacacacttcatgttttgtgcacctatttttgaaaattttattaaatattcatggaaaatgtgtgggtattttgggatggttaatatccccccctttcttacaccaccccagttttgctttaataacattaatgttcatgttaattgttttgtttgtgatggtccgccatttatatgttgttcgtattgcagtcgaaatttgtgttttggtcattttctgccctccccccaccgttgtaacgaatgaattacaatttttgaccaattgatgtgaacagaataattaaatttgaaattttttaaaatttattttttttagaaatcatcttgctttgatataaatggtgccaaaagatagagaattttgtgctgatcatttataaaaaaaattgtgcctccagcacctttttaaaattttttatgaatttttgaaaaattaaccacttttatcgatttttcgaaactttgatcacttttttctgatcagttttggggtcagggccaaaaaagccgaaaattggcaatagcaaatcgactatgctctacacgatagaagtggttttaaagtgatttgaacacttacagttcgaaatgttcccttgtcagcatgctcttagatcgatttgtgagtatgtagaagaaaaccggagatgggcaatctcaactcttttaactgaccctacgggttttgccagaattacatttagaattcccaacatacatgctagaaaagtcggtccgaatttattcagagtttggccttgtgtccaaataaacagtactgattattcttttgctcctctagaggaaattaatcctggtaaaacaaaatgttttgataaaataccgattcgattcaaaacagcgggtaaagaaagatttgcgtacttagatccgtcatcgatgatagtctcccctactgctaagatggcgccttgcactcatttccggaagcaagtgctgcgaatttcgggagatgtgatggaagttgattaaataacagcccaaataaaaaaggtcaatgtaaaggaattaaataacttagaatttgattcgcaaaatatcccgacgatcactcctcatgtccgccaaacattcctcccagcttcctaaaaatttttacaaatgtgtcgcaaaaaagggaggtgtcaaagaaaatatcctaaaaatgtaaattgattgaaataggtaaaatttgcctataaaa

SEQ ID NO: 45441 - DNA, 557 bp, Heterodera glycines
aaaaattatttaaatgaactgactagataatatttaaaattggttatttctcttcctttcagtatccctgcaaagtttggtgcgcttctgatcagtttctgaaaaaaaagctaagcctaaactttttggcctgtttaaaaaggaattaaaaatttttaacaattttattcatctccctttttgatagaaaaagcatcagagtgcctaaactaacatgtaaataaaatttggtgcgtttcagaaccctttctgaaaaaatatttaagaattaattttgcaaaaaataaataaaaacgaaagactcagattttcgaaaatttttttgagccagctagctcggcgctcatttcagtgtaagttagtcctttaccggggagtatccctgcaaagtttggtacgcttctgctcaattagcaaaaaatatgagtgatcgaattttcactaaaaaagttaagcctacattttttggcatatttaaaaagcaattaaaaaatttttaaaatttaataattttcctgcaccgaaggtactcactcggcctcttcgcggcctcgtgg

SEQ ID NO: 45442 - DNA, 1482 bp, Heterodera glycines
tgaaaattcaatcactcatttttcgagtagtgatcacaatcgcaccagattttgcaggggcctaaaaaggtcaaggaaaggcgtctctgcgttgatttagcagtagtacctatgaatttaaattttctatgaatttttaaagttttttgaaatttttttaagtgcaaaagtggtggtgtctgcaaaaaattttcaccgggtttaaaaaatctaggaaaattagtaagcatttgtagtgttccgatacgtatccctgcaaaatttggtgagcccctgatcaattacaaattatttatggacgatcaaatttttagaaatttttatttatttttgcataattaattcataaatatttttttcagaaaatgctctgaaacgcaccaaattttatttacatgttagtttaggcactctgatgctttttctatcaaaaagggagatgaataaaattgttaaaaatttttaattcctttttaaacaggtcaaaaagtttaggcttagcttttttttcagaaactgatcagaagcgccccaaactttgcagggatactgaaaggaagagaaataacctattttacatattatctagtcagttcatttaaataatttttatccaaaaaatttttttttgtgtttcgagggcagtcctccttgatccgatgcgcccagatttatggggagaccgaatccttcgggaatagcttccctatagtctgtactttaattctgcgttggatttttgctcccccataattgtttgagtaccccaaacggacacttgaaaaaatcgatttttttgttttcggggcagtccccccgaaccgatgcgcccagatttatggggagaccgaatccttcgggaatagcttccctatagcctgtactttaattctgcgttggatttttgctccccataattgtttgagtaccccaaacggacacttgaaaaaatcgatttttttgttttcggggcagtccccccgaaccgatgcgcccagatttatggggagaccgaatccttcgggaatagcttccctatagcctgtactttaattctgcgttggatttttgctccccataattgtttgagtaccccaaacggacacttgaaaaaatcgatttttttgttttcggggcagtccccccgaaccgatgcgcccagatttatggggagaccgaatccttccggaatagcttccctatagcctgtactttaattctgcgttggatttttgctccccataattgtttgagtaccccaaacggacacttgaaaaaatcgatttttttgttttcggggcagtccccccgaaccgatgcgcccagattaatggggagaccgaatccttccggaatagcttccctatagcctgtactttaattctgcgttggatttttgctccccataattgtttgagtaccccaaacggacacttgaaaaaatcgatttatttttgttttcggggcagtccccccgaaccg

SEQ ID NO: 45443 - DNA, 930 bp, Heterodera glycines
ccgggtttaaggggaagttttccggaagggttttggcctccccaaaaatttgggggcattggttgggggggatgtgcccggaaaaaaaaaaaatcgattttttcaaatgtgcgtttggggttcttcaacaattatggggagcaaaaatccaaggcagaattaaagttcaggttaatgggaaagttattcccgaaggattcggtctccccataaatctgggcgcatcggttcggggggactgccccgaaaacaataaatcgattttttcaagtgtccgtttggggtactcaaacaattatggggagcaaaaatccaacgcagaattaaagtacaggctatagggaagctattccggaaggattcggtctccccataaatctgggcgcatcggttcggggggactgccccgaaaacaaaaaaatcgattttttcaagtgtccgtttggggtactcaaacaattatggggagcaaaaatccaaggtaaaaataaagtagaggtatagggaagctattcccgaaggattcggtctccttataaatctgggcgcatcggttcggggggactgccccgaaaacaaaaaaatcgattttttcaagtgtccgtttggggtactcaaacaattattaaaaatttttagatttttattcatctccctttttgatagtgaaagcatctgagtgcctaaaataacttgtaaataaaatttggtgcgtttcagagcagtttgtgaaaaaatatttatgaattaattttgctaaaaaaataaaatagtgaagctttaaaaattaataaaaaattttaaattcagaattactggagttagcatcatagcagtgcttttccttgtctttttgaggccctcgcaaaatctggttcgcttctgatcagtttataaagggaaaagttaagccttaaaattttttgcaaa

SEQ ID NO: 45444 - DNA, 1055 bp, Heterodera glycines
ttattagttgtttctaagaaataatgataggaagcttatctgaaatgtgtgctcacccaggttggaatttgtcatttcctgcaataaatgttttcatataaaggtttaaaaaatttgatcgggtttaggaacattcaacaaatgcatagataaatttttgaatattatacaatcgtgctttttgctctctatcaatttattataaaaaaattcacttctcttcgaaattgaaggcagaatgctcatttgaagctacgcaaatataaattaatatttgctataagaactgactatttagtcaacagaaaataaataaatcataaaattagaacaaaaaatgattttattttagattgcacacagaagatgcataataagctaatatattcgaatttattttgaaataactgttcaacagattattagttgtttctaagaaataatgataggaagcttatctgaaatgtgtgctcacccaggttggaatttgtcatttcctgcaataaatgttttcatataaaggtttaaaaaatttgatcgggtttaggaacattcaacaaatgcatagataaattttttgaatattatacaatcgtgctttttgctctctatcaatttattataaaaaaattcacttcccttcgaaattgaaggcagaatgctcatttgaagctacgcaaatataaattaatatttgctataagaatcgactatttagtcaacagaaaacaaataaatcataaaattagaacaaaaaatgattttattttagaatgcacactgaagatacataataagctaatatatttgaatttattttgaaataactgttcaacagattattagttatttctaagaaataatgataggaagcttatctgaaatgtgtgctcacccaggttggaatttgtcatttcctgcaataaatgtttcatataaaggtttaaaaaatttgatcgggtttaggaacattcaccaaatgcatagataaatttttgatattatacaatcgtgctttttgctctctatcaatttattataaaaaaattcacttc

SEQ ID NO: 45445 - DNA, 902 bp, Heterodera glycines
gctaggcttagatcacatgcgattttcggcttttgataattttagcgttcataatgggatgtataaaggcgattgtagaaggaattggatgcgctaaaattgtttgagaagctttttgagcgtaattacgatttttacttacaccattttttgctaggcttagatcacatgcgattttcggcactctgataattttagcgctcataatgggatgtataaaggcgattgtagaaggaattggatgcgctaaaattgtttgagaagctttttgagcgtaattacgatttttacttacaccattttttgctaggcttagatcacatgcgattttcggcactctgataattttagcgttcataatgggatgtataaaggcgattgtagaaggaattggaagcgctaaaattgtttgagaagctttttgagcgtaattacgatttttacttacaccatttttttctaggcttagatcacatgcgattttcggcactctgataattttagcgctataatgggatgtataaaggcgattgtagaaggaattggatgcgctaaaattggttgagaagctttttgagcgtaattacgatttttacttacaccatttttttctaggcgtagatcacatgcgattttcggcactctgataattttagcgctcataatgggatgtataaagcgattgtagaaggaattggaagcgctaaaattgtttgaggagctttttgagcgtaattacgatttttacttacaccattttttgctaggcttagatcacatgcgattttcggcactctgataattttagcgctcataatgggatgtataaaagcgattgtagaaaggattggatgcgctaaaattgtttgagaagctttttgagcgtaattacaatttttact

SEQ ID NO: 45446 - DNA, 1070 bp, Heterodera glycines
tgccattcgccgggatggtcggcgagaagatcctcccttgttttgggggagggcaatttttaggggttcaatcactggctttccaactgattttcaggcatgcacggcggcatctccgatcagatccaaagcctggaccagctcagcaacttgcttcgcccgcaaaccgacccaccacttcgttcgctggaaattgatctcctctgggctgacccgtcgaagagcatcacaggcgtcgccccgaacagcagaggagccggcgtcatgttcggcgcggacgttgtggagagcgtgcgcaacctgctcggcatcgactacatcgttcgagcgcatcaagtgagtttttttttggcttttcatttcacttgctttcaataattttccccttcccttctttttcagctcgtcatggacggcgtggaatacttcgcggaccgccacctgatcaccttgttctcggccccccgctacaccggcaagaacaacacgggcgccacgctgctgatcgcgccggacctgagccacacaatcacgcgcttcccgccggcctgaggacgacgagacggacggagacagaacgcacacacacacacacacacacacactaactacacacagaaggatggcggaactgcccgaattttggggtttttttataacttaaaacctacctattttggcagtttttagcacctaaaaatcgcatccctactgatgataattgatattttcaattgagtgacagagtgaaatcgaatcgaatcgagccaagaaaaaaatgtgcggaaaaacgaaaactacaattttgaacaggcctgatagcgtaacttgacgcagctttattcgtaattgtgccatcaacggctgacaattttcgttctgtgtcggctttcaacaacttcgtcgttggacctgttgagtcggccaattcctccccagccttcaaaaaaacaattgtcctcaattggccattccctttcggtgttttcactttgctgttgattctgttttctttggaattttcccttttcgtcaatttttcaaatgcaacattcaacggattccataat

SEQ ID NO: 45447 - DNA, 100 bp, Heterodera glycines
ctgggcgaagctcggcttagcactcgaagccgaagccgaaggcgaagccaaaaaaccgcgaagttttcgaagcttgaagtttcgcccagccctggttggg

SEQ ID NO: 45448 - DNA, 1161 bp, Heterodera glycines
  unsure (1)..(1161): unsure at all n locations
tgctcaaaaatcgcaacatttttntgaggaggcattaaaaaataattaaagcaaaaatgagtgataatcataatggaaatttttgatcattttttgctcaatttgataaataatcaaatgaatccgtccaattcagcagaaataaatgcgatcagccgactgaaaattcataaatttaaatagtcaccggaaaagaaaatgatgaatcctttgatcagccgggatggtcagcaggtgaatttcaaaattcaaacatcttttaaaagttggcataataattaccccccccccccacctcttcaaatgaatgctcccaataagggaggcaatgagtttcaaatccgcgaaaatgtgcacatccggtccccatgagaatgacaatctgtcacacacagtgccccccccccccaactttttgtgtgccgtctcaaaaaggggttggagagaatgagtgagcaaacacctgtggatgatatgggtgatggcaccgaaaacgggatgaatgaatgaatgagcgaacaaacggatgaatgaatgaatagaagaaatgaccaccaccgattggggagggggtgggggggggtggaggctctataaaatgcattatcatcattgatgatgatcatgaaatagcatgggcatcgatcattctctacttccaaccgtaaccgtatccgccaccgtatccatatccaccggtgccccatccaccgttgttaccccatccgccaccgtatccatatccaccgttgccccatccaccgttgccccatccaccgttgttgccccatccgccaccgtatccatatccaccgttgcctccccaattattgtacccatagccgtggcctcgttttggacgagcaatcgcagggcttaaaaaatgaaaaataaattttgcctaaatcaaatgccgaaaagtatgtttaatgttgatgcgtcactgactttttctgtccgccctccgttttttgcgctttatccgtcagccaacacagaaaaagacgaagaaaagcccaggagaattgaagagcagaatggttcttcatttttgagggccccgaaaaatgaattggcccgaggtccaaattccctccccttttatttgccatttccccttccaattccggccaaattgtctgaacctttcccccgtttttt

SEQ ID NO: 45449 - DNA, 1145 bp, Heterodera glycines
  unsure (1)..(1145): unsure at all n locations
aaaaaggattaataagatcatggggaccggagaaaaatcagacaaatacttttgcggggcttaaaaggcatggggattttaggattttaaaaattaaaaaattaaatataaggggatttctttccatggaaaaaaaacgaaaaattctttttttatacaaaataatttctgatttataaggcgacggttccatagggaaacaaaaaaacaagaaaatgttaattttttagaaaatttgtatgtgattttttacttttttttttaattatttatattttaatgtcgtcaatttattatataaataggattcatgtcttgtgtttttatttatcacatgctctcccgtgaaaatagtatagttgggcatctaatgaggtaaatgagatttatatgtgataattaattcattagttagtatatgaatttggtattcgtaattagttgatatagaaaatcgtattaatgatcagcgcaacagaaattcgcagtaatcatattatcatgatatttgaaattaaaaaaagttaaaaaatgttcgaattcgggttaggggttcgaaattggtcgaaatggaggcctgattcgtgctcagcgcctcaaaacacccctagaaacgtgttatagggattttcagaaaaaaaattaaagaaaaaactttcgggaccaatgatcgacatgattgcctaaaaaccatttccaaacccatacataaaggttcaccctttgttatttttttgggggctcccaacagcaaaaatgatttactctcttttgaagtccgtccgtcaatagaatttgatattttaatgggactgccgaggagatttacttgtcaaaacgacgtcttttcacttcattttatttaatattaaaatgcatccaatttaaaaattttatcaatacaaaaaccaaaataaatatacattttaaactttgccaaaaatttaattcaactattttatttaacataatgatcactgagcactattttttgaaatataaaaaattgaataattttaaaaattaaatttttttacaaaaattaatgttagtcaaagagttagtagctatccgtatcatagtttggaaacaaggngacgcagaaggacatgagtttgaccgctgcactgtcaatataattattt

SEQ ID NO: 45450 - DNA, 1112 bp, Heterodera glycines
  unsure (1)..(1112): unsure at all n locations
ttatttaatgatataaaattaatcactcaatttaagataaattattttcttcgattttatgagccaaattttttaattctttctgttcattaatttgatttattactcttttaaattatgaaatataataaattcgctttcatttcatttgtgacaaaaaataaaataatttttatcaaaaatattatttatggaaaaaattaatcactcaaaattaaattaaattatttacttcgattttatcacacaaaatttttaattctttctattcattaatttgatttttattcttttaaacttaaaaaatatacgattgattataaaaaaaattaaataaaaaaattaattttcttacaaaatatttattcaaatttaatttaatttaattaagattctttattctgcaaataataatgtctgttttgcacaaaatttcggctgcaaaaagccgacgaaattctctgtcagaacaatttcatatggctgaagaaatttgtgaggttttggaagaagcaaaaatgtatgtataaacgatgcttaattttaattattattataattatttatttattcagctttatccaacgacaaaattctactggatttccaccatcggatgtaatttggatttatttacaatttttaaaatttataaaaaaaaaatttcggagttttttatttaattaattcactgaaaagaatgaaaatgatttcatataaattaatttatagtaatactttattaaaattaattaatttattttttaaataattatgttgaattttgattagatttgttttcctcagtggacgcatttaaaacaatacaattcataaaaaatttaaaatgttaattatttcataattcgattttttattatttctatttatatttgttttttaattatttatttttctacacaaattttacacacattaatttaaattttaggattttcttttattatgctctctgcgtgacctattggaaaattcattggttcttgcaaaatcggcagcagaacaaactaattttgagagacgaagcaatgaaacatgtaaactttttttttgattttttanataataattaattgtttttaattacctaa

SEQ ID NO: 45451 - DNA, 745 bp, Heterodera glycines
  unsure (1)..(745): unsure at all n locations
acatacatcggctgacacagcgccagtgttggatggtgtaacgcattggagatatccactcaattttcacccatcggcaatcattgtttgttaaatttatgcatttgatttccaaaaattaaaatttttagctgcattcgggacaacaatntagaccatcaactcggaacacagctatgcggctaccccagtacagttcggcatcggctcaccggcaccatcaactcttacgtggacaaccactgtgagtccacgggagcagcttgttcaatactcgttgagcccgctatcgacttcggcagcgccttcaggcagaattatttaatcaattcatccgtttaaatttaataaaaaaaattctgttccagcatgggagtacgaaatcgttcgggcaccacattttccaattccgccggcactttttttcaaattgagggatatgcattaaaattgaaggattcgaaaaatatgatgattcaattgtccatgtcccgtaatgaattttatttaatgtttaataaaattattttttcaatgtgtgaagctgagggtgggtctatagagagaattcggatcacataggagccctaaaacttgttcaaattttgatcagcactctttttaggagcttcgaattttttttttgctattttatgtttatattgtgtctggggttaggaaatgggttatataaatgtcgtattcgtattcagcaaccccgaaaaccctaatttaggcccatttt

SEQ ID NO: 45452 - DNA, 1727 bp, Heterodera glycines
cgatccaagcgtcgagagagtagttggcgactctcttcttctccggcctgccgagtgggcagtctgcagctgcactccgtgcttttctgcatgccattgaagaagcgaagggccaacagggactggttttgggcgttgtcgtagcctctttccggtacgatggccaaatgatcagcagggagatgatttgtcctgaagtgcttcatgcaggcgctggcgattgtcatgcactgcttcagaacatcaattccgttgtgcgtttcacggccgtccacaggttcttgacgtcttgtgatttccaagaactcccgccgaaatgccaccagcgctgccattaagatctccacgtcattggtgcagtagctggccaatgcctcgtccagaaaaaatggttcactccgatgttgttcgtaccagttgtcaaactgtcgtctcttttctggcatcattccatgggcgaggtagtcgtcgggggtcggaaaaatttcgcggccatagttgtccgggcggttgaccatatgcgggaagaatggcttctcttcgacgtccaagccgtaggcggggaccagctgaccgagcgcacagggcatcaaattgaacgaatctcggaagacgatgttggggtgtcggttcttctgcgccctcagcttcatttcatacattttattgcccttaatttgtttatcagaataaaatatatgtaaaaacatactcacccgtctgatcatctccgggttatagccgcgacggaacagctcccggaatgtgatgaccatgtcgaaacggccaccaaaatgtgagtaggcgaaggtgttggccttgatcggcaagtcgttgatcaaccaaccaacaaatgcttgcatggggttgtcggtgaccacttgcttgtcaaccggagtgtcggtaaatggtcgttggcagaaggcaacggttcggtgtgggccgcacacccaacatccggcagttccttgcttccatctgccattttcaatgcaggcggggcaagacacttttgctgcaatgaagtttggctcgtggttgcgtcgttcaggcagatgagggtcagcctcgaggtcaaatgcaacgaaccgataagcgtccatctcctccttgggctcaaatggtgcaatgtagcagccgcgctctgtgttgtggaagttgttgcagagaaggcagaatttttctccgcaaacatgtccctttcgtttacgcctgctgttgtcggcaacgttccaaatcacaccacagtctttgcacttctttgagcgcgtgcagtagttggactgaagatggtgattgtagcatcccgcgttgttgaagtttttgtggcattctttgcattttcggaagaagtcaggctccgagggacacggaaacgcaggtccaacgcgcgagcacatcagacagtgcgctttgcaggactggttgtgttccgacggcttcttataaggcttctcgcactccaggcaatacttttttccaccaaaaagtccgctgaggaagtgtacaccgtcaaaatgactgttgttaaaataaagcgccaatggtgtgtcgtagttgtcatggccgcatttgtaaagtggtttgtagtggccagttgttccaaagatgaaaacagcaaagcggtgctgctgttggtgcgcgttgttccaatggttgatgaccagcggcacataagtgtcggcgtcgtatgcgtccaaatccagtggcgctctgatttgccgcat

SEQ ID NO: 45453 - DNA, 939 bp, Heterodera glycines
tggacatattaattttaacttaattagaaaaaaagtagctattaattgttaattttaattaattttattttatctattatatttaatgaagtttttaattcaatcagtaacttcagttttttatacctttattttcaaaaaaaattattaattttcataaataattttgttatagaataaacaagtaatgattatttttaattattattcacaattaattaaatattaaccaacgatttatttgataattccatttaacaattaaaaatgcactatatttctctttttagtgcgctcacagaagaagactgcagtctgcttggactgggctgccagtgacttcatccggaccatcagcacagccaccaacatgtgcttcatttgttttgaggtacaagggttcttttctttgttttagcttttttctcttttaagcagggacatggaaagaaagactgcagtcagatgcaactcagacgtcagtttgaggagatccgccagagcattggcaactctcagcgcgtcaccaatgcgtctgaccccgacaacgcgaaaaccttttgggcctcttgggacggcacccgtgatggtgccattcggcgccatcactacatgcagctgggcgaggaaggaaggtagttgcctttaataatgcaaatgcttttaattgttaatttctagaggcgcaaagagggagactgcagttggaacgggactgagcattggaccatgcgaagagatgcgacaggaagggtatgtgtgcattccatttaaaacatcaccatccacatagttgttggtatttggatggtaaccatccacataccacctgctatgcagtgacacatgtgtatagactaaattggcaactatccacataccaacagctatgtggatggtgaccatccacatagttgttggtatgtggatggtaaccat

SEQ ID NO: 45454 - DNA, 1193 bp, Heterodera glycines
aaaaaccccattcagcagattctcagttggatacgatcaataacagtataaaaaactgattggtaaaaataccaccctaaacttctgtaaaaagtcaactggacgaacggctgggccctgcttccgtctggctacagtctcgagagctaatttggcaaaagcctcattttaaagcctacctcgaaacaggataaaaaactgattggtaaaaataccaccctaaacttctgtaaaaagtcaactggacgacggctgggccctgcttccgtctggctacagtctcgagagctaatttggcaaaagcctcattttaaagcctacctcgaaacaggtacaataaaattcctaaaaaattatttgggctcctataacaacggcggcatcaaattcgggttcagcgcagccaaaaaccccattcagcagattctcagttggatacgatcaataacagtataaaaaactgattggtaaaaataccaccctaaacttctgtaaaaagtaaactggacgaacggctgggccctgcttccgtctggctacagtctcgagagctaatttggcaaaagccttattttaaagcctacctcgaaacaggataaaaaactgattggtaaaaataccaccccaaacttctgtaaaaagtcaactggacgaacggctgggccctgcttccgtctggctacagtctcgagagctaatttggcaaaagcctcattttaaagcctacctcgaaacaggtacaataaaattcctaaaaaattatttgggttcctataacaacggcggcatcaaattcgggttcagcgcagccaaaaaccccattcagcagattctcagttggatacgatcaataacagtataaaaaactgattggtaaaaataccaccccaaacttctgtaaaaagtcaactggacgaacggctgggcactgcttccgtctggctacagtctcgagagctaatttggcaaaagcctgattttaaagcctacctcgaaacaggataaaaaactgattggtaaaaataccaccccaaacttctgtaaaaagtcaactggacgaacggctgggccctgcttctgtctggctacagtctcgagagctaatttggcaaaagcctcattttaaaagctacctcgaaacaggataaaaaaactgatcggtaaaaaataccacccctaaacttctgtaaaaa

SEQ ID NO: 45455 - DNA, 525 bp, Heterodera glycines
  unsure (1)..(525): unsure at all n locations
tggacccgactgaactgtccgtcgagcaactgaaggcatttatcgctgaggaggaggaaattgctgtgccggaccaaagacttgtctttgctggtgattatggttttgttatttaaaataatttttaaaacatttaaaggttgccagcttgtggatggaactctgctcaggacttatggagttgatgctgattcaaccatccaccttgacctcaggttaacttaaggtttacaatgtgtgcaaaaatatttttagattgcttggtggtgggaaaaagcgtaagaagaagcaatacactggcccgaagaagcagaagcatgttcgcaagaaggtaatttgggtttttaggtctatggacgaacaattccaaacttaggtcaaactcgccgtgttgaaactttacaaggttgttagacattacaattgagagaataggtaaaattttgaagattgatgacaatggaaagattcatcgacagcgtttggaatgcaatttcgncagctgtggagccggtgatcatttac

SEQ ID NO: 45456 - DNA, 992 bp, Heterodera glycines
cttgtaaatgaaaaaaaaacactgggaaaatttgaaatttacataaataaaaatttttcaacatgccaagctccactgaaaacctctaaacaaacagtaacacgaaattaacttttcaacacaaaaaagcagcttctctaagcattttttccaatgttaccaccttttgccgctgagttttcacttcgtttgcatattttaaaatttaatgctaatttgactcaaaggcaaaatttaatttttaaatcgaaaactggataaaatttgacaattcatttttaacccttttcaaacggtcaaacccggacaaatttggtataattcgaaatttttcaggtcttaaactcacggagctctttcaaatgacaccaaatatcttatccgtacggtttgaaaaggttggaaacatagaactgtcaaattttggccaattttttgatttagaaaaacatttcgccaagaaattttcatttttactcgaaaaatttgttttaccctttacccctaaaactcaaattgacagctaattaaaaatttccctattttttagcgatttttttccaataaattactgcatatttaacaaaaatggccggctttctgatgaagcaaatggtgggcaataagtttgacgaggtgaccaacaaattgggcggcgatgatgagcaaaaaacggtggacggagaggacccggaggtgtgaaatatgaaaaaaattggcaattctcggtggataaaaatggcaaaaaattaaaaatggcacacttttgccgttatgtaccccgaaaaatatttgatattttttaaaaaccaaagttggaggaatccttttggtttgcaaattgcaaattttgtcataataaatcttttatatggcttttcggggtcgctgatcatgaatctgccactattttttgaccaatccctaaccaaaactcgaaaaagtcaaaaaaatgaaattttaggggttagggttttttaagattggaaaag

SEQ ID NO: 45457 - DNA, 656 bp, Heterodera glycines
acaatcactaaagttttatctaaaacataacgcacattattgtgactcaccaaagtcacagaacaatcactaatgtttatcagacatgacctatatggcaaatttatcacaacgcttaccaatccacgtacaaaagataccgtcaaagttgatgtagtgaatttcccgaaagtgatcaaaaagttgagtggccgatcgacaggttcaacacttcacaattgtaatccaacagcatttcttcaatatgatggttcccatttctaaattttacatcatattaacagaacaaaccaaaatataactcaaaacaaattaatcccagtaaactttgatgacgcaattaaaatcagtctgagaaagctgttgattgatggccacggcagattccacacttgtgaatgaattcacaaccaatagtacccaatgagcgatcacaaaactttagttcttcataagtcatacctaaattttataaacataattttgaataaaaaaccaagcaaaacaaacttcaactaaaatcacttcatccaaagtattgggtaagacatggatggccgaccggcaggtaacgaagaaaaaaaaatgccgaagcggcagaaagaaagtcaataaactcacctgtagaaaattcaacttaaggaattaattcattt

SEQ ID NO: 45458 - DNA, 969 bp, Heterodera glycines
tttcatcgaacctagcgcactaaaatcgatataatctccttaaattttgcaggccttctccattgtaaaggactaacttaacctgaaaaaatgccaacgcttgttgtttttaaaatttttcgaaattctgactttttcattacttatttattttttgcaaaattaacccacaagtattttttcagaaagtgctctgaaacgcaccaaatgttaattaaaagttaaataaggctctctgatgctttttctatcaaaagggagatgaataaatattttaaaaatttttaattcctttttaaacaggccaaaaagtttaggcttatattttaaaaagtttcatcgaacctagcgcactaaaatcgatataatctctccaaattttgcaggccttctccattgtaaaggactaacttaacctgaaaaaatgccaacgcttgttgtttttaaaatttttcgaaattctgactttttcattacttatttattattttgcaaaattaattcataaatattttttagaacgtgctctgaaacgcaccaaatgttaattaaaagttaaataaggctctctgatgctttttctatcaaaagggagatgaataaatattttaaaaatttttaattcctttttaaacaggccaaaaagtttaggcttatattttaaaaagtttcatcgaacctagcgcactaaaatcgatataatctctccaaattttgcaggccttctccattgtaaaggactaacttaacctgaaaaaatgccaacgcttgttgtttttaaaatttttcgaaattctgactttttcattaattatttattattttgcaaaattaattcataaatattttttagaacgtgctctgaaacgcaccaaaatgttaattaaaagttaataaggctctctgatgctttcactatcaaaaaaggaagatgaataaaaaatcctaaaaatttttaattggcttttt

SEQ ID NO: 45459 - DNA, 977 bp, Heterodera glycines
cttcagagcacgacaaatatttcaacaaaaatttttaaaaattgactagagcaatcgaacgctaacggacgacctaatggaaaaaaatccccgaaggagagaatttaattaaatccattccttcggggaaccgtgccgggtgccgcggggtaagcagtgctggttcgtttcatcacggcaccgaaccttttggctagtcagcaatcgttgcttaacttgccagatcggacgggtgcgcatgattccactgttccaagcaccccaccaaaagcaaaacgatataaccaaaatataaggaaaaattttttctccatcttcctttttgatactaaagcatcagagtgctaaaattaagttgtaaataaaattttggtgcactttagagcactttctgaaaaaaatatttatgaaacaaaaaaatcgattttttcaagtgtccgtttggggtactcaaacatttatggggagcaaaaatccaacgcagaattaaagtacaggctatagggaagctattcccgagggattcggtctccccataaatctgggcgcatcggttcggggggactgaccgaaaacaaaaaaatcgattttttaaagtgtccgtttggggtactcaaacaattatggggagcaaaaatccaaagcagaattaaagtacaggctatagggaagctattcccgagggattcggtctccccataaatctgggcgcatcggttcggggggactgaccgaaaacaaaaaaatcgattttttcaagtgtccgtttggggtactcaaacaattatggggagcaaaaatccaaagcagaattaaagtacaggctataggggaagctattcccgaaggattcggcctccccataaatctgggcgcatcggttccggggggactgcccccaaaaacaaaaaaatcgattttttcaagtgtccgtttggggtactcaaacaattatggggagaaaaaaatccaacgca

SEQ ID NO: 45460 - DNA, 910 bp, Heterodera glycines
ccgaacaaaaaggaacttcaagattttgctcttaacgttagagccaaatcacccagacacgaaagaatacaaatatgcctcacccaattggggatcttggctcgacttttcagtgatctttcgcacctacttcctcccctttatacacacatttggtgtgttataaaattattagaaaattaattattattttttacgatgagcagaattgtaaattagacaaacaggaagttggcaacatttaacaaatatttattaatttttaacaaatgttttatagaatatctcaaccaatttattgctgcattggttaattaatttttcgcgggcgttttcgaaattccaaaaaatttgagaatttattgaatttttgccgatttccaattatattcattaacaacagataaaaatttcaattaatttaagccaaattatattttagaatattgtaaaaattcaaatttctgggtttgaccatggtttggtggctatttatggcatcacttaacacactttctcgcgttcagcatttcgtttttaactgctggctgcacaacacagcgttacattgctacttatttggatacaaaacttgaaaattttccgaaattattttaaaaattgtaaatatttcctaggtatttcgccagggcatatttttaaagcttaaaaatgacagaaagcagctatttattcattgcctgcatattttagagatgatttaaaaatctgacttttgctcgctttaaatgcattcgcgcaaaaaatcgccgcgagtgtttgtttcgcggtcgcgctacacacctgctggtcataactagagctgggatttttatgtttttaatatcttttatacgacttagttatggcgagagaagcacaaaaatagcattttctccgaaccagtttt

SEQ ID NO: 45461 - DNA, 996 bp, Heterodera glycines
  unsure (1)..(996): unsure at all n locations
gacccatctaaaaaatatgaagtaaaatgagacaaatttgaaagttccagctgtttttttttaaaatataatcnccaccttggagcncaaagaaattgcattttccgtccaaatgccgaaaggtcgaaattacgcagccaaatcggatgggcaccgtcacgcaaagaaacctaaaaacaaaaaagaaacatttatgtgaaatttgggaataggaaaataatcgaaaaatgaaaatggcacatttgatgagcaattaaagtggacggagagcaatgcccccacaaaactgaccatcactccgccctccattatctgcacaatctccgccttgtaaatggctccgaattggtaatgctcctcctgacgttcctccagcaatctttgaaagaaaagtgaaatattaataccataaagcatttgaaatggagcccctttttccaccgcttactttgccaacatttcgttacacttttccatgcattttttgtcgggtgcaaacagcaaaatattggcttcatcttccgaacttatcttaaccatggaaagggaggcgtaaaaacaatgaaaactaattaaaatcttagtcgccataattttttaacaccttcacgccggtctccgcctcgagcagtttgacgttgtaaccgcccgaccggaaaatgatcgactttttgtagacgggcaatggcattgtttcgacgatgggcacggacgctttgaactcggcccttttggaacaaatcattcacattaagcttaaagttttgtgtaattttttcattacgcttaattccggatttttcaaaaaagggggaccggggaaacctaacccaaacttgtgaccataaaattattaagaattattgcacaaaccgtggttccgcgattgtgtcgcgcatcagtcccagcagatggacaatgccctttttgccctggagaagagcgtcgcgaagaacactanaaatacatggaaaatttggcaacgaattccgatgg

SEQ ID NO: 45462 - DNA, 1166 bp, Heterodera glycines
  unsure (1)..(1166): unsure at all n locations
tttcagtcactgcaattactgtacttccgcgcaatgcgcgactttgactttctgaaggaaatgcaacgcgccgaaatggaaacaaataagggatttcggcaaatggttgatctcacagaaaattgttataaagacggattcaaacaaccgctgatttggttttgccaacgagcggtaaaaaattgaatttcaatttaaatgaaccttttaaatattttattttaaatttaaataaatttaatttatttgaggattatatgacacatcaaagtgaagaaaatgatgagaagaaattggaattgaagcaggtaaaaattgaattttatttccaaaattttgtaaatttgactaaaagtctaagaaataaaacattttctttttctggtggaaattaatgccggcccaattggcggccttggcacttcgtcccgtgtcactatgcttcatcagcatgtcctttccatggccaatgccgacacttcgcccgcggcgctgccgcctaatcacacggacacaatggtggccaaagcactgcacatggcatggtaaaagcaaaaaatgttaattaaaaatcactgaaaagttctgaaatgaataaactgacaatttttttagaaaacggaaaaaaatatcgaatttcaccccagcgcatccgaatatttgcggggtggcgaaagtcgataaaaatttatataattttgaaatttaattctcgggttttgagaaaaatttcccaggttaaatttcaattaaaatttcaaaagaaaatataaaaactttngggggtggaagtttgggcgccagaaatttgggcaccaaattaaggatttaaaaaataaaaatatttttatttgtctataaattgcaaccatctaatttaaaagcattgtaaatttaatcaagttagggatagaaagttttttaatgaatattcactctattaagcatgcttattttgctaaactcattaccattctttctatatcaatgccatacatatgtattatttataatttatgacattacaaggctcggtctgtttaagacttanaatttcatgagtttanatttanatagaatagacgggtctcttcttatttcggaccncactaagcccggtattcaggtctaagtccaaacagaaactagtatacgtttaactatac

SEQ ID NO: 45463 - DNA, 1083 bp, Heterodera glycines
aaaaaatgaaaattttgaaatcattttccccctccttttccccggggttttttttttaaatttttttttccccaataacttttcaaaccccatttttcgcacgtggatgtttttttatgaaattctgaaccggtttgagtagattagactagaaaaaattgaaaattttgaaatcatgtttcccactcccttctcccaggggtattattttgtaaagtctttttttccaccaataaacttgtcaaaccccatttttcgcaccgtgaatgttatttttattgaattctgaaccgttttgagtagattagactataaaaaattgaaaattttgaaatcatgtttcccactcccttctcccaggggtattattttgtaaagtcttttttccccaataaacttgtcaaaccccatttttcgcaccgtgaatgttatttttattgaattctgaaccggtttgagtagattagactagaaaaaattgaaaattttgaaatcatgtttcccactcccttctcccaggggtattattttgtaaagtcttttttccccaataaacttgtcaaaccccatttttcgcaccgtgaatgttatttttattgaattctgaaccgttttgagtagattagactagaaaaaattgaaaattttgaaatcatgtttcccactcccttctcccaggggtattattttgtaaagtcttttttccccaataaacttgtcaaaccccatttttcgcaccgtgaatgttatttttattgaattctgagccggtttgagtagattagactagaaaaaattgaaaattttgaaatcatgtttcccactcccttctcccaggggtattattttgtaaagtctttttttccccaataaacttttcataccccatttttcgcaccgtgaatgttatttttattgaattctgaaccgttttgagtagattagactagaaaaaattgaaaattttgaaatcatgtttcccactcccttctcccaggggtattattttgtaaagtctttttttcccccaataaacttttaaagccccatttttcgcaccgtgaatgttatttttattgaatt

SEQ ID NO: 45464 - DNA, 766 bp, Heterodera glycines
ctttctgttcttattccgctttctctttctgttcctcttccactttctcttccactttctgtttctcttccacttcctctttatgttcctcttcctgttcccctttttgttcctcttccgctttctctttatgttcctcttccatttctcttccactttctgttcccctttctgttcctcttccgctttctctttctgttcctcttcctgttcccctttctgttcctcttccacttcctctttctgttcctcttccgctttctctttctgttccgcttccgctttatctttctgttccttttcctgttacctttctgttcctcttccactttctgtttctcttccactttctgttcgtcttccacttcctattccactttctgttcctattccactttatacttcccctttctgttcctcttcctctttctgttcctcttccactttctctttctgttcctcttccgctttctctttctgttcctcttcctgttcccctttctgttcctcttccactttctttttctcttccactttctgttcgtcttccacttcctgttccactttctgttcctcttccactttctcttcccctttctgttcctcttcctctttctctttctgttcctcttctgtttctcttccactttctgtttctcttccacttcctcttcctcttgccctttctgttcctcttccactagatcttccactttctcttgccctttctgttcctcttcctaaagatgttcctcttccgctttct

SEQ ID NO: 45465 - DNA, 1272 bp, Heterodera glycines
caattatggggagcaagagtccaacgcagaattaaagtacaggctatagggaagttattccagaaggtttcggtctctccataaatctgggcacatcggttcggggggtttgcgccgaaaacaaaaaaatcgattttttcaagtgtccgtatggggtactcaggcaattatggggagcaaaggtccaacgcagaattaaagtacagactatagggaatttattccggaaggtttcggaaggattcggtctccccataaatctgggcgcatcggttcggggggactgcccggaaaacaaaaaaatcgattttttcaagtgtccgttggggtactcaaacaattatggggagcaaaaatccaacgcagaattaaagtacaggctatagggaagctattcccgaaggattcggtctccccataaatctgggcgcatcggttcggggggactgccccgaaaacaaaaaaatcgattttttcaagtgtccgtttggggtactcaaacaattatggggagcaaaaatccaacgcagaattaaagtacagactatagggaagctattccggaaggattcggaaggattcggtctccccataaatctgggcgcatcggttcggggggactgccccgaaaacaaaaaaatcgattttttcaagtgtccgtttggggtactcaaacaattatggggagcaaaaatccaacgcagaattaaagtacagactatagggaagctattcccgaaggattcggtctccccataaatctgggcgcatcggttcggggggactgccccgaaaacccaaaaaaaaattttttggataaaaattatttaaatgaactgactagataatatttaaaataggttatttctcttcctttcagtatccctgcaaagtttggtgcgcttctgatcagtttctgaaaaaaaagttaagcctaaactttttggcctgtttaaaaaggaattaaaaatttttaaaaattttattcatctccctttttgatagaaaaagcatcagagtgcctaaactaacatgtaaataaaatttggtgcgtttcagaaccctttctgaaaaaatatttaagaattaattttgcaaaaaataaataaaaacgaaagactcagattttcgaaaatttttttgagccagctagctcggcgctcatttcagtgtaagttagtcctttaccggggagtatccctgcaaagtttggtacgcttctgctcaattagcaaaaaatatgagtgatcgaattttcactaaaaaagttaa

SEQ ID NO: 45466 - DNA, 1707 bp, Heterodera glycines
ccccccccccccaaacaaaaaaacaaaaaaaaaaaaaaaaaaaaaaaaaaaaatttttttgtaaaaaaaaaagagaaaaaaaaaaaaaaaaaacccccaataaacccctggggggtttttttttaaaaaacacaaaaaaaaagggggggaaaaaaattccccccctttaaaaaaaaaaaaattttttttttgaaaaataccaattcccccaaaaaaaaaaggagaaaaaatttccccccccttgccctaggcctccgggccagccccccggttcattgggaaaacaaagttttttttccccccgggccagggggcgggttccggggataaattacggaagttcggcgtgcttttaccaatggtaattattccatatccagtttccgaatttcaattcgggtgggttcctttgtaaggtatataaaaataaaaaaataatcatttctctaaccaatgttctatttgtacttcgaaaatgtgatttaattactgtagaaagtattcaaattcgtacaaaaaaaataaattaattaaaaaatgtaagctaggggatgtatctaattcacaaaaaataatttccttttaaacagtcgatttctttaattaattcattgattaccttaccattctttcaatgcttatttcatttgtaaatcaaaacatttttacatactttacaactttctcgttattgtaattttcatctattattatttttctgttattagttcaaattttatgttctttaaagaaatttttatttttaataatagaaaattacctaatctcttaggaatgttttcatgcaatgagattttttagttatattttattttttcataatatatcccgatattgtttaattctgcaaccaaccggtttttaaatcatattgtattataaggttcaaataatttcatttgtttccatgtttaaaataatatattaatttaaacaattaacaaattgttgaattgtgattttttaaattatatttatagtgattgaatttgctttaaaaatattttaaataagaatatattgtttaattcattctgtaacgatgatcaatattttatattcggtgtttacattttttttaatatttggcaattcttatttatttgtttaaaagtttgaaaatttaccggatatttcctgccaaataaaattgtatttttgaaatttttttaattaattaaatatttcactaattgttattggttatttaggatttttaaaattatttctttatgagatctcgaataatagaaaaaagaaaatttaacttattttaaacaaatatttaagttcttttttaatattttcttgatttttaaattttttagaaaggaaatcatgataaactacttttttaaacaaaaaacccgttaccatatataataaaataaattatactacattcttaatctaatatgttaaattaataagcaatattttataagatttcttcgatttcgagtaattgacagaaactgctccatttcgtaatgactgatttttgttttacagaaataattttcgaacgaattctaatattgcttatatattaaataaattagttttatattaaataaaaaggtaaaactattgggacagcaattaggtttactttatttaaaattatatttttaatttcctctaaacgcaaaaaaaattttattaatattttttaaagttaattaa

SEQ ID NO: 45467 - DNA, 1093 bp, Heterodera glycines
ggacattttccgctttttgttaacctctgagaatcctcatacgctctttttcttcttgtctccaacgactttgtgccctaagtgagtaaagtgatcgcaaaggcaaaggatgaaagatatggatgataataataaagtggagaaatgaaatgaaatttaaattaataaataattaaatgcaaatttgtttaaaaattatttcctccgtctcttctgtttttggcatttaattctttcagcattctctggcatctcggctgcatcggtcgtgggcgccgacaaactcagtcaattttagctgggcatcggaattgacattagagaaagacagctaattttttcaaacatggaccaaggatttaaatgcaaaaatatgtgcggtcgtctgttagagattgaaaacgacaggaaaatctgtgttttcaaaactgaaaatattttgagacaatgtagtcggattaaagaagttgtcaaagaaaattgggacatgaatgtatttatccaagggagcatatacaatggccttggaagaaaagaagttatgataaactcaaaaggaataccgaatgattggacaaaagacgacagttgccaattttttgacaaattgcgaaaaaagttaagagaatctggaatggcattaacccggactctgataatcccttcccgaaatgtctccattttggaaatcacaattaattctgatgaccaagaaataaatgctcaaattagttgcaataatttgattggattgattaattcgaaatggttggcatgttgtgtgcagttggatgtacgatttaaaactttatattttgccattttggaatgggctgacgttttaccaaatttgatcaaaattttaccagaaatttttgaaattcgaaatgttacatacacaaagaaacaaatttttgaagtactgaaacaaaaacttatttgggagacaaccaattcccagagcatttcttcactactcattggattttttgaattttatacaaaaatcaatttagaagagagccggttgaatatgaatgaaggaaaaatcgatttttgggagaaagtgctcaggaaatgaaaatgcatttat

SEQ ID NO: 45468 - DNA, 1397 bp, Heterodera glycines
gttttcggggcagtccccctgaaccgatgcgcccagatttatggggagaccgaatccttcgggaatagcttccctatagtctgtactttaattctgcgttggagttttgctccccataattgtttgagtaccccaaacggacacttgaaaaaatcgatttttttgttttcggggcagtccccccgaaccgatgcgcccagatttatggggagaccgaatccttccggaatagcttccctatagcctgtactttaattctgcgttggatttttgctccccataattgtttgagtaccccaaacggacacttgaaaaaatcgatttatttttgttttcggggcagtccccccgaaccgatgcgcccagatttatggggagaccgaatccttcgggaatagcttccctatagcctgtactttaattctgcgttggatttttgctccccataattgtttgagtaccccaaacggacacttgaaaaaatcgatttatttttgttttcggggcagtccccccgaaccgatgcgcccagatttatggggagaccgaatccttcgggaatagcttccctatagcctgtactttaattctgcgttggatttttgctccccataattgtttgagtaccccaaacggacacttgaaaaatcgatttttttgtttcataaatatttttttcagaaagtgctctaaagcgcaccaaattttatttacaacttaattttagcactctgatgctttttctatcaaaaagggagatgaataaatttaaaaaaatttttaattcctttttaaccaggccaaaaattttaagcttgtgtggtaagtgtgaagaactgtgttcctccaggcaaaaaattctaagaaaatttataagcatttgaagggttctcagcagtttccctgcaaaatttggtgagcttctgatcagtctagaacgttgggtgataaatgaaaaaaataattaaaaaaaaataatgctggtgtggtaagtgtgaagaactgtgttcctccaggcaaaaaattctaagaaaatttataagcatttgaagggttctcagcagtttccctgcaaaatttggtgagcttctgatcagtctagaacgttgggtgataaaatgaaaaaaataattaaaaaaaaataatgctggtgtggtaagtgtgaagaactgtgttcctccaggcaaaaaattctaagaaaatttataagcatttgtagggttctcagcagtttccctgcaaaatttggtgagcttctgatcagtctagaacgttgggtgataaaatgaaaaaaataattaaaaaaaaataatgctggtgtggtaagtgtgaagaactgtgttcctccaggcaaaaaatgctaagaaaatttataagcatttgtagggttctcagca

SEQ ID NO: 45469 - DNA, 423 bp, Heterodera glycines
gtgcagagggcaacggagatcgatatatctacaaagtcgatgaaatgcctaaatcatcgtgagacacagaaccgtatttaaggagggggggtacgtaccccgtgtaccccccctccctaaatacggtactgcctctcccgatgatttaggcatttcccccaccccgttgattcattggttccgctggtctaacaaatatttccgaatgaccactccccccgggcaccttccgttgcgtcttccgctgcacgtgtttgtcctcgtctcgccagtacgcgtcttccttcgcctgttcctcccgtgctcgctcttccgtctttgcctccgttttacgcgctcgtgacaccgccgatttggtgttttcgccctggaatttccgcaccactcgataattttatatttttttttttttttttttttttt

SEQ ID NO: 45470 - DNA, 733 bp, Heterodera glycines
acgtgtcaaagggtgtgcatctatgcgactcgctgtgcttgcccactgcatttcaaatagctggtaatttttatttctccggcctaatccagaaaaaatcactatctctttttttggaatattttacgtgtcaaagggtgtgcatttaagcgactcgctgtgcttgcccactgcatttcaaatagctggtaatttttatttctccggcctaatccagaaaaaatcactatctctttttttggaatattttacgtgtcaaagggtgtgcatttaagcgactcgctgtgcttgcccactgcatttcaaatagctggtaatttttatttctccggtctaatccagaaaaaatcactatctcttttttttggaatattttacgtgtcaaagggggggcatttaagcgactcgctgtgcttgcccactgcatttcaaatagctggtaatttttatttctccggcctaatccagaaaaaatcactatctctttttttggaatattttacgtgtcaaagggtgtgcatttaagcgactcgctgtgcttgcccactgcgtttcaaatagctggtaatttttatttctccggcctaatccagaaaaaatcactatctctttttttggaatattttacgtgtcaaagggtgtgcatttaagcgactcgctgtgcttgcccactgcatttcaaatagctggtaatttttatttctccgggctaatccagaaaaaatcactatct

SEQ ID NO: 45471 - DNA, 981 bp, Heterodera glycines
ttccattaaattttccatcgaaaaaataattttattttcattttctgtctgtactgtaaaaaatactgtaaaacccttatacataaatccaatttgaaaaaaataattgtgttttataaaattcacagaaaatgccctcctgctgagtatggcaaccaacacgaaaaggtgcccgcccccttcgacaaatgtcgaactgcttttgcccaaaagcagtacgttaggtcatcgtccagccacaacaacaattactgtgccaacatgtccgtgccgttgccactggctgctgctgttgaccatcattagcggcactttgatgtcggttattagcgggtccatcagcggcataagtgacagaagccgacggcaaagtaaatttaaaaagcatatttcctttttgcataaaatttgtatgccattatttttattaaagtgccagcaagttcgtcgggcactgtaaattctgtgggcaataaaacggtataatactaacttttattgattaaaaatgggtaaattcgacaaattgttcaaggattccaatttcattgtcgatgagtaaaaaaaaaatttattattgtatagcattgattactgtaatcccgtaattaacgttttcggaaatatttattatgcaaggctagtgataatatgctcataatgtaaattatccatggttttattgaatgaattcaacaactagtcaatgtcggcatcgaacgccctttggaaggcacccgacggaacagtgggtggcaatggtataaggaatttgatgaatgattttaatgattttaatattaccacaaaggcagttcaattgggacggcgggcgggccgggcccgagcagtgttttggccggttcgaatgccaaagttggcggtcagagtgccaacggggaaaccggcgcgcttagcttgggcggcacacggtccgagtcgttcggatcgtctagctcaagtctgcttgtttaaaactca

SEQ ID NO: 45472 - DNA, 1111 bp, Heterodera glycines
  unsure (1)..(1111): unsure at all n locations
gttttgagtagattagactagaaaaaattgaaatctactgggcatgnnnnncactcncnncncnnaggggnannatcttttaaagtntttttttnnnnaataaanttttnaaannnnatttttngnanngtgaatgttatttttattgaattctgaanngttttgagtagattagaatagaaaaaattgaaaattttgaaatgatgtttgngagtgggttgtnngaggggtattattttgtaaagtgttttttttaaaataaagttttgaaaggnnatttttggganngtgaatgttatttttattgaattatgaagaggtttgagtagattagaatagaaaaaattgaaaattttgaaatgatgtttnnnattttgttatnggaggggtattattttgtaaagtntttttttgggaaataaatttgtnaaagagnatttttagnagngtgaatgttatttttattgaattntgaagngttttgagtagattagaataaaaaaatatgagtgaataaacttttgttaaaaagttaagnntaaaattttttgtaaagttaaaaagnaattaaaattttatgaaagtgnattattgatagaaaaagaattagagtgggtaaaataagatgtaaataaaatttggtgggtttgagaaaaatttttgaaaaaatatttatgaattaattttgtaaataaataaaaaagaaagaataagatttttgaaaaatttttttgagttagataggtagggggttattttagtgtaagttagtattttaaaggggagtattnatggaaagtttggtaagtttatggtgaaattagaaaaaaatatgagtgatagaatttttattaaaaaaagttaagtataaattttttggnatatttaaaaaggaattaaaaaattttaaaatttaataattttggtgtagngaaggtattgagtaggtttnttagngggatngtggtggganttnganaagatagtgttgggaggggattgagaggaagagaaatattttaataaaaattttgaaaaattgagtagagaaattgaatgttaagggatgagataatggaaaaaaattggagaaggagagaatttaattaaa

SEQ ID NO: 45473 - DNA, 1078 bp, Heterodera glycines
ttttgagcgtaattacgatttttacttacaccatttttgctaggcttagatcacatgcgattttcggcactctgataattttagcgctcataatgggatgtataaaggcgattgtagaaggaattggaagcgctaaaattgtttgagaagctttttgagcgtaattacgatttttacttagaccatttttttctaggcttagatcacatgcgattttcggcactctgataattttagcgctcataatgggatgtataaaggcgattgtagaaggaattggaagcgctaaaattgtttgagaagctttttgagcgtaattacgatttttacttacaccattttttgctaggcttagatcacatgcgattttcggcactctgataattttagcgctcataatgggatgtataaaggcgattgtagaaggaattggaagcgctaaaattgtttgagaagctttttgagcgtaattacgatttttacttacaccatttttttctaggcgtagatcacatgcgattttcggcactctgataattttagcgctcataatgggatgtataaaggcgattgtagaaggaattggatgcgctaaaattgtttgagagaagctttttgagcgtaattacgatttttacttagaccatttttttctaggcttagatcacatgcgattttcggcactctgataattttagcgctcataatgggatgtataaaggcgattgtagaaggcattggaagcgctaaaattgtttgagaagctttttgagcgtaattgcgatttttacttagaccatttttttctaggcttagatcacatgcgattttcggcactctgataattttagcgctcataatgggatgtataaaggcgattgtagaaggaatggaagcgctaaaattgtttgagaagctttttgagcgtaattacgatttttacttagaccattttttctaggcttagatcacatgcgattttcggcactctgataattttagcgttcataatgggatgtataaaggcgattgtagaaggaattggatgcgctaaaattgggtgagaagctttttgagc

SEQ ID NO: 45474 - DNA, 250 bp, Heterodera glycines
tttattattttttaaatttaaatttaattacttattggtaaataaattttataatttaaaattaattatttatttttcatgttttacttctttaatcactcatccaatcactgttgtacctcttctaaaaatgggcgcgaagcggccgattgttctcaacaaaattaaaagctgggcgcgaagcgcccgtcttgaggccgagaagcggccgaatgcttcccacaatattaaaaacgggcgcgaagcgccc

SEQ ID NO: 45475 - DNA, 1020 bp, Heterodera glycines
tgtgaattattctcagaaaaatggctatctcttttaggacaatttctatctcgtaaccccgatgctaatacgttccgcagagcctcttcaaaattttttccattaccgcaagagctgcggaaattgtgaattaattctcagaaaaatggctatctctttttaggacaatattctatctcgtaaccccgatgctaatccgttccgcagagcctcttcaaaattttttccattaccgcaagagctgcggaaattgtgaattaattctcagaaaaatggccatctctttttaggacaattttctatctcgtaaccccgatgctaatacgttccgcagagcctcttcaaaattttttccattaccgcaagagctgcggaaattgtgaattaattctcagaaaaatggctatctctttttaggacaatattctatctcgtaaccccgatgctaatccgttccgcagagcctcttcaaaattttttccattaccgcaagagctgcggaaattgtgaattaattctcagaaaaatggctatctctttttaggacaattttctatctcgtaaccccgatgctaatccgttccgcagagcctcttcaaaattttttccattaccgcaagagctgcggaaattgtgaattaattctcagaaaaatggctatctctttttaggacaattttctatctcgtaaccccgatgctaatccgttccgcagagcctcttcaaaattttttccattaccgcaagagctgcggaaattgtgaattaattctcagaaaaatggctatctctttttaggacaattttctatctcgtaaccccgatgctaatccgttccgcagagcctcttcaaaattttttccattaccgcaagagctgcggaaattgtgaattaattctcagaaaaatggccatctctttttaggacaatattctatctcgtaaccccgatgctaatccgttccgcagagcctcttcaaaatttttccatttaccgcagagctgcgggaattgtgaatt

SEQ ID NO: 45476 - DNA, 1264 bp, Heterodera glycines
gtcactatttagttaattattttgggattttttatcactaaaaatcccatccccagttatcaatgccgtgcgttcactctcgggctgacacccgcgcagcaaatgccggccgaatgtttgcaatatgtgtgcgttgtggctggtgaaattttccagaaggcacatgagtgcgaatgtgacttgacgggtgggtcggcttttttttgacagcaaaaaagggaaaaatgcataatttttacttaatttacaggttctgtgtccggtatttgtgagccaatgggtggtcaatgcgagtgtaaaccaaatgttattggaagacggtgggcatccttttttaaaagttatctatgactagagaccggaaatttcaattttggatcttgctgcgggattataattcaatttttttttgctgtacgggttccgccggattcgtcccgcaaaatcccccaatttgctttgcggaatgggataccgcgaaatcccacccttgctctctatctctgtgacaatgtcggcggagttgacaaatatcggggtttttgggggagtcggtagcacaagggaaaatatagcgtccgggtcggaaatttctccgggaattgttgtcaaggttccgcttaaccttgtttcttaatactgaagttgcgaccgttgcgcggttggcacttacggatttggtccgtccggctgttcgtcatgcgattgtgacagtgtagggtcactctcaaatgtttgttttacctcattgtggttactgtaaaaaaaaaatgttccttcgtatttaaggcgtgcgacaaacagtctggccaatgcgagtgtcgcgaacgcggcatcaccgggcgccagtgcaaccaatgtcaaccaggattctggtgggatcagcttacccccctcccccccatctctcgctcccgaaaaaatataaactgattttttttaaatattaaagatttttctagtaaaaattaagattttttcgacaagtttttactattatttattttgtacaaaaaaaactacaaaaaaattttcatttaaaaaaaatttcgaagtaggtggaaaaaaagaaaattaaaaaatatgattgatatttgtttgtccaggaattttccggagtgtcgcacctgccaatgcaatgggcacgcgtccatttgtgaccaacgaaccggcgcatgcattgactgtcgcaaccttaccgatggcacacattgtgaacggtcgctttcaccgtcccgaatcaaacctcaccccccccccccca

SEQ ID NO: 45477 - DNA, 946 bp, Heterodera glycines
  unsure (1)..(946): unsure at all n locations
aaacaggcaatcgacgatgatgcaaaccaacagggtggcacatatcgtgaacatntcataatcaattaaatttggatttcaggacaaatggtcgccggatatttgaattggccacaggcgactttcgccagcaaaattgaagaggatggcgcttatataaaagtaacgcgagaaatcgacggcggattagacactgtgaaattgaaattgccagccgttgtcaccgccgatcttcgactcaatgaagtcggtcttgtttcaacaaacattgattgtttttgttttttagcctcgttacgccaccctcccaaacattatgaaagccaagaaaaagccattggaaaaaaagacagcgcaagaatttggcattgacatgactaatcagacagaaactttggaagtaataaatataaaaacgatatcgtaactaaagtttatatatctaattaaggtctccgatcctccagttcgacaggcgggcggttttgtggacgatgtgcctggattagtttcgaagctcaaggagaagggagtgatttgaccgacaaatgagttatatggccagaagatacatactatatatatttttacactttgtctatttagaagtcgtctttttctctctaatttgcccgctttatcctgccaaatagctgtttaaattctaaattttgcttatgttttttaatcaccggttctaatagtcgtttcttttcatttgaattcaatcttacttacgttttgtttagatgtttcagaaagttttcttggttcttttgtttttacttgcctttacagtctcaaatttgcggtccgatgaaggaattggggaggtattttttatccacttccctctaaaattgaattctttttacgtttagatggatgcgaatcaaaaacctttgaattcggctcgaatactcgcttccaaattcactctttctca

SEQ ID NO: 45478 - DNA, 771 bp, Heterodera glycines
ctcaaatcttaaaatgactttttttgatcatacaatagatcacttttttaatttgaactggcattttttcttaatttatatggggttttccatctgatgaatgccatttttgatcgctcccacctttctgctgattaaatgttgtggtcattgatcactttttaattccaatggcacattttttccgccgcttttcctctttttcacttacatccgtccacccccattttgctgatcgctcgctcactgattggaaagcaattcctccaaaattataccccctaatgaatttcaaatcacttatactttcgcatttttgtattcgtctgctgattggttttatgggtgtgcttttcctcccttcccctctcccggcttataattagtaggcatttttttccaatcccaaaccattaaaaatcacgcgttcattcactcatccacccttctccgagcagcaacctgctgatctgatcactccgatcactgatcaacagcagcacttcccccacccataagcaacaaataataaattcttccgatccgtctcctcctcctcctccttctcctccttcacttttcgtttctttttgatgatggctttcttcttctttcatccgccgtcgtcgtccaccccattcatatttcattatatgacgaacaacataattattttgcaagaaaaatgtaacgggatttacagcagaagaagcagtgagcaaaaagggcctcccccctaaacatcacatttcgtctctccccccccccccc

SEQ ID NO: 45479 - DNA, 238 bp, Heterodera glycines
tatttttaatttgttgttgttaagactacaccttaatttggggtatttcgcttagaaaatagaggtatccttttttgtcgcacttattactcattttatgaaaattcgtaaaaccttagccaggggagggggaggaatttcctccccccgaaatgaaaaattaaaaattcaggaaaaattggcactttttaataaattttatcgctttttcgtaataaaatcattaaaatgcaaaaaa

SEQ ID NO: 45480 - DNA, 633 bp, Heterodera glycines
atccgcaattttttgctctataagataaattttatttcacctttttatcatttttttaaaaaaagatacaaaaataaaagtgattttggggttcgggaccaaaggggggtgaccaggatttttgagtgaaaaatttttttcaacaaaaatcttccaaaaacatgtctttaggggttatttgggccgctgatcacgaatacgtgatcagattttacttttgacatagtcaagacctcagaatccctgtgtgattggggattctgagatatcattctgaggggggagggggcaggttcggatccggacggtgtaacattatttttctgtgcatttttacgttattttcaatgattttaattaatttaaaatattttgttgagttaataaataaaaaattatatttaatttttttttgataaataaattttataagtttaaattaattatttttttaattgatagaatttcatgtattttttaaattagatttgttaaaaaatattttcattttaatttaatgaatcactgttgcacctcttctaatcactgctgtacccctaaaaaacgggcgcgaagcgcccgtctggccccaactaaatttgaaaaacgggcgtgaagcgcccgtctggccct

SEQ ID NO: 45481 - DNA, 752 bp, Heterodera glycines
  unsure (1)..(752): unsure at all n locations
tttcggggcagtccccccganccgatgcgcccagatttatggggagaccgaatccttcgggaatagcttccctatagcctgtactttaattctgcgttggattttcgctccccataattgtttgagtacaccaaacggacacttgaaaaaatcgattttttttgttttcggggcagtccccccgaaccgatgcgcccagatttatggggagaccgaatccttcgggaatagcttccctatagcctgtactttaattctgcgttggatttttgctccccataattgtttgagtaccccaaacggacacttgaaaaaatcgatttttttgttttcggggcagtccccccgaaccgatgcgcccagatttatggggagaccgaatccttcgggaatagcttccctatagcctgtactttaattctgcgttggatttttgctccccataattgtttgagtaccccaaacggacacttgaaaaaatcgatttttttgttttcggggcagtccccccgaaccgatgcgcccagatttatggggagaccgaatccttcgggaatagcttccctatagcctgtactttaattctgcgttggatttttgctccccataattgtttgagtaccccaaacggacacttgaaaaaatcgatttttttgttttcggggcagtccccccgaaccgatgcgcccagatttatggggagaccgaatcattcgggagtagcttccctatagcctgtactttaattctgc

SEQ ID NO: 45482 - DNA, 1391 bp, Heterodera glycines
  unsure (1)..(1391): unsure at all n locations
tttatttatgcacaaaaaatcagagcaaaaaaaaagtccatttactgggtttttgagttccttctggccataacttttttgaaacttaaccaaaatttttgagattttgcaaattaataataaacacatagagctatcgaacaacaccaacaattcttaatttattgcgagtgattttttggattaatctggatggatcagtccattaaaattagcgttgggaaaaaaacaaatatttatataaaatttaattttccaaaaaaaagaaacaaatgcacttttcttggctctcctccggcgcagctgtgcatgatgtccatgcgcacattctcgaatttgtatctaaatgaaaaaataaaacaaaaaaatcaattcaaaataatttttaaatgacagaaatcattgaaattttcccctaatttgcttgtaaaacttatgttgcattaaatttaaaaataacagaattgagcagccaattttagtaataaattaattatattattaaaatttttaaaaccaaacgaattaaaatttaacaaagtttcggtaattgacattgatttcataaaaacaaaatgatttttttggtttttttgtttccaattttgtaaaaatgtgtaaaattttaaaatctataggtttcgagaaaatttattggctatgaatgctgccaagataatatttattatcttatactaaatttaattaaaaatatatcaaaaattgttttaaccacacacactaaagtattctctaagcaatatttaaggatttagattttaaataagatttactcaagtggctgcatgatcaggttgcttttgtttgcagctactcccattttattgaccattggacaaagactgaaaaatggacaccaaattttatgaaaaattattggcaaataaatgaaatataatttgaaaaaatagttaatcattaaattaaattttctttttggtattttcaaaaaataaaaattcaaatttaccgttccatcaacaaaacattgtaggcaaagttgctttcaccatccgtcaatttcacgttcaattgtctataaaaaaaattatgaaaaatatttttaaaaacaacgaatttttttggtaaaaaatggaaaatgattttaaaaaaatcattttttatttgaatgatcaagatttttgtaaaatcgtgatcaaaaccagcaagatctacgtagactgtgattttaaatgacttaaaatgagcatgaatttccataaaaaaggggtttgaaaatttgtagattaaacagcagggatttctgtaacaatatggtcgatgttacggtaatggaaaggaataatattttaattatagtttccganaaaatattcattttaatagttgcaaaagcatatggccaaaga

SEQ ID NO: 45483 - DNA, 888 bp, Heterodera glycines
tttttagattccaatgacattccaaatttgtactcttccattttgtcctgaatcaccaaaattcagtttggtgttcaaagacaacgctttagcagctgaaaggggcctgaaaaaacttcgtggacgagataatgtaattattattattatatgtcaatttaaaaaaacacttttaaataaatttttaatttctggtttgttatcaaaaattttcaaaataataattaattttataaattgaaaagttttgacaaataactaactgttttcaaatttaattttttcatttattttacatattttatactatttaatttattgtgtttttgtattaattaaccttaatttattactaattttttaaattaatttgttttaggtaaaggaagaattagagcaaatattgtccgaaagttcatcagcagaaaaagggacatcgaacaattttcaattttttgatttgtttaagaaaccactgaattggccacttacgttggcaatttttatgcatctctcacaacaatttagcggaattaacgccggttagaatcttaggattaaatcaaaatgataaaaaattttcattaagcaattttctattctacaacaatattcaagaagtctggccttgctggtcaaagtatatttttatgataatgaacatataaaaataaattagcaatattatttaaataattaaatataataaaatcccaaaagtacacaaaattttacgtatttttttaaatctttaaaaataaagaaaattttcttctagaatgtgaagatttctgacaaattatttttttataaggaacaaggatttaaaaaaaaaaaaggcccctttaacggaaaaattggccttgatttatttaaatctacatttag

SEQ ID NO: 45484 - DNA, 1088 bp, Heterodera glycines
atttgcacatttttatgaattaatttgtatttgacaatcgtatttaggtaaattgggtgggcattcatcgatataaatttgtaaaattgggaaattaacaaaaaagtgaagtggaagacatttggataaacagtgattatatgtaattcaaaatgattttaaattaaaaaagtaatgcttatttgttggtggattattgaaatacgagaatggaattttgttcacttacaataagcattgcacaattagtcaaaaaatttgggaaattaattctgttgaaaacatccttttctcacaaatttggcgtggcaattccaattgcatttgcttcctctgatccgatcagtttcccatttgctgctgctgaacagcggccaaaacggcacggttgagctttgctctgctcggctttgtatcccgtgctcaaattggtcaacttatgatcatgagtcgtaaaattgtctttctccgcctaattaactatttttggggtcattaatttttgtccatgtcaatcagacgttaaaaatggggaaaggtcaaccaaattttacgaagggttccctgccatgtaaatcgacgagctttcggaccgctttatccaaaaaacctttgggaaaaagggggccggtaatgccgataggcgccatgtggagatttttaaagaatttttaatgaatttgcaagaaaattagccaattttttcaagttttcctctttttcccattcgcaacgaatccccctccccccccccccccccctcattacgaagaccccatcatccggagccatttacgacgaaggaggggggcggggggtgtctcaccccaaaaaacctatgatgtcaattgtttgagtctctccgcccgccctttgcttaaaatatattttccagtatatgaaatgaaaaaaaaatcattttcaaaatgcccaaaagagtcccattcgaattggttttggaaattgttggttgggtgcctttccataaaaagtggacacgcattaatgtgtgccggagattcgatcgtccattgatgaagagaatgacactatggctaataaaagtgtgaaaaagttgtaagaaatgc

SEQ ID NO: 45485 - DNA, 1164 bp, Heterodera glycines
  unsure (1)..(1164): unsure at all n locations
tttcatggatggattaattttgactggagaagatcgtctcattacgtctacgagcctctgacagatttttgccatcccgttaaatactgctttgaagtgccaaaaaatgacatgtgtcagaaattaaattgtgaatgttttattttattacggtgtgcttattgtgaattatatttatgctttaaccatttttttaatgattaccatttgtgtgaaaatgaataaaattgaatgaaaaagaaggaataaaaatttttgacccgatggaattgatttcaatggccattaatttgcataaaatcaaaaataaaacggggaaaataaattaacatatgagggattcgaacctacgagggcaaaaagggaaggcaggagcacaacctccgcaccaccgaacaacacaaaacagtgcaaatgtttatttaatttattgcaataaaaaaaagtttggcacgtcataactcggcactcagactcatttcgcagaaaataaaaacacttttcttaagaacccatgggtgctctatccacccaccaaatttcatttggaaatctcacggacacctggggaccttcctttgtgagtcgttttaaaaaaacatcataaagggcattagtttttcaacaaaaaaaatattcataacttttctcaaaagcaacaaaatgttaataattcataatatttaatagccctaagttttttcaattagtctgcaatatttcaaaaaaacttgaaaagtttcattatgaccaacagaattcaaaattcctgggttttcaaatatttaaaattttaattttttagtaaaattataagcaataaattttgtattttgatggttttttaaattatctttttatggaataaaaattggaattttagtacttttttgttttaaaccaatctgaaaaatttttcctatttttttaggatactgttaacacagttacgatgattcgactttagtataaaggtataaactggaaaccaagatttccaaattagccggaccggattggcattttcaaaaataaccggattccggatcctgtctctcataatccggtcaatccagattttcaaattgccggatccggaaccggattccggattggtaaaaatttaaattttccaagttaatttgngaaaaaacccgcaaaatg

SEQ ID NO: 45486 - DNA, 1328 bp, Heterodera glycines
  unsure (1)..(1328): unsure at all n locations
ccctgatgatgtttcgcctcgatgttggggaatcactttggcttcttcgcgaaggcgttctgctgtctctctcactgtatccgccaatcagatttaaacaggaaattgagaaccattttgctccaaataatggagcgtgattatgttccacagttacacgcccttctttatattggttgccaaaagcatcaacttgtcaaccagtgcgtacacatgctcttnctggacagtacggtggctttcttggacaacgccaaaattcactggtctcatccaactttgaaacggccttgatttttgcacatttttaaaaaattttattagaaatttccaacctcaaaaacatattcgtatcctccatttgttagcaaaatttttccccgtgtcgattttgtttgatcaaaacgaagcaatgcaatagaaaataagaagaaattgttgttttggttcgcaagacggaattcaaaaaagtgaccaaggaacgagagccaaaaccccaaattttttcttgtgaattgcgataagatgacatttggaacacacacaccgctgaccaacaaattggagaaactgattaggcgcagtatcaaatagattggcgaagcaaatttgtttgttctcgtctcgagatgaccaattgctgacctttccccctttatttgtttatttctatagttaaaatttgtccatgggtttaattttgccttatctggggaaaacaatcaccggcgagttcaattactggcgaaatcaaatacagacggcgagaaaaagagaaatagttcactggcgaaatcactcactggcgaaatcactcactggcgaaatccaactggcgaaatcactcactggcgaaatcaatcactggcgaaatctaacagcgccgttcgaccgaccctcttgtccggtctctacttattagcacctaaaaaaaaacctaaaacgggaggttagcacctttttggcattttcaagttttagcacctattttggccttttttccagaaatttcatagcaaaaatgcgataaaaaacaaaatacacccctaagaattgaccaaatttcagaaatattcccctaagaaatgaaaaattgtcccaaaaattcgttacaaaatttatttatttattttcttgaccatttgcaattgtgcgggcgaaattgataaaaaatgagtcaattctggaattttgtccataaagacactgggtttttccaatttataacacctattttcgcacctattttggcatttttaacacctattttgcactttttggcacctattttagtacttatttcaggatttttagcacctaaaaatccg

SEQ ID NO: 45487 - DNA, 1134 bp, Heterodera glycines
tatggccagaaggaactcaaaaacccagtaattggaactttttttgctctgatttttttgtgcataaataaaaatatttgaaaatttgcaggctaatagcatttttcgaatgctttcgaataataccaagaatgtttaatttggttgagaaagaaaaaagtaatggtcgaaaaattcgttcgacgacgtttcggctgacgacgtttttcctactccggctccagtgttagacaaaatgactcattacgccaaatagtatgtaatttgcgtaattttttgggcgctaattcaaaaattacactgataaatgcttttttgcacaatttattttggtcagccatacctcgctttatttcgaactaaatcgaagaaattttgtatctaaaaaaagttttttgaaaaggagaatctttttctaagtgaatgctaatgcaatttgacatctcagaaaaaagttatgagagtttcaaatttttatcacgttataactagggctgggatttttatgtgctaaaaatcctgaaatatataataaaatatgtgctaaaaaaacccaaaatatgtgctaaaaaccaaaaaaaaggcctaaatatgtgttaaaaatgcaaaaatatgtgctaaaaattggaaaaaccaatggtatttacgcaaaaaaaaaacatatttaatatcagtctttatcaattttcgcccaacgccaatcaaaatgttggcgatgtcaatcaagtggtaaagtcgcggaatcatctttccgtcagcgggatgagttccttgtggcctcttagatatccagaaaagataagtcccgaggttcctttgaggtcgtgtagccactgaaagtcctccagaaaattatgaaagcgttctggagagtccagtagtccaaaatccgggtatcacatccataaattcatgtcaaatccgtgcatgcttttgcaaagtagtccttagcggggaagcgctcatgtcagtgtctgcccatatatagctaaagtattctgtgtccaccgagcaatttatgcgccgcgatctcgttagtttatatattactaaagaaacagtgagtagcattgcttattctaggatctcgggagccgctggcaaaaggggctcgggagtgtggcattccttaag

SEQ ID NO: 45488 - DNA, 1116 bp, Heterodera glycines
attaataatcaaaattctcttaaaattttttgacccaaattcaaaaaaggaaaaaaatttgcagtcaaaaaattattcgaatttctccaattttgtttccataatttccgaaagttattcggtatcataatgccaaaacaaaacgaaatcgttttaaaatattcctttctggacttgacttggtttcttgatatcgaagctgttttctacgctatttctaaaacggttataccaaaccccagatttttgaatccggttttcagaaaaaatgccttgtggtgaaaacaatatttcacatttcactccataactttgtgagttcggcacggatcgagaccgggataagaccattggaaagagcagctcgagctctacaagaaggtatggaaagaaaaaatagttatttctgggactttttcagaaatcagaattaattctccaatgtggcccaaattttaggcccccagccacagccccttgcttctcccagttttaagtcttggatttgtcaaataaattcaagacttcaaattaataatcaaaaattctcttaaaatttttttgaacccaattcaaaaaaggaaaaaaatttgcagtcaaaaaattattcgaatttctccaattttgtttccataatttccgaaagttattcggtatcataatgccaaaacaaaacgaaatcgttttaaaatattcctttctggacttgacttggtttcttgatatcgaagctgttttctacgctatttctaaaacggttataccaaaccccagatttttgaatccggttttcagaaaaaatgccttgtggtgaaaacaatatttcacatttcactccataactttgtgagttcggcacggatcgagaccgggataagaccattggaaagagcagctcgagctctacaagaaggtatggaaagaaaaaatagttatttctgggactttttcagaaatcagaattaattctccaatgtggcccaaattttaggcccccagccacagccccttgcttctcccagttttaaatggtggatttgtcaaataaattcaagacttcaaattaataaacggaaattctcttaaaatttttttgaaccccaattcaaaaaagac

SEQ ID NO: 45489 - DNA, 846 bp, Heterodera glycines
ttttgcgtgctctcaacaccggcggaactttgtaatttaaatcgaagatattaaattaatatttaaattaaaaattttttttagcattgcaatcgcttgacgatttgtacacaaattatttaatgggcaatgaaacggaaatgccatcgggcaaacgaattgagctcagacggcgaatggtcggcgaatatttgtgccaattgggcgacgaaatggtggaacaaattatgcatttattaaccgacagaattgacaaaaatgtggagagaaataagaaaaaaacggaggaaattgaaaaaatggcaaaacaaattttaaaggaaaatatggaaaaaagcaaaaaattaattgaagaaaaaggaaaagagaacaaggaaaagggcaaaaaagaaacaaaaaaaggaaaagaaaaaataaatgagggaaaacagaagaagaaaatagacaaggaaatagagaaattaggaaaaatattagatggtttagaactaggaaaagaagaaaccaatgtgaaagaggaggaaaagaagcagcagaggaagagagagagcaggggaacgggagagagtggaagagaaaacagcggaatggaagaggaaaagcagcagaggaagagagagagcattggaactggagagagcggaatggaagaggaaaagcagcagaagaagagagagagcattggaactggagagagcggaatggaagaggaaaagcagcagaggaagagagagagcattggaactggagagagcggaacagaaaacagcggaacggaagaagcccttttgatgctcgacttttttaccgatttagagaaaacacacgaaaaaatgaaagcggcat

SEQ ID NO: 45490 - DNA, 1383 bp, Heterodera glycines
aaatttaaatcttcatcgtttgacaatgtttcaattgccataattgttggcattctgttgctcctcctcaccctcctcaccaccactacaacaaccgtcgcccagttcaaattttgccaaattttttgcaaataatgtggcaaaaatttgtgtgtgtaattggccaagcactgtgatgagtgtgcccaattcgtaagtgccaaattgggtgacttttttggcacaaaattccaccgaaaaagatgacgaacaggaggacgatgttcccaatgataatgatgataaagcatcgtcatcagtcacggcactttgatcgatcagtgagtaaatgagattgccatcaaaaaatgcgtcttcggttacttcggcttcaacatttttgcccacacgtcgcattttgacactgtccaaaagtgcaacggcactttgttccatacatcttttactgttcgcagagcttaaggtggttgttttaaaatctaattgatttattggttaattttattatttatttttaattttaaaataaaacagggaggtcccaggctttgaggattttggccaaacttttttttacccagattttcatcaaaattgctaattttgatggttttcttaaaaatttagcgaaattttttgggaaattttgctgaggcaggtcttggaagggatagaaacaaggaaaatcgaaaacatgatataaattttcattaattaccaaaatgcgaaatcatccaaattgttttgtacaaaaaataatttttccaatagaaattgaggctcttcctcagatgcagctgttcggcatttaaatgtgtgccatttctgtttaaaatttggaattttgaagcccagagcatttgacatttctaatttggcttcaattgttcgaataagcattgcaatatgcaaataaattgtgcatttttcatctgttatgttttccaaataaaatttgtaaaaatttgccaaaagtaaatcgttgagaaaatctataaaaaattaattttttctattctttttattttaacaatataaataaataaattttaacatttttaatttttctcaaataaatgattattttttagtttttatcttaccagaaaatttttcaattcttatttgtttcagcatatttaagcaagtttcaattgggaaatgttgtgttttagaactaacgaattgtaattcgtcgttcatttgtcctgttggactgtaggccttttgcccttttgattttatccgtctttggttgaattgttctttcgggctgccaagttttagttctttggatctgtcggttatttgtccgattgacgtgtcacccatttgtccttttgcgagtgtcacccatttgtccttttcggctgtcaaccattt

SEQ ID NO: 45491 - DNA, 1385 bp, Heterodera glycines
ctactaaaaagaaactgataaaacaagctaaatatgaaagaacaaatcttttttcacatttctgtttattttgcgtacagaaatatgtcttttggggagagttatgttgaattttctaagttttcaggagaaattaagggccaaaaggcttaaatcacctcaaacatttgcctaaccgaatcaaactaacagcaatcaacgctaagataacgtacagacatcctttaagcattttgtattcattttatgccataaaaaggcattaaacacaaaatttttgcgggtgaaaaaatacgaaaatctgagtaaattcgaaaaaaaaattctaggggttggaaaaaattctaataattctctcgcccttaagacgccgcagcggaacaattcctggcccgggttgacagcgcatgttccgaaatgtctcaactcggttcgcggatgggtacagattcggacttggtgccggggcaaccgattgattggctgatcttggggaccaccggaggcgcactgaaatacctgcatgaactgttggacgttacgggcacagccgagctgaggacggaggagcaaagccaaacggagacgcccaaaaaggcattggccgcctgagggccgagggacggaccgacggagataaagcggcgattggaaatcactattccgttaattcatttcttccttttggttggttctttcacatttttccatttcctccgtcaaaatttgcttattttagtctcccattatttttattacggctcgtcacatattctttacatatttgtacatttgctgaataaaatcagaggaacataaaaaacaaaaggtaccaaagtcggatggaattcgctcggtgtgtatttttctgtgccctgaatttttgcgattattccccttggtccccatattttccatgtcagtatttatggtaatatccaagacttgaatccttcggacgccaacaaatgttcgatacgatcgaatgaatgtccatccaaattaaatatgctctaataaaacaaattttattgagaattggttattcaacattaaaattggcttttgttattcgtgtaattccaatttcaattttgtctcccgatttgcatggtcccacgcccgcaggtgttcctgtcaaaatcacatctccgggcattacgctcacgcgcgaagtgacatattcgagcaaagtcgggacatcaaacatcatcgcattagtcttctctttctgtctgatttgccgattgactaaaaacaaagaatcgtaattaaaaaattatagggttcattatacccaaacagtaaatttcaatgtcatgggggttttgaataacacttttgtagatgaattcgcccaattgggcacgacgtgtcgaaggatt

SEQ ID NO: 45492 - DNA, 1540 bp, Heterodera glycines
tggcgtgggaatgttaacccacttccctttcggcaaccggatggaccaactgcgcaagcacagaaaagtcgtcatccgtagtgtgttacggcgttagccggtgccttaggatcggctgacccacattcatctgctgttcacgtggaacccttctccacttcagtcttcaaggatctcacttgaatatttgctactaccaccaagatctgcactggtggaagctccggccgggcccacgcccaaagccttcaacgcaaccaccacgaccctcctacacgtcatggccagactacgcgacaagcacgtgtacaagccaatgacggtggagtataggtggcccgctccagcgccatccattttcagggctagttgattcggcaggtgagttgttacacactccttagcggattccgacttccatggccaccgtcctgctgtctatatcaaccaacaccttttatggggtctaatgagcgggcactttggcaccttaactccacgtttggttcatcccacatcgccagttctgcttaccaaaaatggcccacttggagctcaaacattcaacgcctgggttcagagtcaagcaaccctggcttcatacccatttagagtttgagaataggttaaggacatttcgtccaccaagtcctctaatcattcgctttaccgagtataactgcttaccgagctccagctatcctgggggaaacttcggagggaaccagctactagatggttcgattagtctttcgcccctatacccaagtcagacgatcgatttgcacgtcagaatcgcttcggacttccacccagagtttcctctggcttcatcctgctcaggaatagttcaccatctttcgggtctcagcgcatacgctctgtctccgccccatcgcatgcgatcgagacgggactatgttgcgccccaacaccgcagtgccagggatcacacatcagctccgtaagaagccttcactttcattgcgcctttgggttttgaacacccaatgacttgcgcatacgctaaactccttggtccgtgtttcaagacgggtcgaacagatgaccggcttttacaccgagaacgcacaactgagagcccgagctggaccgaactggttgctggtacgtgtcgcacgcgaccgccaccgacccccagctcgagtcaacacggacccgaaaccattgcacaattcacccagagtaaacagcactcccccgatccgggtaccagaccccgaaaggctggcctcaagaccgagctcacgcagctactccgagcatctcagcgcactccgcctgcaaatgccccattcgccactgaacagaaggacagcaaaccccagtctggaggctagcaggccaacgtacagcaacaaacgggtgaatgcagaccagatacgccagctctgtccgtttccacctcatcggtttcacgtcctctttaactctctcttcaaagtgctttgcaactttccctcacggtacttgttcgctataggactcgtggccgtatttagtcttagatgaagtttac

SEQ ID NO: 45493 - DNA, 1001 bp, Heterodera glycines
tttgttaagtgcacaataattgcaccaattaattatttgggagaagatttccatgccccaaaaaaataataaatgaataaaccggaaaattgcaaataaatatgttttttcaattttttattttttaaataaaagctattttcaacatcatcagagtctgtgtgtctgtcctccatttgtttgttgcttcgtttttccaacatggcattcatttgtcagcgctaaatcgcagctggacaccaaaatggtggcaaaaaaaaaaaaagaagtaaattggcgaagtgaaagcgatgaatgaatgggttaaaatgagcattttgctttcattttttgtcatcgaattattatttttttgattgatgggttgtccaatttcaattcctaatcctctaaatactccatcaaatattcttatgcaatgtcgccgtggtcgaaaagttgaagtgacaaatgtcgaggaccagcagccttcctcagtgtgtaaacaacaacaacctttcatacatgaaatgtaaaaaagacttaatcttaagcattgaaaacttaggggtaggaaatttggcaacaaaaaaatgcattgaaatctggtaaaagtttttcaaaattttccaatgggttataattttttccggcttcatccattcatagaaatattgtggggaataaattgtttgtcaaacccaccattcaaataggctccgacctcagcttgattcgtcggtgccgccgattgggtttggcaaatggaactcggttggtggcacgttggcagtggccagcgattggatgaagcggcgatgcagcaccaaacagcggagtgtgtaaaaaaaactgatttagaattttttttttctagaaaaaactaagaatttttaataaattttttattttttttggggggggggaggtaccatttgtttggcttcattaacaacattaaacagatgccgccgccgccgcctaaacggtgccgtcagcagttgcagcagaatggccgagac

SEQ ID NO: 45494 - DNA, 885 bp, Heterodera glycines
  unsure (1)..(885): unsure at all n locations
aaaagagatagccattttctgagaattaatcacaatttccgcagctctgcgtaaaatggaaaaattttgaagaggctctgcggaacagattagcatcggggttacgagatagaatattgtcctaaaaagagatagccattnttctgagaattaattcacaatttccgcagctcttgcggtaatggaaaaaattttgaagaggctctgcggaacagattagcatcggggttacgagatagaatattgtcctaaaaagagatagccatttttctgagaattaattcacaatttccgcagctcttgcggtaatggaaaaaattttgaagaggctctgcggaacagattagcatcggggttacgagatagaatattgtcctaaaaagagatagccatttttctgagaattaattcacaatttccgcagctcttgcggtaatggaaaaaattttgaagaggctctgcggaacagattagcatcggggttacgagatagaaaattgtcctaaaacgagatagccatttttctgagaattaattcacaatttccgcagctcttgcggtaatggaaaaaattttgaagaggctctgcggaacagattagcatcggggttacgagatagaatattgtcctaaaaagagatagccatttttctgagaattaattcacaatttccgcagctcttgcggtaatggaaaaaattttgaagaggctctgcggaacagattagcatcggggttacgagatagaatattgtcctaaaaagagatagccatttttctgagaattaattcacaatttccgcagctcttgcggtaatggaaaaaattttgaagaggctctgcagaacagattagcatcggggttacgagatagaatattgtcct

SEQ ID NO: 45495 - DNA, 736 bp, Heterodera glycines
atttagtagactttataaaagttaaatgtaaacattattaaaaataaaaagatcgatttaaaaaattaaatcctcctattctaattttcgttcgccctcaaacaattcgttcagccagccggcacatcgtacacgcgctcgtcttgcgcaaattgcacccggtgctgcacattgggctgaaatttcatgtttagaaaaataaaatacaaaaatttaaaaaaaaaaatcacgtcggcctgcgaagtcccggccaaaggcgacacaaaggggcggcgcgcgatcgtgaccaatggggtctcctgcgcaccctggcggcagagagaccgcaacgttttctgttcttgaaaaaaaaatattatttatttatttttggtggaaaatctcactctttttttgtcggcgcacaagccgccgatgcatcagtcggttctccacagcatggcgcaatttcagcgccaaaagcaccatctgtatgggaagggggggggggggggcttgcatttttgaaaaaaaaaacaaaaaagaaaaaaaaacacctggacaatgaagagcaccaaaatcagagcgctgctggcgatgatgaaatttgacaaatttgggcaatttgtcttcgtcgtcgtcgtcgttgccggtgtggaattcggcgctgccgcctcttgaacgccctcacgcaaaaactgcgtgaaattgccaatggaccagtgcacacagagcactggtttagggtagccccggg

SEQ ID NO: 45496 - DNA, 1268 bp, Heterodera glycines
agaaatcatttttatttggacaaattttcaaatttttaaggttatagtttttcattttttgcatttttaagaatttaaaaaaaatgtaaaatgtccccaccggtgaatgagtcgtcgttgcgattagtgctcaatgctcggaatatttcatgttttattttcaacaatttgcacattattttggtataaaaatcattggccgattcattaagcgaacttcggtacgtcatcggaccgttcacgtgcaaactgaacaaagaatgagaaagagaaaatggacgtcaacttttattaccgttttctctaattatccccccgtctccaattatccccccccccctttctgagggggttgaaaataatccccccgtctccatttattccccccgggtgataaatggaattttttattttttcgaaaaaatttctttttaacattttactagaaattgttttattctaaattgaaacaataaactcagttgaattcttagcatgaaaaaatctaacaagaattaatagtttcattttatacgaaattttttggttatgtaattttgaaaacaaccactttacaaaatctctttgggctaacttaaaaaatcataaattgtgttttttataagaatatttttttgtcaatggtcacgaatcccaaaatgagtttaaaactcttcaaaggagaggagataaaatataaataaaaaacatcttataaagcaaaaaattgcggatttttctgctattttctttgtgaaaactctctttcagaattgaattctcaatttttttctgaaaaatcgaaaatttacagaatttctgaaaaagtattttcatctttatattagcaaaaccaattaaaatacttaaaattctcccgatttctttattttaagctttattccactaacattgtccaaccctgaagtgagttattaatttccaaaaataagcctaaatttcccgggctcaaaaaatgaaaaattttaaattttttaaaaattaaaaattttctgaaatgatcaataaagttcatatttgtatttgaatattttggggggttttatcaatgttttataaatattttggcatatttcgaagcctttttcggggttttcttgccttaaatgcctttttggcattttgccgttttggtacctttttggcgtttttccgaaaaattccgttataaaaatgcaataaaaacgggaaaatgcacccctatgaaatgacttgaaaaattttcagaaaatacacccctaagaatt

SEQ ID NO: 45497 - DNA, 752 bp, Heterodera glycines
  unsure (1)..(752): unsure at all n locations
caatttactctctttaatttatgtttttggttttcattgcaatttgcagctgaaacaataaatcatttcattttttaccgtcactcataaatgtttttaataaggtaaaacggactgtttcattagtgagaaaacaaagcccagttagctgtctattttttgcctaattatttttttcttgataaaaaattttgattttaaaatttgtccttatccaaaaaaaaataaaatattaattaattttatttataattgaaatattaaatttttacgtggttacctaaaaatgttttgtacctatttgatgatttttgtgcttatttaatgcttattttactattttttccctgcctttttaggtgcctgtttcgagatttttttgcctaaaagtggtatccctaattaatatttattgggacgtgcataaatataaagtaatatataaagaatccttcaagctaaaattatttttattggtcgaaattgcaagcggtgtcagtttaaagtaaagtattattaagtatatttcccttgaagatttaattttaattttaaaaatcaatttttttttggaattaatatgacgaactatggttcataactgtgaagcttatttataaacagagttaattgattgaaaaaatttctttattttattaatttgattaaatttttttggttttgaaccaaaatacctggngtgccgcaccggataccccaaaaaactgagatttttctcgactcgatacttg

SEQ ID NO: 45498 - DNA, 1533 bp, Heterodera glycines
aaattttttgaaactttgcatgctaatagaggatacttagggctttcgaatgataccaacaatgttagatttggtcgacaaagaaaaaagttttagtccaaaaactgggctggcgccgaaacgaccagcgccgaaacgatacggaccctgactgacgaggtcaaactgtgcgcgcgctcagaagaaacggcccccaccagtgctcagacggcccagcgccaattccacctgacaaatgagagaaacttttttggtcaaattaaagcaaaaaatacataaaaaaactagatttggaaaaaaatatgttcataatttgtccattgagaacagagatggacattttttaaagtaagtttttcataagaaactttcaaggaaaaattttttagcgtttttttcaaatttttttaaagaaaatctactcaatatgcaaattttgttatttttcgacaaaatttgttaacaaatcgcattaaaagcgccgcaaaaaagtggtgtaaaggcaaaaaaaaaaagtcttcgcccgggggggagggctgtacccgccgcaagccgaaatcaatcctgggaccgtccctggtcgcgctaaagctattcaaaaataataaaaaattcactcaccgaccaatccggcaacgcgttcaccgagctgcgatgacgcgtgctgaccgcttcggcaccagtgccaccgccgccgctggtgttgataatgtcgacgccagcggtgtcgatgttgccgttgttgttcatcagcatcaagcacggctccagtgagatggaccagcgattattggcaccagcaaaggcggcggcacttttattggacgacttaaaaaaatgctattaaaataattacccaaaagttccccgtcccgaaaagtaaaaaaatttttttaaaccagaccaggccaggacggttcagtaattgcggcttggattggtctatcgaccacccacgggccttttcttggaaaatctcgtggtggagtaaaaaaaaaactgcgaaaagtctgacagccgacaatgggaatcgaaccaacaccaaagaatgattgatgcatagcactttttagatggtttttttccagaaaaattatttttttcaagattctttcaaacatttaacatttatttcgtgtaatttggtcattttttggtcgaaaaatggctaaaaaacacaaaaatctttggatttcgccctccaattttttttccagctaattgtaaggcctgatactgatgaacccatttattttaaaggaactcgcctttgttgagcctttaagtgcgaatgaatggcgccgcattttggcacggttcgccgccgtctccgccgcgccattgtcgtcaatttcaaaaccgaccactgaattcgaaaaaaacagatttaaaaaaatcacaacaggcataaaacttgaaaaaattccatttaaaaaattatatataaatttctaggggaaaataaagaagtctttttttaaatgatttacaataagtgttctttaagggaattaagtattttgtgctgacatt

SEQ ID NO: 45499 - DNA, 1019 bp, Heterodera glycines
gcacccctctcccatttggtggttgcccttttgagtgctgtctcttctccaccactcacttgtcataaacaaatgccaatccgccgctcatcgccgccgcaaagttccgcccgatgctattcagcacgaccactcttccactcgtcatgtactcgcagccgtggtccccaaccgcctcaatcaccgccgtggcgcccgaatttcgcactgcgaatcgctctccgccgattccacgaaagaaggcagttcctttgaaggaagtgttccgtcatttttgttgtaaaatcatgcatttattaccggaagttgctccgtaaagtgccacatttccaatcaaagtgttctgttcagaggcatagatcgaattgcggtaggggcgaatgacaattttgccgccggacaaacactaattaaaaataattattcaaaaacgccgcatttcactaaaacctttccaacgtaatcattcgcttcgccctccaatcgaacagtaattccattcgccaaaaaggcacaaaaactttgccctgcagcaccaattaggtccaactcaagacgatgcccttccggcaacccattctcgccaaaacgaacggatatctataattaacaaaaaaaaaagcaattaaaaaagataaagggacaacaatcacttcgtagctaagccgagccccaaatgttcggttaatgttcacaatttgtttacgttcgatgcgcttcttcacggccggaccgtcgaaaaatccttgcaattcctgcaataattttaagcaatttttagtgtacattttgtacttacattcttcattaaattgttctccaagtcgttgatggcatgaaattgcttgacggcaccgcctcgggtgttaatgtgtggaaattgcaaggacactttgtgcaaaatctggccaaactccagaagggttgcctttttgttcacctgaattactcatcttacaattagtactaaataatagagttttgattaattattagttttttcttaccagggttagggt

SEQ ID NO: 45500 - DNA, 94 bp, Heterodera glycines
cgttgccggccgttccagccagccgcccgcaccatccggcaccagttcgatcagctccacgcggtcttcgaagaccgccgtgatccgcccgtcg

SEQ ID NO: 45501 - DNA, 915 bp, Heterodera glycines
cccagtgattgaatgctgggggattgagtcccgttgattggaatgttggtgggttgagtcccagtgattggaatgctggtgggttgagtcccagtgattgaaatactggtggattgagtcccagtgattgaaatgctggtgggttgagtcccagtgattggaatgctggtgggttgagtcccagtgattgaaatactggtgggttgagtcccggcgattggaatgttggtgggttgagtcccagtgattgaatgctggtggattgagtcccgttgattggaatgttggtggattgagtcccagtgattgaaatgttggtgggttgagtcccagtgattggaatgctggtgggttgagtcccagtgattgaaatactggtgggttgagtccaggcgattggaatgttggtgggttgagtcccagtgacttgaatgtggtggattgagtcccagtgattgaatgctggtggattgagtcccgttgattggaatgttggtggattgagtcccagtgattgaaatgttggtgggttgagtcccagtgattggaatgctggtgggttgagtcccagtgattgaaatactggtgggttgagtccaggcgattggaatgttggtgggttgagtcccagtgattgaatgctggtggattgagtcccgttgattggaatgttggtgggttgagtcccagtgattggaatgctggtgggttgagtcccagtgattgaaatactggtggattgagtcccagtgattgaaatactggtcgggttgagtcccagagattggaatgctggtggattgagtcccagtgattgaaatactgacggtttgagtcccggtgattgaaatgttggtgggttgagcccaagacgatctgaatgctggtggattgaatccctatgattgtaatgtt

SEQ ID NO: 45502 - DNA, 1138 bp, Heterodera glycines
  unsure (1)..(1138): unsure at all n locations
aaagatgctgtttgacgaaataaagggcatactttatttgaagaagtgtccaagacnatgcagcaataagcctgcaaaatctaataagtggaaaatacctgagtatagaatttattttcagaaagtgtcaacagacttttggaaaaatatatttgcaatttatcaacaattttgagaagtgagttagaaatgataaacttcacgattcaaaccaattttcgttgctctaattaaccgcgataaaaacattcgaatcaattaaatagcttctgagataataaggtttatcataaaatttcaagtaaaaataaaccctcaattattggtatgaacgatactttccaaacatgcacgcgttttgcgctcgagctatttatcatcgggcttgtcaatccaaagcgaaacaacaaagatgctgttttgaacgaataaagggcataggttattttgaagaagtgtcaaagaacatgcagcaataagcctgcaaaatctaataagtggaaaatacatgagtatagaatttattttcagaaagtgtcaacagacttttggaaaaatatatttgcaatttatcaaaaattttgagaagtgagttagaaatgataaacttcacgattcaaaccaattttcgttgctctaattaatccaaagcgaaacaacaaagatggtgttttgaacgaataaagggcataggttattttgaagaagtgtcaaagaacatgcagcaataagcctgcaaaatctaataagtggaaaatacatgagtatagaatttattttcagaaagtgtcaacagacttttggaaaaatatatttgcaatttatcaaaaattttgagaagtgagttagaaatgataaacttcacgattcaaaccaattttcgttgctctaattaatccaaagcgaaacaacaaagatggtgttttgaacgaataaagggcataggttattttgaagaagtgtcaaagaacgtgcggcgataagcctgcaaaatctaataagtggaaaatacgtgagtatagaatttattttcggaaagtgtcaacagacttttggaaaaatatatttgcaatttatcaaaaattttgagaagtgagttagaaatgataatcttccacgattcaaacccaattttcgt

SEQ ID NO: 45503 - DNA, 995 bp, Heterodera glycines
taaatttattaaaagtaatgaaaattaacccaaaaaatacaaagaaaataatttacaccgtccggactcgaacttcgccccccccccaaaaatgatgcctcagaatcccaaatcacacagggattctgaggtcttgactatgtcaaaagtaaaatctgatcacgtattcgtgatcagcggcccaaataacccctaaagacatgtttttggatggtttttgatggaaaaattttcccactcaaaaatcatgtgcacccacccccctttggtcccgaatcccaaaatcacttttatttttgtaacatctctcaaaaaagtgataaaaagatgaaataaaatttatataatagagcaaaaaattgcggatttttgtagtattttactcttccctaatgacttttctgaaccgagatataaatttttttctgaaaaatcgaaaatttccagaaattctggaataactttttttctttagaagataaaaaccccaaataaaacccataaaattctcctgatttttctccatttttaatgctttatttaatcaaaattggtcaaaccttaggccagatatgaattttcaaatattaggccaaaatcccgagggccaaaaaattgccaaaaaataaagaatttttaaaatattccaaaaaatctgaaactaaaacaaacatcagattcgtgcttagcaccataatttaccccagaaaaatatttttcaccctctttttcaacccaaaaaaaatttttgaaaatttctagggggcctagctcgaaaatttttgaaaatttcccttcatatagtataccattagatagagcttaaaaagttctacaattttgccctaaggcattttttggctaaaaccgacccctgacgagttatgggcccgggactcaatgtcccgcttaggccaaaatttttttctatttccggaaaaaatcgaaatttttccaaaaaattaccagtcgatagagctcgaaaactatgtttt

SEQ ID NO: 45504 - DNA, 989 bp, Heterodera glycines
catgttttgtaatggtaagcaaacaatttttatcacaactttaaatttaattttttatgttttttaaagaacccaaggcaacgaagcacttgctgaatatgatcagagatttatcgacattttgcgcaaaaatttggagaattctcgtgactttgggtatgttttactcaaactaactgaggaaaagatggacatattgtcgaccagcagtgagaaacagaaagcgaagaaatacgaacaattgtccatgtatgtataactaattaaaattaattagtgagctaattagttgttgataatgaatgggaaattgggtcattcattaataacaaaattatttgacgcctctgtctgggttaactcatttatcttttcttttccatattttcaaattcttgcagattatatgcctatttttaatttattttggaattttggttcacattttgtgtaaaacatttatttttcagcactcgacattgcttttctagaaaattttgtcatttcttgataaattataacccaaaatcggacgttttgcctactggacatttcgcctactgaatatctcgactactaacctaaaatagatctttcgaaaacgaatttcaccaaatatatctgaattaatttatatttagctattttagaatgctaatgaaatttagcctaaaaaagcaaagaaatatttattaaagtccaaagaaacatagaaagtgaagtataaaatcataattcagtttttcgtctgtatcattggcttcttaatcactctttccatttccacggatgtgaagccccaccataaagtcctgcaaaacgagtccgacgagcgtttgctaatccttcgaccgattcaaaggcggcctcgtcaaggattcgcagcacattgttccttgattgatgtacgttgttgttgtttagtgtttttgtggaagtgcatatccgagaaccatttctttggaaaagctctccttttttacatcatc

SEQ ID NO: 45505 - DNA, 1031 bp, Heterodera glycines
  unsure (1)..(1031): unsure at all n locations
cagtactcaagcagacgactgaacagcaacancacaacnaggtggagggaattgacatggacacggcattcaattccaaagcgttgaattaattagtgggctcttcgtaatttaatgtcttgctaattgtaaggaccggcaccccgagaagcgcgtccgcgccgcgtacgccgcctttgaggagcgacggctggccgagctgaagcaggagaagccgacactgcgcctgtcacaactgaaacaactggtgaagagggaatggatgaagtcggcggagaacccactcaatgagcaaatcattggcattgtgcaacagccgtaaaacaaaaatattggcggaaaaggagggaaatgcctttcagagaatatcatttttatgttcccagcacttcgttttggtattatcacataatgtcattcgcttgtcttgtcagataatttcaatgaaatatgtgattaaaattaataaacacaaaatgctttgaaacctccaagggttttaaatgatgacaaattttacaacttcttgaacattttcaaaataatgcaattaagtgaatgttgtaaaggataagaaatgtggggaatcacagaaactttggtcgccaacatcgcggtgagcatttgcgctgggtttgccgcccaccattttatccggcagttcattccggtttttgttgagcggaggttgtacggtttcgacatgtgcaaggtccttttacgcccaagggaatttgtgtctaaaactgttccatggtgggaggacgttaatgctcttcccgaaattcatttttaatttccgaaaaccgactaaatttgcagagggacaaagaaaagatcgctgagccaatgggcgtcgttgcggccgccgtctatttgattttcgtgttcgccttcatccccgtgcccttttacgaatggctcagtcaaaacattctcttcgccggtgccgctgacaatcgccacggaaaaggcactcaaatcgaacggtcagtgcttcgactgggaaaaggcggaaactccttttttac

SEQ ID NO: 45506 - DNA, 1289 bp, Heterodera glycines
  unsure (1)..(1289): unsure at all n locations
tttttaattttttatagatttttaaatgtttggatttttttttggcttaccaaaacnttcatcaaaccctggctctttctattctcattcaaatcgccccaaattttttttacagcttaactaggccctattaagcttatttccagaaaatctcgcatgaattctcatttttaaattttttatagatttttaaatatttggatatttttttggcttaccaaaacttcatcgaacctggctctttctattctcattcaaatcgctccaaattttttttacagcttaactaggccctattaagcttatttccagaaaatctcgcatgaattctcatttttaaattttttatagatttttaaatatttggatatttttttggcttaccaaagcttcatcgaacctggctctttctattctcattcaaatcgctccaaattttttttacagcttaactaggccctattaagcttatttccagaaaatctcgcatgaattctcatttttaaattttttatagatttttaaatatttggatatttttttggcttaccaaaacttcatcgaacctggctctttctattctcattcaaatcgccccaaattttttttacagcttaactaggccctattaagcttatttccaaaaaatctcgcatgaattctaatttttaaattttttatagatttttaaatgtttggatttttttttggcttaccaaaacttcatcaaacctggctctttctattctcattcaaatcgccccaaattttttttacagcttaactaggccctattaagcttatttccagaaaatctcgtatgaattctcatttttaaattttttatagatttttaaatatgccaaaatttttttggcttaactttttcatcgaaaattcgatcactcatattttttgctaattgagcagaagcgtaccaaactttgcagggatactccccggtaaaggactaacttacactgaaatgagcgccgagctagctggctcaaaaaaattttcgaaaatctgagtctttcgtttttatttattttttgcaaaattaattcttaaatatttttttcagaaagggttctgaaacgcaccaaattttatttacctgttaagttaggcactctgatgctttttctatccaaaagggagatgaataaaattttttaaaaaatttttaaatttcccttttcaaaattctctccttccggggaattttttttcccttaaagtcggccggtagcggtccgatggctccagacaaatttttaaaaaatttt

SEQ ID NO: 45507 - DNA, 923 bp, Heterodera glycines
taaatagacaacgacgctttcattataaagctttaagtggagacaaagtaatacgaatatttcaatttcttacttatccgaatagacaaagataggttacacacgaacatttttatagaaattccggctgaaactaaaatccctcttttggtcttaacctatgatttttggcccattatggatgaattaagtatagaaggcgtcgcagaaatacattcatattttctaaattcgggtttcagaaaattaagatttaaaagaggctgaattacagatgcttttcaaattttgggtgtatccgaatagaaagaagttggaaatcagtacttttcacgcctataaaattcgggccgaaaaatattggtgtttgtgactagaaaaatagcagatgcatatcaaatgactacagaaaattacagcctccaagaaaataattgctttgcacaagcaatattttgtagagcccatcaaacacattgtgcttataggaaaggcagaattaaacaataggggcctttttattatgattacaacaaatcagcatggcgtctcactgatatggtatgtttcagttaaggtttagccgatctacaaatttcggcactgtctattttgtaaaagcgaatcaaattcctttggattccaaagtggaattacagaattgcgacggcaaatcctaaatagaaaacgacgctttcattataaagctttaagggagacaaagtaatacgaatatttcaatttcttacttatccgaatagacaaagataggttacacacgaacatttttatagaaattccggctgaaactagaatccctcttttggtcttaacctatgatttttggccattatggatgaattaagtatagaaggcgtcgcagaatacattcatattttctaaatttcgggttcagaaaatta

SEQ ID NO: 45508 - DNA, 1212 bp, Heterodera glycines
  unsure (1)..(1212): unsure at all n locations
tttttcgaaattctgactttttcattacttatttatttttgncaaaattaattcataagtattttttcagaaagtgctctgaaacgcaccaaatgttaattaaaagttaaataaggctctctgatgctttttctatcaaaagggagatgaataaatattttaaaaatttttaattcctttttaaacaggccaaaaagtttaggcttatattttaaaaagtttcatcgaacctagcgcactaaaatcgatataatctctccaaattttgcaggccttctccattgtaaaggactaacttaacctgaaaaaatgccaacgcttgttgtttttaaaatttttcgaaattctgactttttcattaattatttattattttgcaaaattaattcataaatattttttagaacgtgctctgaaacgcaccaaatgttaattaaaagttaaataaggctctctgatgctttcactatcaaaaagggagatgaataaaaaatctaaaaatttttaattgctttttaaatttgcgaaaaattttaggcttaactttttttttataaactgatcagaagcgaaccagattttgcgagggcatcaaaaagacaaggaaaagcactgctatgatgctaactccagtaattctgaatttaaaattttttattaatttttaaagcttcactattttatttttttagcaaaattaattcataaatattttttcacaaactgctctgaaacgcaccaaattttatttacaagttattttaggcactcagatgctttcactatcaaaaagggagatgaataaaaaatctaaaaatttttaattgctttttaaataccccaaaaattttaggcaaaatctttttttttataaactgatcagaagcgaaccagattttgcgagggcagtccaaaagacaaggaaaagccctgctatgatggggagaccgaatccttcgggaatagcttccctatagcctggactttaattctgcgttggatttttgctccccataattggttgagtaccccaaacggacacttgaaaaaatcgatttttttggttttcggggcagtccccccgaaccgatgcgcccagatttatgggggagggccgaatccttcgggaatagcttccctatagcctgtactttaattctgctttggatttttgctccccataatttgtttgagtaccccaaacggacactt

SEQ ID NO: 45509 - DNA, 1082 bp, Heterodera glycines
aataataatactaatggacattggaggagagaggaaaaacattttgatcagtgaatggaatgggtgagggaggacatactgctgatcagtcagtgattggagattggattatgtatgaccatgatctgattatgtttctgaaccaatcttaaatttagagggaaaaacatccgacaaattatcgaagaattggggttatgatcagtgatcagatggattcattctgatcagtgatcggagagaattcctcacgaaaagggtcctttcttcgtttgactcgttaattttattcacattaatttgggctggcattaaacattttggtgacgacttttcacaattccattcatttttccattctttttcaaaaaaatccgcacgaatcgggcctttgctgagtggcgaacatacacattctgagaagaaacaaatcatttgccaatttagcaaatgatgccattcccaaccctttgccatttttggcatttccttcgccccgccctccctttgatttgctttgcttacaatcggtcgtaagctgcgcgttgtcggctttgaactgtccgttcgtcccttcgattctctgccaatttctgtctgagatgacgagtgccgaaaatgacttttgaggagggaaactgaaaacagaaggaaagtgatcagacgaaaaaaagggacggaccgtacgaatgccaacgaacgcgcgattggaagagggaaaagcggaatcgaagccgtagaagggatgggacgaaacggaggaggggaaaagcgggagaagaagcagaagggagacaaagaggaggcgcaagaggagaaaggaggaaaaagtggagggaaaggaggagaaagaggaggagggaaaggaggagaaagaggaggagggaaaggaggagaaagaggaggagggaaaggagggttttttcatcggcggagagtgaagcgcgcgccatttgctgaacggactgataacaatcaaataacccaaaccattaaattgtattttgcattcgacacatatgaacaaaattaaagagtgcgcagactcaacgatatggattaaccgcgccaacaaataattc

SEQ ID NO: 45510 - DNA, 1058 bp, Heterodera glycines
tccctaacttcttttgagccattttcagatagggaagaccttcctgatacatttcatcaatttcagaattgttttttgttcccgtaattacgactttaccggtccagaaaattaacgctgtcatgcttttaccccgcttgaaatttaaaccgcaaaatatttcgggttcataaaaggcacgacgatttttttgaaactcgttcagttcaatttcatgtccgaatttaaaggtcgaaacaatattttcaaccgtgtgtccggtgtaagaagcccccggacaccccgagcccttaattatttctataaattttttaatagcattttcgcagtctatcagacttttcgtccccagacatatcatttttccggattcccataataatgccgtggctttgataggagttgtacatttgataaccgcggcattgaattttctagggttatacttaaattcgcattcggtgatcgtcagagagtttagtttaatcccatcccggtaccgagattagcgagagcaattatatttacgattattggtttttgcattttgatacaatgtaccaatcaaatggtgctttcactcctttatatacccctctataaatagcaaacaaaaataaaacaaaattgaaaaatgaactgcccgcgataaaattaaatgttgtcattactgtccttgtcattacgagatttgtaagagatgtaaaagccacgagtcttttgcatttcggtacatcattttttgataatttctggctatgccccaaatgcgcgaaatatgttccctatgaaaatataaatagatcaaataaataagatgcattaaaaatgttttgcgcgcaaattcacattctcaccgcataaaattaaccgttcgaaaaacgccgtgggttttgggccaaatcgatttcacctccacgtccgtaccgaaatgttccttaattttatttccctcgtcgaaattacaccttttaaaatttttgggtgcggcccgaaacgggaaagtaccgaaaatacgttaattaataatttatcccatcgttttaaagtaatggacc

SEQ ID NO: 45511 - DNA, 1282 bp, Heterodera glycines
ggtgcgcatgattccactgttccaagcaccccaccaaaagcaatacgatataaccaaaatataaggaaaaattttttaaaaatttttttctccatcttcctttttgatactaaagcatcagagtgctaaaattaagttgtaaataaaatttggtgcgctttagagcactttctgaaaaaaatatttatgaaacaaaaaaatcgattttttcaagtgtccgtttggggtactcaaacatttatggggagcaaaaatccaacgcagaattaaagtacaggctatagggaagctattcccgaaggattcggtctccccataaatctgggcgcatcggttcggggggactgccccgaaaacaaaaaaatcgattttttcaagtgtccgtttggggtactcaaacaattatgaggagcaaaaatccaacgcagaattaaagtacaggctatagggaagctattccggaaggattcggtctccccataaatctgggcgcatcggctcggggggactgccccgaaaacaaaaaaatcgattttttcaagtgtccgtttggggtactcaaacaattatggggagcaaaaatccaacgcagaattaaagtacaggctatagggaagctattccggaaggattcggtctccccataaatctgggcgcatcggctcggggggactgccccgaaaacaaaaaaatcgattttttcaagtgtccgtttggggtactcaaacaattatggggagcaaaaatccaacgcagaattaaagtacaggctatagggaagctattcccgaaggattcggtctccccataaatctgggcgcatcggttcagggggactgccccgaaaacccaaaaaaaaattttttggataaaaattatttaaatgaactgactagataatatttaaaataggttatttctcttcctttcagtatccctgcaaagtttggtgcgcttctgatcagtttctgaaaaaaacttaagcctaaactttttggcctgtttaaaaaggaattaaaaatttttaaaaattttattcatctccctttttgatagaaaaagcatcagagtgcctaaactaacatgtaaataaaatttggtgcgtttcagaaccctttctgaaaaaatatttaagaattaattttgcaaaaaataaataaaaacgaaagactcagattttcgaaaatttttttgagccagctagctcggcgctcatttcagtgtaagttagtcctttaccgggaaggaccctgcaaagtttggtacgcttctgctcaattag

SEQ ID NO: 45512 - DNA, 359 bp, Heterodera glycines
acattacataaaataattgtttatctcgaattaattttcaagggcatcaaattcaatttcagcttcaattattaagttacagggcataatttcgaggccccatgccattaaagcaggattaatgaaggaattttgtgacttaaatagattttaaccccataaacattacgttttttgagtgctgtttctcgtaattcaggtgaatagctagaaatttttgtagtaatttcagttttttacgtttttggataatatgaaaacgaaaaatttggctgtcgcatggcgcccaaacggcggcgcccaatcggcggcgcccaaacggcgtcgcctaatcggcggcgcccaatcgacccccaccg

SEQ ID NO: 45513 - DNA, 906 bp, Heterodera glycines
  unsure (1)..(906): unsure at all n locations
ttttgtcaataactatttttcgtgcgttttcaaacacactattagtgctttattcagcgctacaacagaagacaaaagagttgatgtccaattcccggtagggatttaatagtgactttcagagatagccattttttgtcaagaactatttttcgtgcgttttcaaacacactattagtgctttattcacgctacaacagaagacaaaagttggtgtccaattcccggtagggatttaatagtgactttcagagatagccattttttgtcaataactatttttcgtgcgttttcaaacacactattagtgctttattcagcgctacaacagaagacaaaagttggtgtccaattcccggtagggatttaatcgtgactttcagagatagccattttttgtcaataactatttttcgtgcgttttcaaacacactattagtgctttattcagcgctacaacagaagacaaaagttggtgtccaattcccggtagggatttaatcgtgactttcagagatagccattttttgtcaataactatttttcgtgcgttttcaaacacactattagtgctttattcagcgctacaacagaagacaaaagttggtgtccaattcccggtagggatttaatcgtgactttcagagatagccattttttgtcaataactatttttcgtgcgttttcaaacacactattagtgctttattcagcgctacaacaaaagacaaaagttggtgaccaattcacggtagggatttaatcgtgactttcagagatagccattttttgtcaataactatttttcgtgcgttttncaacacactattagtgctttattcagcgctacaacaaaagacaaaagttggtgaccaatcacggtagggatttaatcgtgactttcag

SEQ ID NO: 45514 - DNA, 1126 bp, Heterodera glycines
  unsure (1)..(1126): unsure at all n locations
ccattatgataaaatatnntgattgcgaatggggaattcgctgataataaaaacgaaatttgcttaaacaaattttaacctttgaaaaattttgtgtaaatttcagaatttgaccccaaacccaaaattgctattaagaaatggcaaaaaatttgcgaaattttctcccgccgacgcctcttgtgaagaaaataatcgcattaaaattttcaaattcatcgacgccaaaatctgtcgttaccccaaatttcaatttagttttgttttaaaacgcttctaaatgggctaggtattttggaagcaaattgatcatgaaaaaatataacccaaaaaattatattttaacaatttcatggagttgaaatatgtcactgaattgaataagagaaacatgacatggacaatcatcccgagcctaagcttttgactttttttggctttttgccggtcagctcttttatgtattttccaaattgaattttctgagagcgctagcgccctctttggaattgctgagaaaatgtctttgtggagatataatgagagtttttaaaatgaatgcaaaaatgaaacacttcttttgcttttatgaaaattttagcattttaaaattaaacggtattttttcaaattttattcgaaagccattgaatatattactttatctgttctagaaattgtggtttaaatccttttggaatgttcattcaaaatttttgtttaattttccattcttttttagttaattcagtctcgacaagtcttggtctctgatcgtaaatttatttttagacgctttgaaacacattccaatttgtgcaccaattaaaaaattgttgatcagcataataatcatctgaatggcatgggttctccgcctgatccggcgatggaaatgccgccgccaaaagagatcaaagtgttggagagctcggcggatgacattcagcaccggcaaacagaagcaagtggttgagaacagtacacaccattaattcnggcgctaattggccttaattggtcacataatgcctgagagatttaatcngtttttaatggcttcaanttggaatatctgagggcataagtcatttggacaaatttttatttatttattgttttgttt

SEQ ID NO: 45515 - DNA, 1135 bp, Heterodera glycines
  unsure (1)..(1135): unsure at all n locations
gcaatatgatcagttgtttgatctgagtttgacggatggccaagcgctgggccaagcggcgcgcgcatttgaacagcaatggcatgagcttaagcattttctgatcacccaccggcactctgatcaagagctcttgatcagagatgtgacgagaaaattgaacaagcgattggagtcggaatgggacagagttgaaaaagccagtggaggaggagaaaagcagcagcatcaccaacgagggcacaattcagtaattagtggagaaaatcgcgaatttttgaaccaattgcatgccgatcagttgaaacggttgttgagcccacaacagaggacagataatgataatgataatactgatgaacagaaacaaactgatggtgaagcaaaacaaaataatgaactgagagataaaatcgtgaagcaaattgaatccggtctaaattaacagaatcatatttttttaattattaattaataatttaaatagattttaatttttgaaaatgagctaagaaaagagattgtccagcaaattcgaaatttgtttacttataaaaattttttaattttttaacaaatttgtcgttaatttgcagagttaactcacttctcagttaatttaattttaaaaaatttaaaactaatttgtctgtgttaattataggtataactatggttgcacaaataaggcctttgcttgccgattttgtgggggaaaaccaagtggacaatattttcaaaattcttggcattccgaccattttggaaggttcgaatgatgcattattattagtagacacggaaagagaagaaaatgttgaaagtaacaaaaaaagtacgacaaaaaagaaaaagccgaagaagaaacagctaaacactgaagaaaatggaggagaagaagcggacaaaacagcgacaagtgacaaattgtcccaaaaaggtgttgctaatgagagtgagcaaagtgacaaagtgtcggcaaatatttcaggggaacaattaacgactgataaacagccaattaatgatgatggtgatggaataattaaaactaataggtaggaaggattagtaactaanaaacatataaaagacctttcattggtccctaaattgaatatcgaatttggtaact

SEQ ID NO: 45516 - DNA, 904 bp, Heterodera glycines
caccaaaagccaacacatcggcgcagataaagctgaaaaaatgaagaatttttgtttatttttcaattttatttacatttcctttttgtgagggcgtcgtcgttttttggcattgtccaaaaagaaccaaagaatggtggcaaaatcgaccaacagaagaatcacagcagaccaactgaaagaattggggaaaggtcaaagcgagggaatccaaaagtgaaaaaaacgtacagaatttcggaagacatttgcaagaacagaatgaccggaaaaatattgggggaatggaagaatgaatggaacaaggaggaggagaagaaaaaaggcatttttatactaaaatattagcgtaacaatttgggtactaatgcactttacccgacataatttttttttgtctaaattcatgtaaaattaagtgaaatcgatgattgttagtacattttaaaaccacaagcgacaattctgaacaaaattataggcccatgactattgttggtgtgtcctaaaaccaacagagacattcactcaattctccaatttggctttttcgtgcatgggtcttcggggcaaggcttttgcaattggtggggaatttttaaaagacttgagcagcatttttctcattttttgacgttggacgaatgagtccttgtgggatttggacactttattagtgtcccaggctcataactctgttcagaattgtcatcgggccttaaaaatggtaccaatcgacttatctccaggagaggaatcagaaaatgtatttaaatattaaaaactgtaattagccgaatttttcaagtttaccgaaaaacgggccccatttaaatacctatgtatcaggggtgtgacttgtctcagaaaagacgagagcaagagtttggcgagaggcgagagt

SEQ ID NO: 45517 - DNA, 1119 bp, Heterodera glycines
  unsure (1)..(1119): unsure at all n locations
cctctatttttctataaaattttaaaaattgtactaattctgttagaaacaaatttgaagtattaataaatttttatatggccctaaaaatattagtttaattttgttaattaataaaaagttatattaaaattcttgagtctcatttattatccttggtactttattatgttcaagttagcataaaatgtaggtggaaatgtcacaggctaatgagaccaattcagccagaactcatttgtcagtgctttaaaaattccctgatttggaaaaatatttttctttttcaattgagtcgaaaattaaactaaactcgaacacggacaacgacggaaaggggacaaatgggcggcgcccaacctgtgaaggattccttaatttaataaaatggaaacttctaattgctttatcaacgattcaggcccgtagccaggggggaaagggggcgggaattccaaaattaaaaattttgccaggaaaaatttgcaattttttaaaatttttcatcaattttttaacaaatgcatgaaaatttgaagtttttccgacggcgcctattggcaccgccatacaccctcccaatttcaccttatttttaaaaactttgatcccattaaaaattagtccctttttggcgctaaatcgctacaaattcttgtttttttgctcttcggcgctgaaatttttaaaatatcaatggagaaaaaatttttggcccgaagagcaaaaaaaaaaggtcttcgtggatttcccccttccaaattattttctggctacgggcttgcaatgatttatttggctttttaagttttaaattttggtccaatggctctcctggaataaaagcagaggagttttttctttttaaattgactcgaatggcaattgtcaataaaaataaatgcagtcagaaactgttccgtggacaaagaggtgccaattgcaaaacatagtgcccctcgtctatttttgttttaaacaaaaagttttgtattatgccgtcacaaaaataattaatgcgacatagagcattttgttacggttattattcaagtcgcccctaaaactcggttgtcggcggtacgcttcattaattgctccaatttgtgccctgngtaa

SEQ ID NO: 45518 - DNA, 1348 bp, Heterodera glycines
  unsure (1)..(1348): unsure at all n locations
tttggtataatanttagacaaatggattaaattgaatattgggatgacatccatggtttttgccccagtgacaatgatcttccccgaaatataaactaggcacgtgactccattcaacaatttacaacgaagggctgggaaaatgctagggtcataaataccacccagggtgttttgaagtcgttctacactgatgcgctgggcaaaggtttgaacgccgacaatgttgaccacccgcagctggtggatgcccagtgtgatgctctgggtgtgttggatgcgccgcaaaacacgtgccgccattttactcgcactgcttgggtggggcactccggtgaggaccacacgcgccgattggaagaccagcgcagccagagttttgcccgctgttgtacggatgcgcattatgatagcgtggaagcgtctggggttgtactcggtgtttacgccacgttgcgcaattgtcaaaaattgctcccgagttaatggttgaacatttattttaaaaacaacagtacaattggaaattgaatacatctacaaaacaatggacaaaatttcaagaggaaaaaaggttttgtggtctccgcctccaaattcaacgacgcacggcaaattggggtggcgcaagcggatgccatgttttatgtagtagtgcatccgtacctttaaattgcgtggtaccgacaaaacaaaacaaataaaaacaccgttatgctgaggtagcctcggtaagctggggcggagtgggtgtccaggatggaaaggtcattgcaccgcactggaaaattgcgcacggaagggcgcaggtgggcggtgcgcagttggatggagcgcaaatgctccacaatgtcccggcgtttctctaggcttttgaaaagcacatgcagttcatgggcactgcatttgaaccgcttgcagaggtggtccacgagcggcacggggcgacggcgttcggcgcaaccacacttttttggagtgcctaatttaaaatttacatgtcaatgacaacaaaagtaacttgttgctggcgcctcctcaccaattggagcgagcggctcgcgcttcatctcctcgtcaatgagactgatccagcttggatcctccgcctcctcctcttgctttttcgttggctctttgttatctttgttggcgtcctctaaatccatttcgggataagcgttgtttatccaatcggtggcaagaattaaatccatttttttaagctgtgaaaatgaaaaaactataaataaaaagaaaatttacataaaaaagtaaaatggacgccttccaacaatttaaaagggaggatgggcaattttcttatcccattcaccatgattgtgtc

SEQ ID NO: 45519 - DNA, 991 bp, Heterodera glycines
  unsure (1)..(991): unsure at all n locations
tttttcataggccagcgtgtttaaagcaaacccgaaactgnnataggaaatntaaattgatcataatagaagtttaatttttatttgtcccatgcattttctgggaaatcttttcgcgaaaagttgaaaaatttcaaaacggcagacaacagatgcatttcaaacaattcaacaatataatataaaatttaggcaaaaatttttgttccttcctctttggaaatggtcttaaattttgcttgtaaatattcagataacaagttttttttactgaaaattttttacacactacaggatgaaacgcaataaataatgtttgtagacaaaagaaattggcgaaaaaaattgcctcaacaatcagtggtgaaactgaaagaaaaaaacttccccaaaaaatcggagcttttccgacggcatcagctgcatttccaacagttcaacagtataaataaatattaggcaaatgaaaaatttttttccttcctctttagaaagtgtctaaaaatttttgttgttaatattcagaaaacgtgttttttttagtgacaatttttttcaagagaaggatatgaacaatcacttataaggctcatgcttggagataaaggaatcggaaaaaaaaattatctcaacaatcagtcgtgaaacagttcaataattcggaagcagtgccatattgggaaaagatgcacaagtagagtaggctcgaaataaggcaactgccgaagattaacaaaaattcaaatttattggccccgttctgctttgacaggccatatctcgccagggagtggcggtagaccctttgttgatacatttgaaaatgtagagcgcgtctagctcattcgaataacgatcaaactggtttgtttttgtcacgaaacaacccgctgatggccacgtcgaagaaaagtcccgaaatttgacgtccgtaaaactccgttttttcataggccagcgtgtttaaagcaaacccgaaactgataggaaa

SEQ ID NO: 45520 - DNA, 961 bp, Heterodera glycines
taccccgaagaaatgatttcccaaaattcgactccaatttatttatttttttcttgaaaagttgcaattgtgcgggcgaaattgataaaaaaaatgagtcacttttggaattttgcataatactcggatttttccaggaaaaattttaacaccttttttcataactattttgctctttttcgtaactattttagtaactatttcaccatttttagcacttaaattttaggtgctaaaaatcttaactctattaatcagccataaaccaggggtatcatttatcaccgaaagtttccgaatgcaaaagtcaaaacttcgttttatcctcgaccccatttcgcagcatataaaaaatttttgtgaaacaaaaacatcgtcttggtcaaaaatcgtcatcatcctcctcttccgctgctgccatttcgagagcctgcaaaagtcgaccatgtttaatcaaactgttagattggagtgccattccccgcccccaattaaaccgtaaatgaagtgcctaccctccgcctcgttcggttcggtcagtcctatgcccctttgcactgtaccaactgttcacgcctgcgctgctcgtcaatggtctccacctccgggttgcgcatgtccgggtaccgcagtgccttcaccgcctggtggtacagctccaacagttcgttgacccgcgcgtcgaattccctgcggggctcaaccccgcgatattggtcatcggtggtcccaaatttgacgtagtgccgcccgcccgccaacgggtcgccggcgaccaactgagcacgaacaatgccctctttgatcgccttgaccaactcgcgatgcgcctcctgctcggtcgactgaataggaaaaactgagccaaagaaagcgaggaaacactgccctttccatcggagcgatttgtttttaccgagagtaagtgacaaaatttaaaaaatattgacagggaaaatag

SEQ ID NO: 45521 - DNA, 1217 bp, Heterodera glycines
tttgaaccctaaaagtaaagttttctaaaattgaaaatttcattcatttttgaccgataatgactgacggcaggcgtcgtcgggcacatttttttaacaaaatttttatgaaattactcaaatgctcaaaaaatttttcccaattttctcaactttatcgtttcgtgtacgaggggggaaattgctcattgtcaaccccaccctccgctggtttagggcctgtccaacaacagcagtttttgccccgctgtaatcaccggtgatctgattatattcgaatgaaatgatcagtctctctctatctccctctctttctcgctctctttctctctctcgctttctctgtctctcgctttctctctctcccctccctcactctctttctctctctctccctccctctctctctttcgccctctctctatctttcgccctctctctctttctctctctcgctttcactctctcctccctctctccccctcactctctccctctctctctctttcgctctctctctctcttatccatttgtctgaccctttgagtttgattataaattgatttaatgatgtaataaattcttgacctgttttgcaccagtgcctttcgtcatccgcgattcgtatccttcttcgtttgtcaatttcatgtacgcaattgcgtcttaaatcgccaatgatatatttcgtatataaaaatgatttgtgtgtctatggccaagaatggcactttcaaagaaacggtcaaatttgggcagaatttttaaaacttatcctaaattatgccttctcgttaaattttaattttaattgacgagtctcacgaatattaaaaagtataaatttttatttttctcattgaatcaccttcaatatcctccgtttgcacagaagagtttttcgttgtttttgtgcttaagatcttcagcagttgcgtttgcttaatttcatcctccgtttttgcaaaagtgccatcaaaaatgaaaaacagtgccaaaatgacgatgggaagaacgcgaagagccattcttaggcaccaatttgaggttcgttattctgaattttatttaatgatttaattaaaggaaacacttctgatgttttttcaaataaaaaagaattttattaaattaattttacttatagaaatttatttaattgaacaatattttattacaaatataaataaatgctagcaattttaataataatcat

SEQ ID NO: 45522 - DNA, 1351 bp, Heterodera glycines
tttgaggggatagaaaacaacaacaaaaactttactcatctaaggctttgagccttaaattcagagcattagggctcggttgggttgggaaatccaaaaaaaaaattcccatttcttttgaaaccttaaagatttaggttctacaaaatcattcagttgtgttgaattttgcaatattttctaaatgtagcagcattcacataaatcagtttttgcattgtaaacgaacttcccatttaaaaacatttaaaagtgccaaagatttttggcattatgggtccaccatacaatacgtgcagatattttcgggtttgagttgtaaaaaagggatggatattccctgatttttacggtttttgaaaaaaaaattcatggccaagtcgaaacagttggcccaccggcaaatccaaagaccgaaaaattccatgacccaaattttaaattatattaaatttttttcaaatttttaatttggccctacccaaaatggccatgtccacattctgtgccgcttggacggacagtcccaactgcgtgaccaattggtcgccgagcgcattccctccactgatccgcgcttccaacgccaacgggggcaaaaggccggcgatgagttgggcctggaaaattggcaattttcaatttataaagtactttagagcctaaatgacaattaaaagtttcaaaatggttgaaaaagaattttttgaccaaaaaataggaaaaaattttttttattcggcagattttttaacacaaaaatgccaccatacattttaggtacttaccattgtttccacattatcagcatgtgaacgacgatgggacatgatgatattgatattgatgttgagcaataacagccaccaaaaatgaaaaaaattgctaaatttaaaaaaactggcacaaattgtaaaaaatttattatgtttagggcttatattttaggctctaaaaattgccaaaataattaggttttaggctctaaaataaaaaataggcacttaaaaaaagaaaataggctttaaaaattctcaaatttaggggattagaaaatgacaaaattttatttaaaaagcgaacaaaattaagcttgcgatacataaaaaattttgtcaaaataaaaataaattttcgagaattggaaaaattttcatttcttaaggggtgtattttttctggaaattttagggccgattcttaggggatgttttcttttcgttttattgcatttttgttaataaattttgaacaaaacgccaaaaaagatcaaaataggttaataaaattttttttgaggtttttaagactaaaaataaaaacctagaaaataggccctaataattcgaaa

SEQ ID NO: 45523 - DNA, 917 bp, Heterodera glycines
cggggcagtccccccgaaccgatgcgcccagatttatggagaggccgaatccttcgggaatagcttccctatagcctgtactgtaattctgctttggatttttgctccccataattgtttgagtaccccaaacggacacttgaaaaaatcgatttttttgttttcggtcagtcccaccgaaccgatgcgcccagatttatggggagaccgaatccctcgggaatagcttccctatagcctgtactttaattctgctttggatttttgctccccataattgtttgagtaccccaaacggacacttgaaaaaatcgatttttttgttttcggtcagtccccccgaaccgatgcgcccagatttatggggagaccgaatccctcgggaatagcttccctatagcctgtactttaattctgcgttggatttttgctccccataaatgtttgagtaccccaaacggacacttgaaaaaatcgatttttttgtttcgataaatatttttttcagaaagtgctctaaagtgcaccaaaattttatttacaacttaattttagcactctgatgctttagtatcaaaaaggaagatggagaaaaaatttttacttatattttggttatatcgttttgcttttggtggggtgcttggaacgagtggaatcatgcgcacccgtccgatctggcaagttaagcaacgattgctgactagccaaaaggttcggtgccgtgatgaaacgaaccagcactgcttaccccgcggcacccggcacggtcccccgaaggaatggatttaattaaattctctccttcggggatttttttccattaggtcgtccgttagcgttcgattgctctagtcaatttttaaaaatttttgttgaaatatttgtcgtgctctgaagggcgggggggggggggg

SEQ ID NO: 45524 - DNA, 774 bp, Heterodera glycines
caagaatggagcagtgtgtcaattcggtataattataccagaggaaatcgagaaaatgaatgtcagggaataaattgactagcaaagcatgggggagggatgagatcaatccaatcccttctttttcccttcatttccccccccccctcccatttattctttcccccgcccctttttgctcccacttttcttcttcaatttttaacaattgccttatatttaaagggccatccgcggaggggtaaaaacgcacagattgacaatttgttcctttcccaatttaaaaaatccttccaatttttatacatttttggataatcactgattgcgtttgaggtgccgtcccccccccctttccctctccccctctttttcccccctttccctctttccgcgcctttgccgtttttttgtgccgccattcgtcgcgcatttcctcccttttcccccattttcaatatttattgcttctccccccccccccattcattcacttccccccaacttttcccctttctcctgtccattttgcaggtgttactttttcatttgcccaaccaaacattgcaaaatttaagaaatttgcgcataaattcgatttttgctctttcacgtatttccaatcacttgaaaaggttcactttcttaaacacatttcagcataaacattctctgctcacttggcgattgctgaagtgcctcttttagttttattattcatttcaattaaaaacgattcaaagacaacgaaaaatgacggaaacggcggatgaa

SEQ ID NO: 45525 - DNA, 1043 bp, Heterodera glycines
  unsure (1)..(1043): unsure at all n locations
acgccttcacgcaactaaaaattcgccaaatatttcaaaaattacgccggaaaaatttcgcaataaattccccctcccctcgtttcggggctactagacgacccaaaatttccaatcgataatttgtcagcaattctcttacgtcagcgatcgcccaccgctcggncttttcccacaacggcgtctctcccagcgctttgtaaatgggcttcggtggacgaacttcgcggcgtccgtcgcgttccaagtaataattgtcggccaatttgtggtgcacgccgccctgcgccatcgctggctcaatggctacgaccggactgagtgttggggaagcgattgtgtggtctgaactcgactctaaaagaagtgatgaggtattaaaaacaataaaatggaaatttaatgtgtaaagaagtcaaagcacaaattggacctgttcatctggcttaggaatgttcgatggtggtgttaaagtcggatcacgcttgactttgagcaaagcattgcgaagccatgcgataaaaggacttggggcccgattcttcaagccggcgggtgccaatttgggaatctttgacattttaaatggggtagatgctataagaatcacgggtaattagtgaattcgtcagctacgagtgaacgatcgtcataatttaccaaatcctaaattaaccaattagcttctggtcttaaattttctaaaatgacaacattatgccaaaactattcaataactttaaacaaactcattcccaatacagaattttccaatggcatggcatgactaaacgaacaagatagacaaattgtaccaaattaaagacaaaaaaatgaatatagaatacatatgtacataatagaattttacactgcaaatgcacattcgccactgtcctgctgtgccgattgtctgtttcaacagtttttggacattcgtcggtgtttgtccattcaaaattgatcactttgtgtgctttttgcatttgatcagttcttttgaacaattcggttttggacattcgtcgcctctcccccccccc

SEQ ID NO: 45526 - DNA, 1263 bp, Heterodera glycines
  unsure (1)..(1263): unsure at all n locations
tttagccactcagatgctttcactatcaaaaaagggagatgaataanaatctaaaaatttttaattgcttttanaacgagcgaaaaactttagggcttaactttttttttataaactgatcagaagcgacccagattttgcgagggcatcaaaaagacanaggaaaaagcactgcttatgattgtaactccagtaatttctgaatttaaaattttttattaatttttaaagcttcactanttttatttttttagcaaaattaattcataaatattttttcacaaactgcttctgaaacgcaccaaattttatttacaagttattttaggcactcagatgctttcactatcaaaaagggagatgaataaaaatctaaaaatttttaattgctttttaaatatgcgaaaaattttaggcttaactttttttttataaactgatcagaagcgaaccagattttgcgagagcatcaaaaagacaaggaaaagcactgctatgatgctaactccagtaattctgaatttaaaattttttattaatttttaaagcttcactattttatttttttagcaaaattaattcataaatattttttcagaaactgctctgaaacgcaccaaatgttaattaaaagttaaataaggctctctgatgctttcactatcaaaagggagatgaataaaatttttaaaaatttttaattcctttttaaacaggccaaaaagtttaggcttatattttaaaaagtttcatcgaacctagcgcactaaaatcgatataatctctccaaattttgcaggccttctccattgtaaaggactaacttaacctgaaaaaatgccaacgcttgttgtttttaaaatttttcgaaattctgactttttcattaattatttattattttgcaaaattaattcataaatattttttagaacgtgctctgaaacgcaccaaatgttaattaaaagttaaataaggctctctgatgctttcactatcaaaaagggagatgaataaaaaatctaaaaatttttaattgctttttaaatttgcgaaaaattttaggcttaactttttttttataaactgatcagaagcgaaccagattttgcgagggcatcaaaaagacaaggaaaagcactgctatgatgctaactccagtaattctgaatttaaaattttttattaatttttaaagcttcactattttatttttttagcanaaattaattcataaatattttttcacaaactgctctgaaa

SEQ ID NO: 45527 - DNA, 382 bp, Heterodera glycines
ttggttttaaatttcctaagtgattttgtacccttacaatgaaaattgttagcatttgcgaatttgatgtttttcatgtgttagagacatgaaaatagtacgccaaaatgagagaaaaagaaattcacaaaatttttcaccaaataacttttgattgagccttatttttgtattaaatttccttattaatcgatgcagaatttttttctctataggtttgcaaaatttggtgcaaattgtatgcataggaaaaaagttatatggagagaagtaaatgttgttttttacataattaaaatgaagagatagtacgccgaacagagagaaattacaaagaaaaagaaaaacgacgagatagtactaggcttttctctgcacagtg

SEQ ID NO: 45528 - DNA, 893 bp, Heterodera glycines
aaaattgactagagcaatcgaacgctaacggacgacctaataggaaaaaaatccccgaaggagagaatttaattaaatccattccttcgggggaccgtgccgggtgccgcggggtaagcagtgctggttcgtttcatcacggcaccgaaccttttggctagtcagcaatcgttgcttaacttgccagatcggacgggtgcgcatgactttctgaaaaaaatatttatgaaacaaaaaaatcgattttttcaagtgtccgtttggggtactcaaacatttatggggagcaaaaatccaacgcagaattaaagtacaggctatagggaagctattcccgaaggattcggtctccccataaatctgggcgcatcggttcggggggactgccccgaaaacaaaaaaatcgattttttcaagtgtccgtttggggtactcaaacaattatggggagcaaaaatccaacgcagaattaaagtacaggctatagggaagctattccggaaggattcggtctccccataaatctgggcgcatcggttcggggggactgccccgaaaacaaaaaaatcgattttttcaagtgtccgtttggggtactcaaacaattatggggagcaaaaatccaacgcagaattaaagtacaggctatagggaagctattccggaaggattcggtctccccataaatctgggcgcatcggctcggggggactgccccgaaaacaaaaaaatcgattttttcaagtgtccgtttggggtactcaaacaattatggggagcaaaaatccaacgcagaattaaagtacaggctatagggaagctattcccgaaggattcggtctccccataaatctgggcgcatcggttcggggggactgccccgaaaacaaaaa

SEQ ID NO: 45529 - DNA, 1339 bp, Heterodera glycines
  unsure (1)..(1339): unsure at all n locations
atattacaataaaaaaacaccnattctgctgacaatgagtgaattacggcgcattaattaatgtctttgatcatttggagaaaatgtagaacgcataatggagacattttccaaaatttggtcgcttttccctttcaaaatgtgaaaaaattgttcatcctttgtgtgtgaccttgaaaatgtattcctaaaaaaccagtttttttaaatagcaaaaattaatttttaaaattcttaaatggaattctaagcctaattaggtcatttttatggcattttgtgcctaattcatcctttacgaggaaattttttcaaaaaaaattaaattttatttacatatttgttttttttgtacatatttcttatatattgagatattttatttacatattttgatcactttgtacgtatttttgccagccctataatcaggattttttggcgaaaaacggcgaaaaagtaaaatacacccctaaaaatcggctaaaaaaagaaaaatacacccctaaaaatcggcgaaaaagtttgcaaaatacacccctaaaaatcggctaaaaaaagaaaaatacacccctaaaaatcggcgaaaaagtttgcaaaatacacccctaaaaatcggctaaaaaaagaaaaatacacccctaaaaatcggctaaaaaaagaaaaatacacccctaaaaatcgaatttttgacttcagcccccccccccctccgaagccaagggtctggctacgcccttgtttcataatacaaaacggagaaatgatcaatttgcaattcgcacacaccgtttcaaaaaacgagatgtgtgtcaataaagagagagtgcagagaaaaaaacatctctcgctttggcgttctatttctttatctctgttaatagagaaaaaccgaatttacttcgtgacgtttaacttttttcctgcacgttaaatccacaccaaattttacatatcgatagagaaaaaaaatctgcatttttctatactgattttatttttgtttatacgttagttcaaaagatataataaaaacaaaatttcgaatgctcatatcatttctctaactcatcaaattgcttggcatttgcttagaaaaagcttatccttatcatgagctttcaaatgataccaagtttttccaatttggttgggaaaaaccttcaaaaataattcccaaaattcgtcattttttaatattttggacaaaaataaaaatattcatgttgcacaacggactcgaacctcccccctttgtccctttactatcttacaaaaaccactgagccacacatgcaaatctttttggaactgggaggccaaaattgaaacgatgtgt

SEQ ID NO: 45530 - DNA, 1186 bp, Heterodera glycines
  unsure (1)..(1186): unsure at all n locations
tttatttacatgttagtttaggcactctgatgcttttctatcnaatgggagatggataaatttttaaaaatttttattcctttttaaacaggccaaaaagtttaggcttaactttntagtgaaaattcaatcactcatttttcgagtagtgatcagaagcgcaccagattttgcaggggcctaaaaaggtcaaggaaaggcgtctctgcgttgatttagcagtagtacctatgaatttaaattttctatgaatttttaaagttttttgaaatttttttaagtgcaaaatggtggtgtctgcaaaaaattttcaccgggtttaaaaaatctaggaaaattagtaagcatttgtagtgttccgatacgtatccctgcaaaatttggtgagcccctgatcaattacaaattatttatggacgatcaaatttttagaaatttttatttatttttgcataattaattcataaatatttttttcagaaaatgctctgaaacgcaccaaattttatttacatgctagtttaggcactctgatgctttttctatcaaaaagggagatgaataaaatttttaaaaatttttaattcctttttaaacaggccaaaaagtttaggcttaactttttagtgaaaattcaatcactcatttttcgagtagtgatcagaagcgcaccagattttgcaggggcctaaaaaggtcaaggaaaggcgtctctgcgttgatttagcagtagtacctatgaatttaaattttctatgaatttttaaagttttttgaaatttttttaagtgcaaaagtggtggtgtctgcaaaaaattttcaccgggtttaaaaaatctaggaaaattagtaagcatttgtagtgttccgatacgtatccctgcaaaatttggtgagcccctgatcaattacaaattatttatggacgatcaaatttttagaaatttttatttatttttgcataattaattcataaatatttttttcagaaaatgctctgaaacgcaccaaattttatttacatgctagtttaggcactctgatgctttttctatcaaaaagggagatgaataaatttttaaaaatttttaattcctttttaaacaggccaaaaagtttaggcttaacttttttttcagaaacttatcagaagcgccccaaactttgcagggatactgaaaggaaa

SEQ ID NO: 45531 - DNA, 532 bp, Heterodera glycines
acttttgtgagcatttgcagaagaattcgttcactcaaatagcccaaagattcgcagaaaatgtcattatcttaattacttaattcattaattatccatttttaattattatttgccatttttcactttgtgcccatttcttccaataatcgactaattttgagaaatttgtccaaggttttaattgcaacgccattgctcagttcaaatttgttcacaattgacaaataatcattttcatgcagcagaaattgtaacactttcaaattggccgcgtgctctaaagcaaataaattaaaaatttaaaaagaaaaaaaatgaaaagataaataaaaattagagtgaagcgggaccgggaattttgggcaaaaccgggaccgggacttgccgggacctgagaagccgtgaccgggaccgggacctcgatttttgttcgggaccgggaaacgggaccaaccgggaaattttaaaaattcaaaaaaaaatttattttaatttatttcaattgaaaataatacaaaattaaattttt

SEQ ID NO: 45532 - DNA, 1132 bp, Heterodera glycines
aaaaaagagatagccatttttctgggataacctctaaatattaaaatcctctgtgaaataaaatgtcgattgtgcacagccctcccgtctcatacgcgagcgcttttgtgaggtataaaatttctcaaaaaaaagagatagacatttttctgggatagagtataaatttaaaaaattccctcaaaaataaaaggtctattgcgcaccgccctcccctatcatgctcgagagcatttgtatgtgtataaaatttatcaaaaaaagagatagccatttttctgggataacctctaaatataaaaatcctctgtgaaataaaatggcgattgtgcacagccctccgtctcatacgcaagcgcttttgtgaggtataaaatttctcaaaaaaagagatagccatttttctgggatagagtataaatttaaaaattccctcaaaaataaaaggtctattgcgcaccgccctccctatcatgctcgagagcatttgtatgtgtataaaatttatcaaaaaaagagatagccatttttctgggataacctctaaatataaaaatcctctgtgaaataaaatggcgattgtgcacagccctccgtctcatacgcaagcgcttttgtgaggtataaaatttctcaaaaaaagagatagccatttttctgggatagagtataaatttaaaaattccctcaaaaataaaaggtctattgcgcaccgccctccctatcatgctcgagagcatttgtatgtgtataaaatttatcaaaaaaagagatagccatttttctgggataacctctaaatataaaaatcctctgtgaaataaaatggcgattgtgcacagccctccgtctcatacgcaagcgcttttgtgaggtataaaatttctcaaaaaaagagatagccatttttctgggatagagtataaatttaaaaattccctcaaaaataaaaggtctattgcgcaccgccctccctatcatgctcgagagcatttgtatgtgtataaaatttctcaaaaaaagagatagacatttttctgggatagagtataaatttaaaaattccctcaaaaataaaaggtctattgcgcaccgccctccctatcatgcacgagagcatttgtatgtgtat

SEQ ID NO: 45533 - DNA, 1070 bp, Heterodera glycines
aatgatcacactaaggtgaactgctggtcaatcagccgaaatcagagaggatcagatcagctgatcaaatacctgatcaaccaaaccaaattctgtaagtaatcccgaaaatcataatggatttatggtttcatttgccccgccggtgacctgtcctaattaaaccagaaaatagtacccgtaagcgcctctcattcctgctccgccaccgtacgggaacggaccaccagcgccggcaccgtaaccgccgttaccgtacccagtggcgccatacggtggaacagcgattcccggctgccagtacgtgttcgtcccgtaggacggcccttcgtaggcgctgatgccagccgcatagccaccgctgtacgggctgacatacgcgtagctgggcttcccaccgtagaagctgctggtgcctggcccggttgagtacggtgggtaaaaggaacctgtgccaatcggttcgggtattatattgtaagatcacttcgtacagctcaggaacgtaatcaaccgataattccatccacataacctagcaagccaacaaactaccgtagttggaacggagcgagttggggtacgatggatagtaattggacgagtagtacggtgatgctggcgatgccaatgtacaagacaggaacaagcagcacagagtggagataatggcaacgaaggggggcattgacagtcgatgaggcactaacatggaaatgtttaacattataactcaaaacccatataatggcacggtgccataaagaaaaaccgagaaatgcgccccgtcctacagtaccaagtatctacagtaaagaatacagtaataaaattacataattgccccgggaaagggtggacttattaaacacacacacgcaccatcacttatcgtccgctcattcttcttctgctgctgtttcttaattttgtcactgtgatgacgatactggtacggatcgtaaaaggggttgttgttttggccatcgcactgtcgtcgctgccgctgctgctgcacactgtattccaatattttttgagcaattaaataaatgctacaatttatatca

SEQ ID NO: 45534 - DNA, 994 bp, Heterodera glycines
aacttttcgtaaagaaaattacattgaaaaaaaccaatcctcgagagaaacccatattaatggcattggtgggattttaagatcgggacatttttattttaagattttgatcctccaaataagaacattttggatactagtgccgttcaccccctccccttttgaaaaaagatcccatttagggcttttcggggtcgttgaacccgaatctaacatctatttcacctattttcgaaccccagatacgaattcgaacaaaaagtcgaaattcaaattaatctcaaaattcacatttatacaaaaattttaaaatgttaagaaagcgcacaagaaaaaaaaagatgaaaaacaaattttaaatgtaattaaagatgtcaaaatgaaaaattaaaatgaaatcatttaataaatgcgtaaaattttaaaaataaagtcacgtcctaatcctggtacacaatacaattaaaaagatcaaattattgtaaaaatttcaattttcaactaatctagaagcaaataggcacaataaaacattttttgtttaaatatacttcagatttaaataaagtttaataaaataaaatattattacgtatttattttttatagcatgattaatttatagttaagaaaaagaaactctaatatttgtacatccatagaaaaaatgttttataaataaaaataaataaatctatgtaataaaaattaaagtgaggaaaaatagtgtcaattattaatgatacgctatgagtgttatgataataaaattcatcttcttttctaaaattaatacaacaaaaattaaagtttaataattaaaagttatacatgaacaattacaataatgaaggggagactattaaaaatgcagagcgattaaattttattttatatattacaatattccctttacattcatatgaattatagaataaaaaataattttttaaaatacaattaaactaattatttcaaactataaaactataca

SEQ ID NO: 45535 - DNA, 1294 bp, Heterodera glycines
gctgtttgtgttcgtcgtccttgtcgccgccaccttcgctgcttcgttgtgccgcggtcgtgccgttcggaggcaacaattcggtggatggcgacgcgtacatttgggacaacactgtgttcagcacttcgtcctcgtgcgcaacaccgtaagcaacttcttcgaacagattcctttacaaattggaagagaaattaactctggcaattaatcaaagaaaatgaattgaagaaatattaattagcccaaaagcaaaccgaaatttattaaaaattattagaatttttgaaaatttacccgtctttttaaaaaaatctcacttttttacatttctttctttttcatagattaaagggactggacagaatactcatttctcaccaagcgccctccggctcccccttgccggacagtgcaattgcttgaaagaagcggaaggcatgcgccagctcgggcggcagcaccggacgtgaactcattgtgcaataactctgtgcacaaaaaggcaaacttttacaatttttttaaaaatttgccaccatcagtgcgtcgaagaatttccggtcggccaaaaagcggggcaacgtcaacgatgcctcgggccacagcgcgtaaatggtgccctccaacagctcttcaacgaaacgggcaaagcgtggcattgcggcgcccggcaccgcagcgattgttgtggcggtcgtcgtcgtcttcttcgcccttttctcatcccaacgggacggaggcggacacccactcggctgttcatccatcgaaatgtcgtcgtcatctgtgccaacaaaaataatgtaagtccataggatttatccgagcaaaaagatcgggtacaatgataaatttgccgaaagaattttcaattcaattttttaaatgttcgtttacccggaatttcctcgtccgatccgcgcacaaatgagtcgtcgtcgtcatcctccttctgttggtttagttctgcaccattttgatcgaccgcagcatccttctccatgtcctcttcgtcggaaaattcgccgcaaaagcgtttgaccatggcaggcccaccgtacttcagaaaggcctgggccacgttcaccaattgctgggacggatggtcacggctaaagcagttgtatcattagtagaaaaaatgaaaataaaatatcctggccaaaattcaaaagcaaaaaaacccacggactttgtggttctaaaaaattcgggaacaggacaaaatcacgccgccgaaatcacgccgctagaaattttttaaaaattttttcaaacagaattttttcaa

SEQ ID NO: 45536 - DNA, 1037 bp, Heterodera glycines
agatgttcagcaaacaatcgttctatcatgttggtcaagagttttttctcttttaagaaacattctcggtatcgggacagcacagtttctcttgtttttatgatttttatgcaattcttaaaaatattccattttttttaaatttcataatggcaatggtaaccagtgccccgcccccagcaacaaagttttttttttgcgagaataaaaaacaccaaaaatttcaggtaatcttttttgtgcccagctaatttcaaacgaaagattccccaatgccttttcgctgttccaaaattttttcaaattggctttactaggttattacgaagttttaggtttgttcggaatcttcgaattcctaatataaaatttgtttgtttattttcatttttttgagagtggggtgcgtttaattgcgtccaaaaaaaagaaattaaattttcctataaattaatcaccacctcattactgtagacattacaaaattggtaatattttgtatccagcatggcatgctgtagaataatcagttgaagggcgcaattgactcggcggaatcgtttcaaaagtttttccttcaaatgatcatcattcaaaaagtacaacccgtgccgaataatttcccagcgtgcagagaataccggtaactgaaaattattgggatcagaattacctaaagctccaaaacaatgagattttaaagaaaataacgtatttttaagcagttttgtttagtctttggcaaatatcttggcctttttggggtttttgcaaatatttttggggttttatggcaatatttatgtacatatttggacttttgagcacatatgatcagtttgttccatttttttatatttaattattaaaaattaattaaaactgcgaaaaatttaaattgtgatgatattttttttattggtttaattacagttcaacaaatttttatattgcttcgtaatttaagaagcatccgacactgactgaccttctacatgctagcaaacatttttgcgcccggttgaacatgaacgctg

SEQ ID NO: 45537 - DNA, 1420 bp, Heterodera glycines
  unsure (1)..(1420): unsure at all n locations
tccttttttgaagacagggataattatgaacgttttccatatttcagggattttagatgaatctaaaattattctaaagagttcagttagtatgggtgccaaaggtaatgcgcattcttttaataatatgtaagggatgccatcaggcgatgtcgaatttcttctagggagttttttcaataaattccaaatattatagacatttaattcaatgtctgtgatctgattagggttttcatggctgagtaagtcattgttattttccttgtacaaaaatgacttttgaaagacatcagccaataaaatacatttttgttcattccgaaaaataatttgcccttgttcatcaataagtgttggtattccggtgttagttttaagaagatttctaacaaatttatagagagaatttcttccatttgaaataaatttagcttcattttcacaatataatttgtggatatgttttttgtactccctgcataatattttatatttaattttaagctcacggcactcagcttttccttttagcatgctatgtgttcgggctttttcccttactaaagttttaattttttcatcatgttttttcttatagttgttttaagcaatttcatgggtacatttttatcaaaacgcttttttaattcagtggtaaatatgcagtatttctcatttatgtctgaaactgtaattggaagggaatttggcccattaaaaagaatttcttggttgagtttagtaaaatttttctggcgtaaatctctgataaaaattttttgactatctgtttttggaatagtttgatttatatcaaaccaaacagtattatgatcagaatagaaaaaggggagccaacctttacattataaatgagttccttgggttgactaaaaaccaaatctaaaatattattttcccttgttggttctttaacatgctggaaaagttgattttgtgccgtgaactcaattattgttttgaaagtttatctttttttgttattttgcattcagaccaattaattgaaggacagttaaaatcgccacatataattgaattttttgaatttatttcagaaataaatttcagcgcttttttggtgttgctaattttttagacacatatcatcgaaaaattaaaaaaatgatccatttaaacacaactttttactataaggtcatttctacccttattattttaatttatttacttttttcattcttatcccgttagctgattggatcataatgacattgtgatgcatttttgcttttgcattttgaaaaaaaactattttgcgtttcgcccaattatagactttttcaatagacctgtacggggccaggtcgtttctttttcagttcattctgagtttaaatattttttgactcacaatntttcacactcatttaaa

SEQ ID NO: 45538 - DNA, 1312 bp, Heterodera glycines
  unsure (1)..(1312): unsure at all n locations
tatgcaaaatttagtgcagatttaacatnagggaacaaaagctacacatagaaaagtaaattttgttctttacatcattaagaatgaagagatagtacataaaattgagagaaacaaagataaaaagtaattgtggcagaatgccaattttttccataattattagggctgcaaaaaatatgtacaaaaagtggtccaaatcgcgccaggtgatttcgccagtgagtgatttcgccagtgaattatttctctttttctcgccgtctgtatttgatttcgccagtaagtgaactcgccggtgattgttttccccagataaggcaaaattcaacccatggacaaattttaaccatataaaattaagaattattattattaattttacaaaacattttatcattgatttagttttcttttaaccgaattccatttaattttcatttttatttatcgcatattatcgcacaaatacatggattaactttcttaaatttcttagttcaaattgaatgtatgtttgaatgatctttcttaatttaaaagtgtaagtggtaggcacatgcgcgtaggtattcaagcggatcacgttgatcaaaatcagcgactaaagcttgcaggttgttgtcttgccttatgtattttgccttccgtcgctcatatggagcccttatgccatccgctggagctgcctgaaaatcagcaattctgtccgcccacatattatcctcttcaatcatttttcgaatgaatgagctcaagcgctggttccctttcagatgaacattccagatgaaatgccaagcctaaaccacacttgcaatagaacagagatgccattaaaaatttcaaaagtaccgcactgataaaaaatgcacaaaatatgaatgttttgaaatgtgaattttttaaatttctatgatttagctcctccaaataaacaaaaacttagaaataaatacaaatggcatctctgcaattgccaatcattcacctcaactgagttattggttcttcccaacccttcagcagctcgatcaactacattccagagttcacaggggaacattgcgaatgcttggacagatcgcagagccactcgagtgtcttcattttcacggaagcgtgtgaaaagatgtggcaattgttgaatctgtctgaacaaagcattgccaaaatggaacaaacaaccggttgcagttgtgtttggaaaaatgttgtttgcagccgaaattgcagcacgctcaaaatcactcatcatgcgaagtggatgccagccagcaggcatcgcatcgcgaattgcccgaaagaaacg

SEQ ID NO: 45539 - DNA, 850 bp, Heterodera glycines
  unsure (1)..(850): unsure at all n locations
tttgatttttgttcgagtccgggtgagctttgtcaaaattggtgtaagattcgtgattagctacccccgaaaccccataaaataagttttcgcgaaataaaaagggccctcaccctgtggtttttttcggagtgcccgaacagcaaaaataattcccagggaaagaacggattgaaaaattttttttgtttttgaattagatttgtcgcttatttattctggcataatgttataagttaaacaatttgagcaagaaaatgactgcctgcttctattgctgttgctggagcccgggaatttgagttttgctctgtgcgtttgtcactttttgttactcagattcctattgagggagagcgcaggtccaataccgagggcgagggtcagatttattcctcggcgattcagacgtggagggcgacggaggggagcggaagctgagcgagtgacaggaggtgcgagagagagagggggagagagtgagagagagagagagggtgggaagagagaggaagggcgagagagagagagagagggcgagagagaggaagggcgagagagagagagagagggagagagagaggcagggcgagagagagaggaagggcgagagagagagggagagagagcgagagaagggcgagagagaaagggagagagagagagggagggagggcgagagggagagagagggagggcgagagagggagggagagagagagaaagggagagagagagaggggagggcgaggggcgagagagagaggaagggcgagagagagagggagagagagtgagagagagagaggaagggcgagagagagaggnggagagagtgagagagagagag

SEQ ID NO: 45540 - DNA, 1079 bp, Heterodera glycines
ctaatttaatgaaaatttccgttaagaaaaaatccccggatatagtgctttggctggtggtggccataagtgcgcttcacatcacagcccaattggtcggcggagttttggccaacagtttgtcaataatcgctgactcagggcacattctcaccgacttggtctcctttctcatctccatcttcatgattcgcatttcggttgctaactgtaattatccctcttttgcccatttatttttttttccaaatttagctaatcgtcgtttcacttttggctatttacgggccgaatttattggcgctttggcgagcatttttatcatttggacaattacgattctcatggtaaactatttggaatgtgtttttttttgtcggtatcttttgtgattctgacattttgcagatcgttttcgcgactcaacggataatcagtggccaaatgaccgtcgacactcgaattatgctcatcaccgcgttggttggcattgtgttcaacttcgttatggtcctttttttaaaatggtcgaccggtggcgctcatttttcgcacggacactcccatttcactaataggtgaaatcttttgtttattttaaatttatttttaaaaaaaagttccgtaaatgatgctgagaatggcccaacggaaaatgtgaatgttcgtgccgcctttatccacgttttgggcgatttcatccaaagcatcggcgtgctcagcgcggctttgctcatccgatggacggactttcaattggccgaccccctctgcacgtacttcttctctctggtggtgctctgcacgagtgttcccatcgcgcgggacatttttcttgtcttaatggaaagtacttcgcattcggttaacattttgtatagaaccaaaaaatttgtcttggaatttaaaaattattgatcggacgccataatatatggatataaaaatggattggtggaatgtaaataatttaagggaatggaacgtaatgttgacattcatttcatttttcccgtcatttaggcactccgtcctttttggattttgacgccgttcgtagcgatttgaacggcatttct

SEQ ID NO: 45541 - DNA, 1195 bp, Heterodera glycines
  unsure (1)..(1195): unsure at all n locations
cagagcacgttctaaaaaaatatttatgaattaattttgcaaaataataaataattaatgaaaaagtcagaatttcgaaaaattttaaaaacaacaagcgttggcattttttcaggttaagttagtcctttacaatggagaaggcctgcaaaatttgaagagattatatcgattttagtgcgctaggttcgatgaaactttttaaaatataagcctaaactttttggcctgtttaaaaaggaattaaaaatttttaaaatatttattcatctcccttttgatagaaaaagcatcagagagccttatttaacttttaattaacatttggtgcgtttcagagcactttctgaaaaaatacttatgaattaattttgcaaaaaataaataagtaatgaaaaagtcagaattttgaaaaattttaaaaacaacaagcgttggcattttttcaggttaagttagtcctttacaatggagaaggcctgcaaaatttggagagattatatcgattttagtgcgctaggttcgatgaaactttttaaaatataagcctaaactttttggcctgtttaaaaaggaattaaaaatttttaaaaattttattcatctcccttttgatagaaaaagcatcagagagccttatttaacttttaattaacatttggtgcgtttcagagcagtttctgaaaaaatatttatgaattgattttgctaaaaaaataaaatagtgaagctttaaaaattaataaaaaattttaaattcagaattactggagttagcatcatagcagtgcttttccttgtctttttgatgctctcgcaaaatctggttcgcttctgaccagtttataaaaaaaaagttaagcctaaaatttttcgcatatttaaaaagcaattaaaaatttttagattttttattcatctccctttttgatagtgaaagcatctgagtgcctaaaataacttgcaaataaaattntggggggggtcagactttatttgtgaaaaaaatatttatgaattaattatggaaaaaataaataaataatgaagtgtactttttaataattttcctgtaacgaaggtactcactcggccgcttcgcggcctcgtggtgggccttctgttgaaggatgtagaaaaattagatagccacttttctgacaagactattctatatgcatggagccattttccg

SEQ ID NO: 45542 - DNA, 966 bp, Heterodera glycines
ttcggcagaatgggcaattttcaagtacataattaaattcaagcacgcttgaattgttaagcatgttgccctatttttcaagtatttacttgccattaatatatgaaatgattttccatggaaaaacgtaggtttcagccccgaccccgagccccactaacccgaaaatattatttattaaaaaacggattgttttgtcttaaatctttaatttagcgaaattttttttatacaattcaaatattttgtattcacatttatttaaaaaaattttgcattttttttgccatttttaaaaaattttgtatcattgccattaaatacggtgtctttttttgtgccattgtacgaaacgacattagtttcggcatttgtaatgacacgggactccgtttcagcactttgagtagttgtcgcctcagatgactaataagggaaatttaattatgccgccgtaaagaagctaaattatataattaaattttgtgcattttattcaaatttaatttccctaataaaattattacataatatttttatactcttttatcagttgggctttgcccgactgggctcaaatgttgggatagggaatatttctattttttcaaaaatggcaccccaaaaacagtgaattccgtgccggtccatgcaactttaaaaatggattatataatgccaaaaataaaccacaaatctcatttgtagggatgtcaattttatataaaatattcggggttttatacatattttacatatttctaagttttatacatattttggacttttttctacatttttcatttttttttttacatattttgaggattttttatggaaatttttggaaatcctcaaaaaaatccaaattttctacaaatttttcgtatacattttcatttttttaaatattttgagaacttttttttaaatttataaaaatttctgatgaaaaaataactaaat

SEQ ID NO: 45543 - DNA, 1313 bp, Heterodera glycines
  unsure (1)..(1313): unsure at all n locations
caatatcgcatcatgcgttgtggtcatccgcatcgcatgttgtggcgactccccacctcctccccaatttcgcatcatgcgttgtgggcatccgcatcgcatgttgtgtccaaataataccgactcaaactagcaatgttcaatgtacaaccccgtttttcttaattatttggcgaaaaaaggtggccatgatgatcatgacgattatggcggcggtgatggtaataatgatgatgatgatgacgatgatgatgaggacggaacccaaaggggcaacagaaaagaaacagaaggcgcgagggtggaggaagggaggacggaagcggccagagcagatggagaggaggagagacctgagaggacggaagcggccagagcagatggagaggaggagagacctgagaggacggaaggcgcgagggtggaggaaaggaggacggaagttgtgagaacggatgaaggggaggtggtagttcagagaatggaatgtgtgggggtggatgaagggaggatgggaagcgcncagagtggacgaagggatggttagtgctgagaggatggaagcgcaagaattgggaaattnggcgataattgaggagagcaatgaagaaaatgaagaagaggaagcagacgaaggaaacaagaatcgtgtgggatgtaaaaagcgagatgataatgatcgaagaggaccgaggggaggaggggcgggagcaggaggatctgggagcggagctagagggggagaaggattgggaggaggaacaaacgggggagggagagcagaaagaagagatgcgggaacgggagcgggaatttacgaaagaggcaaagaaggaagaaaaactgcaaataatgatgtcataattgatgagcagcgttgcagaacagttgaaaatgatgatgatgaggaagatggttgtgccgaagttgaccttccggaattggagtttgaaaaaaaggtgaacgagacggattgttgtgcagtcggacttctgattgccgatctggaaggatcggctttcggacttatgattgccgatctggaaggaacggctttcggacttctcgatcaaaagtcagaatggtatttgatctgaattattcatcttatgctgttcaaggcttctgcgaaaacattaaaacgaagactacaaagaaaaagaagaaatgcaaatgaaagaaccgatgagcataaaacaaaaaaaagatcaaacgaaaagcacagagaatgaacaacccaaatgttcatcatatatgttcgtaaaaatttgtcctaaatttatcaacaaaaagaaatggtgaaaataaattat

SEQ ID NO: 45544 - DNA, 1223 bp, Heterodera glycines
  unsure (1)..(1223): unsure at all n locations
atcagggcgatcggtgatgacggaggatccgatcaaaacggagaaggatgccctgaaaatatgtaccacgagaggacagaagcaaaagacggacgaggaggggagggagagagaagaggacggaaaaggnagagagaggaggaggggaagagagagagggaagagccgattttgggaagacagcgaaagtaaacggaaaagaaacgaccgacggaagaaagcgaaggacagaaggccaaactcattttcggctggcaaatggaatgggtgttctgctgctgctgttgtcctcttctgtcgctgctttttcttattatttttccccttttttaatttaatttttattttccaaataaaaaatatttaaaatgcgaaaaacaaataggcaaatttgggctgaatcagtttgagatcactcgtacatacaataaaatttaaattaaaactcgcgaattgatgacggtggtctgagaagttgtgagcacgcagaaagtttgggacggtgaatggccggcggcggatgcgaatcgcggatcatccaccgatagattggggttgatctgcaggagcaagcgatttgtcattagatatttattttgggatttccttattttcttcctttcctcttaattttcttcatctctttctcgcccctttcactctttctacactttccttccttctctctaatcactcccttctctctctttctctctgataactttcctctctctctctctctctctctcagtctcagatcatttcccctcttctctctctctctctttctctctaattgcttctctcttttttctctctgattactttcatttcttcttcttctgatcactcccttctctcagatcacctaccctctcctttctctccatttggattattatttgtctctctgtcactttcttttcctctcctcttttttctctcttttcccctcttctctctcttttcttctctctctctctctctgctcttctctctctctctctctgatcactttctttcccatctctaattattatattccaactcgcctccttcttctcatttcgctcatttgtactgctgttccccctttgttcccgattccttccgatgcgaaatttggcaccatttgaatgggctgatgatgggcagaagtaatgcatctgttggaggaagaaaagtacgttgtaatggcggtggatgaaaagggaccgtttaaa

SEQ ID NO: 45545 - DNA, 1070 bp, Heterodera glycines
ggaagaaccgaccgaggacgactttgaatggatgaagcaaatcatcggcgaattcgtcgaggaaaccgactcgaaaattggcacgcgcattttaaacctttggcagatggaaaagaccaaattcattaaggttgggtttgacgatttacaaattggacaatctaattttgctgttcccagattttcccgaaggactacaaaaaggcattagcccaaatggcgatagaggcagaagcggagagaaaagcgcgggaagagaaggaaaacttggacagagaggagcagcggttgaaagtggccaacaacacattgcaagtgagtggagcagcgcggaaacgcacgtccattctataaggggcacgtattccatgatacgttcccaattgacatgttgaaattaaaaaaacatgacaacattttcatgaacgtaagtttggccattaaatccgcccctcctctttttcactcacacttttctttctcttcgctttttccttttccattgatgaaaagccctttctttccgtttttctttatttccttttcctttcactttgttttgtggtggttgtcttccttcacaatgtgttgtaaatcgttgcagaatgtcagcgaagagtttctggaactgttgactttgaagcggacaaaccgtgcctattccatggacatgcaaatttcgctgcaggacgaacgaattcagaagcaagtgcggaagcaccaggagaagcgacgtcgaagtgtatgtgcacggaatttggtggttggcccctcccaaagagttttttggtggtcgttctttctcttttacactttcatttcctttcacacttgcacttaatttttaaaagctgaaaatttaaaaaatcgctttttgtttcagattatccatcaacgacgacgcaaattctccaagggacttcgcgacgtcgattttgttggcttcgaggccactgaggacattcaggacatgcatgcggagaaggaggacgaggagatggagcagttgtcagacttggactcaggggacgacccatctggtcaaacataattagtatagaccaatggca

SEQ ID NO: 45546 - DNA, 1232 bp, Heterodera glycines
gctcccaaaaatgagcccatcagcggacagcaaaatgacgccacaacaacagcagcaacagcagccaaaacatgccgagaggacggaggaggaggcggccatcaacatcggtctgagcaccgcggtggtggaggtccatgaacaggtggccggggaggcacagttgttgttgaagctggggagagaaatgccggaaacaacggtggaaggagttcaatgtgccggaaattccatccattttgcagggatatctccggtttttttgaaaatgcaggacgaagtggttctaatgcccggaatttcgtctattttacaaggggtatccctgttttttttttttttggaaaatgcttgcaaaaattgtttcaattcccgaaatttcgtccattttacggtctcggccctatttatatgaaaaaatctcttttcaaatgcaatttcggtcccatattgaatgagtgtgggcctcttttgtggacaacagacgactcgactaatagaaaactgcaaactcaccttggcaaaccaattttccgccctattttacggggaaaatcccccaattttttttaaatttgccccccccccctattcagttggcctcccagatggatttttgcaacaatttgttgggccaattcgcctcagttcggcacatttcgtcgacgccttacgccgttcacgtgccgttggtgaacagtttggcgttgcgtcgtcgccacccgaattggaccatccggctcaaggtttatctgtctaaaaaatctccttggattcgttttttgcactcgaaccaaaaaaaaaaaaatttcgttttttgcactcgaaccaaaaaaaaaaattttttttttttgtattaggctgtcagtttttcaatttatgttttttttaaataaatttttttaacttgcatgtccggctccattcttcgctcagtgaatgcgttgagaatttgcgccagttcagtgcccaccgtttgccgacattggcacgccaatttgaccgcgcccaatcgtcgacaaaggacggtaagggaagaaaattttcgaaagacacattatgccgaaatgataaaatatacccgaaaaaagggggaaaaaaatttgtccgcactctaaacaggaacatttttttcaagatttccaaaagtttttaattaatgcaccaagacaaatgccccaaaacaatccagagatgtggcgccacattttaaaatctcgaagcaaaccgag

SEQ ID NO: 45547 - DNA, 752 bp, Heterodera glycines
atttaaatgtgatttttaaaaaatcatcctttaatttttccttttaaaattcttcactctctctcttcaaaattcctcattctcttcaaaatccctcattctttttcgccgctgctcatttggcctccactccctgcaaaaaagagattacgatggaatgcattttatgcacacaatccccccccttcccataccacttcggcgcccgcttcttcggtgcgacgcccggcgggagggtccgtcgagacctgggcaaaggaaaaagaaacaaaatatttccttcccatcctcccccccccctctctacctcctccacaccgacgcgctcaacgcgcagcccgaagcgctggggcgactctcgcccgtgcgacgcttcaaaaaaaagaaaaatgttaaaaataggggggggggggcaggaaaggaaaaggcaaacattacctcgcgcaccacgctgaacacctggagagggcgaggtgcattgtcctcattgactccatccgggcgacgaggtcggcgacgacgaacgaatgccggctccacgggccggcatgttcaaaaacatggcccaaaaaatacagaccttaacaccataattattaatttaaaaaaataaaaaattattaattgaaaattgaaattaatccacctgggcgaggaagatgaaaaagatgaacaccatgctgttcacgcatccccgtcgccttggcaatgttggcgttgttcaactgctccaccacgtcggtgagggtgat

SEQ ID NO: 45548 - DNA, 1093 bp, Heterodera glycines
attctgaatctacattttttctgggctccaataatcacctagcgcttcctgaaagtgtttgtcatcgttcatctttgtttggttcttcttcctctattcccgcattttttatttgtggcacacaaactctggcaaaaacaaaggagttgatggccccaaaaattcagtatttaatcacataaatctttcttcccaatcactgcaatatgtttatttctaaatttatgtacctcttctattattaccattaaaattctgaatctacaatttttctgggctccaataaccaaccaccgggcgcctcctgaaactgtttttcatcgttcatctttgtttggttcttcttcctctattcccgcattttttatttgtggcacacaaactctggcaaaaacaaaggagttgatggccccataaattcagtatttaatcacttaaatctttcttcccaatcactgcaatatgcttatttctagatttatgtacctcttctattattaccattaaaattctgaatctacaatttttctgggctccaataatcacctagcgcttcctgaaagtgtttttcatcgttcatctttgtttggttcttcttcctctattcccgcattttttatttgtggcacacaaactctggcaaaaacaaaggagttgatggccccaaaaattcagtaattaatcacttaaatctttcttcccaatcactgcaatatgcttatttctagatttatgtacctcttctattattaccattaaaattctgaatctacaatttttctgggctccaataatcacctagcgcttcctgaaagtgtttttcatcgttcatctttgtttggttcttcttcctctattcccgcattttttatttgtggcacacaaactctggcaaaaacaaaggagttgatggccccaaaaattcagtatttaatcacttaaatctttcttcccaatcactgcaatatgctgatttctagatttatgtacctcttctattattaccattaaaattctgaatctacaatttttctgggctccataatcaacaaccgcttcctgaaagagattgtcttccatcatctttgtttgg

SEQ ID NO: 45549 - DNA, 672 bp, Heterodera glycines
  unsure (1)..(672): unsure at all n locations
tcaatttgtgaataatggtccaacagctgctgatggtgagttgcgcttcaacaatttttttgtgtgactcagataattttagctaaaataaattaaataaaaatgataatttgaacattttttacctcaacatgagaatctgtgctccgccagctgttgtcaaaattggaatacaagaaataaaagaaagtaaaaaataatttactaacagaacattttgagtatattcttgaatatccttaataaacaatatgaagtaattgatgaaacggttgcaattatacatccgatcaaaatgatggcgacatgaaactgatcgttacattcagcggattgaataaatcagggtcctaattaggtgaattaatccatttttaacttcagaaatcaaggattttatttttttattttaataataataataataattagggatgcaatttttagatttttacctactgatcctaaaatttttaaaaatatacccctaataaattacaaattgctcaaaaattttttttgacgaaaatttttgattttaaaattatctcaatatcgatttattttaaacccctaaatttgaaagtttttagcaactattttcccattcttagcacctattttggggggtttttttaaaacctanaactaacntattttggcagtttttag

SEQ ID NO: 45550 - DNA, 1097 bp, Heterodera glycines
  unsure (1)..(1097): unsure at all n locations
cttatgtatcaaaatactctntagctaattatcatacctttcattanccataaatgatttatttattcattaaagatcagtcggacctgatcagctgctacaaatatntaatgagtgctggtcagccaatttcaaaaagtgatcaaaaattgctgatagtgaatgcgacatattacaaaatgaaagcactgataaacggagcattatcaaccacaaagcaaataaaaagtggaggacgcaaacacaacaacaaattgagacgaatggcaaatgatattgaaatgacagcacaaaaagcccatctgttggaaaaccccaaaaattttgatgagaaattggtgaaaatttgctatttatgcagtttttggacgcatgtcatatcaaatcgcaacttgtacaaagaaagcgaaatttggcgaacatttttagcttatcgctttggtggagaagtaattttaaatttgaaaataaatatttgcatttttattgcatgtagtggcacttttttaatttgtttatttgttgttaatcaaaagggactccattttaggcacaaaaaatcgcgaaataggcacctaaaaaggcagaaaaaaatcttaaaatagggattaaataggcacaaaaatcctcgaataggcatttttaaagaaaatttttatcaagaaaaaataccaaatttagaagattaatttttggaaaatttaaaaaattcttattggtgttttctgatgtttttttcaagtcatttcttagaggggttttttcgaaaatcccgaaaataggtgccaaaatggcgaaataggcacaaaaataggcacttaagcattaagcacaanaaaatccaaatagtaggcataataaatttgatctanatnncatccagcggaaaatcgtttttttttgtagaaatttagacatttgcataaattgagtccactattaaatcattactatattaggaaatgccaccttttgcacaagtcccatggaggagaagacataatgggacaatccattgtgagaaagtgaaaagttctgaagtttgcagcattgctgaagtcaccacatcggnaacacgcacgaattgtgctgcatga

SEQ ID NO: 45551 - DNA, 656 bp, Heterodera glycines
  unsure (1)..(656): unsure at all n locations
taatgtataaattagaccggtctgaacgtacttggatttatgttttgtgctatttcccccattttcctcttctgtcggcacttttctctcaagaattttggcttgaaaattggaatccttcctgtttttgaagtcacacaccaaaaatttaaaaaaacaaaaatgcacgaaaaatcacacaacttctttcgcaggctgacccatttgatgagatttttaagtagcgaaaattgacgcatttttctcttacagaaaatttaataaaacttttctttattgaaattgtttctgaaaatgactcttatccctcgtcagtggatctgccgaggcgaagggaaccgcccggttcgccgcggccacttcgccgcgggtttttcgccgcggggttttttcgccgccggctttttcgtcgcggactttttcgccgcggccagttcgccgcccgaagaaaaatgtccatttcgccgtcataattaaaaatctcgaaaaattttgaaattatgttaaacaacccactatgtataaaaaatcatgctttattaaaatcctttttcataaaaaattaacaacctcaaatgaacaaaatcaaattacgggtccataacacaattatttgaaattccccggagaaattcacaatattttgngcatcaaaa

SEQ ID NO: 45552 - DNA, 919 bp, Heterodera glycines
  unsure (1)..(919): unsure at all n locations
tcgtgtggtgcgtcactgccttcatcgcctcttgggccaccaaaccgccgatgagcgaagcgatgggttggagatttccacacgccttaaagacggggaggaattcgaagttgaaagtggcacaagggacctggtaagagaagttgaagagcagtgagtccggcatttcgggcgcatcttttggcagcatttcctttaacaattttgcgtcggcatcggaacggggcaaagggctgtagtttttctgaaaggaaaacccaaccaaatggaaagtcgcaagatgacgaaccatctcctcaaaactgtacaaagcctgccaaagggcgtgaagttgcgcaggttcgtcgaacttggcaaagtcccaaatcataaagtcgggctcggcgagtgcgcgagacaatggcttgaaggacattttcttgggcactttgacttgctgaacacgtccacgcgaaacggggccttgaactgcgccagaaaaggccgcgagagcatttccaatgttgaagactttgcctaaaaatgggaggactgtagatgaaccaacaaatgatcagtggtggcactcacttcccttcaaagtgactggcactggtggaagttcgttcagttcggcgtgctcaaagtcggtgaacacaacgtggtccccgtcctccaactggtgaaatgcgccttcgagtgtcgtcatgtcgccgctttcgcagtcgatgtactcaacgagcacctgaaaatcggaaccattcaattcgcaattaaattaattattccaattttcacctctttgcacgtctccccgtcggaatcgttcacaacgaattcgtcgcccaagtccacaaatgcataaganaaaagtccgcgcgcgtctgccgagatgacattttgcgatggttgcgcatccaccgttcacttccgtctgagt

SEQ ID NO: 45553 - DNA, 958 bp, Heterodera glycines
  unsure (1)..(958): unsure at all n locations
ttgctgtgccgagaaccggcaggcaatggatggctttcaatctgcaagaaattagattggcaatatgtggttgtaaaaaacttttgggtatggaattattttttgaagtgagtcaaacaccctattagtgctttgctcgtgccgagaaccggcaggcaatggatagctttaaatctgcaagaaattagattggcaataagtggttgtaaaaaacttgtgtaaggaattattttttgaagtgaatcaaacaccctattagtgctttgctgtgccgagaaccggcaggcaatggatggctttcaatctgcaagaaattagattggcaatatgtggttgtaaaaaacttttgggtatggaattattttttgaagtgagtcaaacaccctattagtgctttgctgtgccgagaaccggcaggcaatggatggctatcaatctgcaagaaattagattggcaatatgtggttgtaaaaaacttttgggtatggaattattttttgaagtaagtcaaacaccctattagtgctttgctgtgccgagaaccggcaggcaatggatggctttcaatctgcaagaaattagattggcaatatgtggttgtaaaaaaatttgggtatggaattattttttgaagtgagtcaaacaccctattagtgctttgctgtgccgagaaccggcaggcaatggatggctttaaaactgcaagaaattaaattggcaatatgtggttgtaaaaaacttgtgtaaggaattattttttgaagtgaatcaaacaccctattagtgctttgctgtgccgagaaccggcaggcaatggatggctttcaatctgcaagaaattagattggcaatatgtggttgtaaaaaacttttgcgtatggaattattttttgaagtgagtcaacaccctattagtgctttgctgtgccgagaaccggcanggcatggatggctttca

SEQ ID NO: 45554 - DNA, 925 bp, Heterodera glycines
  unsure (1)..(925): unsure at all n locations
tctttgactttgcttttttgtccatttattccaatcgcctagtgctttaaggtttgtctttgactttgcttttttgtccatttattccaatcgcctattgctttaaggttttgtctttgactttgcttttttgtccatttattccaatcgaccacgttaattcattctctatacatttagtgtcttatttcatgaaattatatataatttaattttaaataaagaggcaaatttttacagaaaataaatagacgctgactaattagctaacatttataaagaaagtagaaatttgattaaatgcatatacaaaatattacttttttaaaatttgtataaagttccttgtatacgacttgactactggtcagggggttgttagcagtagagcagcttttacactgcgatctgttgagacttagcccttgatcggatgatttgtcttctttttccccctttactttttgtgccaacaacattttaggtacaagtacatgagaaggaaggctctcttaagggagtcaaatgcctcgttgccaccatgaaattaggtaggataagttcttgactttgcttttttgtccatttattccaatcgcctattgctttaaggttttgtctttgactttgcttttttgtccatttattccaatcgcctattgctttaaggttttgtctttgactttgcttttttgtccatttattccaatcgaccacgttaattcattctctatacatttagtgtcttatttcatgaaattatatataatttaattttanataaagaggcaaatttttacagaaaataaatagacgctgactaattagctaacatttataaagaaagtagaaatttgattaaatgcatatacaaaatattacttttttaaaatttgtataaagttcctagtcgtatgtgctttgc

SEQ ID NO: 45555 - DNA, 1470 bp, Heterodera glycines
  unsure (1)..(1470): unsure at all n locations
gacgtacgtacgtatgaatggcaaaaataaaaaagggggcagggtcgattcacccctctctttgcntaaaatggggtactcattcgtagcgagggcaatatatgataatttngacgttntaataaccaaaaattaataaaaattccgaaattacctcccaaaatctttttgtacattgacgttttttctttagattgttggcactcatttctcatatgaaaaccattaaccgaaacagcagtgttgaagtcaccgtggacgtgctcaatgccctcagcgagttgtctttaattgggggacaggaaattgtgcgcaatgttggcaaattgtttcctccattgatcgcattcatccaggactccaccagcctggacagacgcgaagtgagtgggtagccatatttattatggactattgcatttaattttatttgtacattgactctaataaacctataattcgtcgtgacaatttcaaaattgcttttaggccgcacttcgcgcaatggccggtgtttgtcaaagtaccggctatgtggtcgagccgtacaaagattacccggaactgctggacgcactgttgaagttgtttaagacggaactgtccagctcaatgcgtcgtcttacaatgaaagtgctcggtgtgattgggtgggttttatcaattaaagaaaattgtaacaaaaaccaaaaaaaatttttcagggcttttgatccgtacacacacaaagtttaccttggaaaagttcattcgcacagcaagtcaaggtcgttggcacttaccctgccaaattctggcgaaactgcggaacactgtaaacattttttcacttaacaaaattattgcatacattggtgtacaacagggatgggccgaggtttcgcatttcgcctttcgcattttttggcgtttcgcatttcgctttttggcgcgaaacgcgacttttacacccctaagaattggattaaattcccataaaatttttcaaaattttacctataaattggctaattttcagtgaaaacctgtttataaatgatcaaaatttccaatttttttccccggcggcgcctatcggcaccgccgcgcccccaaaactcctattttttcttagaaaatggcccaaaatcgcaaaatttggtaatttgatgaaaaactgttctcagcggcgccccaaaactcttatttctcattagaaaaatgataaaaatcacaaaatttgatcattttttagtgataatctgtcaacaaattttaatcaaattttcaaaaattttcccggcgccgcctgccccctcttcccaaaaagtttttttggaaaaagcgcgcctcaaaaaagcgttttattgatttttaaatttggaataaaattttaaaaaatgatttttgctttatgattttaactattaaaaagttgtagaaaaaatttaggtttcgctttcgcatttcgcattttcgcatattttagct

SEQ ID NO: 45556 - DNA, 1015 bp, Heterodera glycines
caaaccggttcagaattcaataaaaataaccttcctcgggcggaaaaatggggttggaaaagtttcttggggaaaaaaagactttacaaaataatacccctgggagaagggagtgggaaacatgatttcaaaattttcaaatttttctagtttaatctactcaaaacggttcagaattcaataaaaataacattcacggtgcgaaaaatggggtttgacaagtttattggggaaaaaaagactttacaaaataatacccctgggagaagggagtgggaaacatgatttcaaaattttcaattttttctagtctaatctactcaacccggttcagaattcaataaaaataacattcacggtgcgaaaaaaggggtttgaaaagtttattttgaaaaaaagactttacaaaataatacccctgggagaagggagtgggaaacatgatttcaaaattttcaattttttatagtctaatctactcaaaccggttcagaattcaataaaaataacattcacggtgcgaaaaatggggtttgaaaagtttattggggaaaaaaagactttacaaaataatacccctgggagaagggagtgggaaacatgatttcaaaatttttgttgaaatatttgtcgtgctctgaagggcgtgggaggggggggggcgaaggcccaccacgaggccgcgaagaggccgagtgagtaccttcggtgcaggaaaattattaaattttaaaaattttttaattgctttttaaatatgccaaaaaatgtaggcttaacttttttagtgaaaattcgatcactcatattttttgctaattgagcagaagcgtaccaaactttgcagggatactccccggtaaaggactaacttacactgaaatgagcgccgagctagctggctcaaaaaaattttcgaaaatctgagtctttcgtttttatttgttttttgcataattaattcataaatatttttttcacaaaaggctctgaaacgcaccaaattttatttaca

SEQ ID NO: 45557 - DNA, 975 bp, Heterodera glycines
ttcaatgcgatttgttaacagattttgtccacaacaatggccaaattttgcgattttgagcaaatttttgcttgtaaattaaggatttttacggtccggcggtgccgataggcgccaccgggggaaaaattaagaattttgaccatatttttagcatattttcattaaaaaattctttattttgcgatttttctcaaaaaaccacaaaaagcctcaaagcctcattttgaaaatttagcctcattgacccatcaaaaaaccacaaaatgaggctaaagcctcagatctggctaccctgactaaaatgatcacggcactattcacgattgacggcttttttagttcacggtgcatttttacaaatcatctgtaaacaaaaaattcagctttccccggccgcggcgccgaccgacgtaccgttagccctccataagtcagtcgcttgagccaacattttcgagtttagtgtcgggttttaatttcttatgtacaaggtttctaaataataatttgtcattttcttaatatatatttatttgattgtgttatttgaaatgattttaaaaagttttgctgaagtttttaaatttaatttctattttgtctttttgcttatttgagaataaaaaaaacagagaaaatcaaatatttggacgaagtcaattgtctgctcaattccaaaaataactaacacagtaagtaaaaaaaaaattcataaattttaaaataaaagtcgcttcagatagaaagattcatttttgtgcgaatgccatccgaggcgaggaaactcagtcctaatgaatgtgctgtgcttcttgcaatttaaattttaattttaatcatttatttggatttgttcatttgttcgccaattttctctcaattctgactaacagcagaataaaaaaattttttgccagaagcgtttcagaaaaatacttttttacttttatttttattttttcagcatttttt

SEQ ID NO: 45558 - DNA, 1581 bp, Heterodera glycines
cccaatttgatttagcgatgcctaaaagcacaattttcatttaaaaaaaggcggggggggggcatttgtttaaaatagtgaaaaatcaggacagaacacatataccgatttatttatatttttcgcattatctacggatactgtgtcaattgtctttcaaaaattgtccattaatatcacatttaatgataattgacaattcattcattatttacttactattttggcctttacttttagacctttttgcaagtgtttttgatttctttgatcaacactttgactgcttccatttgcttgtacatgcaattccatgaagtccatcaatggatgatcactctcgccgaatttgcttggtcaatcaaattttaagcatttaaaaacaaatatttccaaatgttttcaggttccacgtgcatggtttgtaaaatatgtgtaattaaattgtgcttgatttttctaaattaaaatattgttttatttcaaaatttcagtgtctaattaataaggataaatgtttttcataaggttttccccctgtcatttatttgacactgaataaaaccgtgcgcgaggactgccgtgtactgttcatgaaggtgttcaagcgggaccgtatcagttacgttggtgggattacggtagtccgaccgaagacaacgaatctggtgacttctgctgcttcgtagaaaaatgaggaactgaagcaacaaattggcaaaaatgggaaaatgaacaaatcaaattgtagaacttttcatgtggtttattcatagataaaaattcaaatggttgatggatttaaatagttaaatttcaaatattaaaaaccaaaatcattttttaatagtaatattaattacccaaaaataaaaaaatgtaaaatcattaaaaagattatttattctatttctttcacttaatcaattccaactcggccccattcaacaagcggatataccgttaatttttatttggcaatgacaaaggaaaactaaaaaggacaatatgtttgtttactgttttctgtgaaatttctcaaaaaatttcaacaagatacaaaaaaaaatctgtcgctaaaatggacagaaaaatattatttttgagtatgtttctatatgcatattatatacatcagcgcaaaatttgataaatgccacgtttttcaaattataaaattaaatttattgctattggcaaaatattttatttaaattaaatgcttgcaaacaaataatgctgaatttgctagcaaaaagattgttttaagaaagaagagtcatcgaattagtttttcaattaaaaaaaaaataataattaaagagaagaaaaaatttatgaggtgtcgccgtcggcggcgacagacaaaaaccgggggaggtggcgggaatggcagaaacggcaaactgaccggtttgctgcgacgggctgagaggttggaaccaggggtgggcgaaacttcgagcttcgaaaacttcgcgttttttgggcttcgaacttcgagcttcgtgaaaatgctcgaaacttcgagaaaaatacacccctaaagattgagttttcaaagtgaaaatacgcccttaa

SEQ ID NO: 45559 - DNA, 950 bp, Heterodera glycines
  unsure (1)..(950): unsure at all n locations
aaatttccgaattctggaataacttttttcttttttgtgataaaaaactcaaataaatcccataaaattttccttatttttctctatttttaaggctttattatagttaaatcgatgaaaccatcaccgagttatgaattttcaaattttaatccaaatttccaaggaccaaaaaaatttaaaaaattttcgaattttaaaaaattccaaaaattatgaaacttaaaatagacatcataatcgtactcagcaccccaaaataccccagaataaaatttttcaccacccttttcaagcctaaaaaaattttcgaaaatttctagggggcctagctcgaaaatttttgaaattttccgggcatatagcacaccgttcgatagagcttaaaattctctacaaaaatgttctaagacgatttttgactaaaatcaacccctgatgagttatgggcccgggactcaaatgtcccactgaggccaaaaattttttctatttccgggaaaaaatcgaaatttttcagaaaaaaataccagtcgatagagctcgaaaaactatgttttggaagtggtctccgttttgccaggaaaattcgttaaaaaatcctaaaattcaaaaacccgaaaaccgttttttaggcctagctcgaaaaattttgaaaattttcgaaatttttaaatttcagaaaatcgagcttctaaaactctacaataaatctgctgggcacctttccctcagatcaaaccccgacgcggtattcgcctggtactgaagtgtactttttgagcacgcttcagttgccattttctgcaggccagggggtggatctattaaaaaaataaaaaataccagcatgtagaggacactnttggcggggtgccctcgcagcgggcattttttgattcgagttttagaaaaaaagtatggggcttcaacgcaagcaaaagtgagaa

SEQ ID NO: 45560 - DNA, 920 bp, Heterodera glycines
aaaggtcggtttgaaaattgctgtctcagaagaatagatattctcagaaaaatggctatctctttttttctacaccgttgtacatgtgggttttccccaaaaacgcattactatctgcggttgagccctacaaaaggtcggtttgaaaattgctgtctcagaagaatagatattctcagaaaaatggctatctctttttttctacaccgttgtacatgtggggtttccccaaaaacgcattactatctgcggttgagccctacaaaaggtcgggttgaaaattgctttctcagaagaatagatattctcagaaaatggctatctctttttttctacaccgttgtacatgtggggtttccccaaaaacgcattactatctgcggttgagccctacaaaaggtcggtttgaaaattgctgtctcagaagaatagatattctcagaaaaatggctatctcttttttctacaccgttgtacatgtggggtttccccaaaaacgcattactatctgcggttgagccctacaaaatgtcgggttgaaaattgctttctcagaagaatagatattctcagaaaaatggctatctctttttttctacaccgttgtacatgtgggttttccccaaaaacgcattactatctgcggttgagccctacaaaaggtcggtttgaaaattgctgtctcagaagaatagatattctcagaaaaatggctatctctttttttctacaccgttgtacatgtggggtttccccaaaaacgcattactatctgcggttgagccctacaaaatgtcgggttgaaaattgctgtctcagaagaatagatattctcagaaaatggctatctctttttttctacaccgttgtacatgtggggtttccccaaaaacgcattactatctgcggttgagccctac

SEQ ID NO: 45561 - DNA, 959 bp, Heterodera glycines
  unsure (1)..(959): unsure at all n locations
cccagcatgggcagaggggcgcggagagcaatggccattctattctacagggaatttttaaatttattctctatgccagaaaaatggctatctcttttttgcgagaaattttgtaccatacaaatgttcccagcatgggcagaggggcgcggagagcaatggccattctattctacagggaatttttaaatttattctctatgccagaaaaatggctatctcttttttgcgagaaattttgtaccatacaaatgttcccagcatgggcagaggggcgcggagagcaatggccattctattctacagggaatttttaaatttattctctatgccagaaaaatggctatctcttttttgcgagaaattttgtaccatacaaatgttcccagcatgggcagaggggcgcggagagcaatggccattctattctacagggaatttttaaatttattctctatgccagaaaaatggctatctcttttttgcgagaaattttgtaccatacaaatgttcccagcatgggcagaggggcgcggagagcaatggccattctattctacagggaatttttaaatttatttctctatgccagaaaaatggctatctcttttttgcgagaaatttcgtaccatacaaatgttcccagcatgggcagaggggcgcggagagcaatgggccattctattctacagggaatttttaaatttattctctatggcagaaaaatggctattctctttttttgcgagaaattttgtaccatacaaatggtcccagcatgggcagaggggcgcggagagcaatggccattctattctacagggaatttttagatttattctctatgccagaaaaatggctatctcttttttgcgagaaattttgtaccatacaaatggtcccagcatgggcagaaggggcgcggagaagcatggncattctatttctacaggaatttt

SEQ ID NO: 45562 - DNA, 1091 bp, Heterodera glycines
aagtttattttaggcactcaagatgctttcactatcaaaaagggagatgaataaaaaatctaaaaatttttaattgctttttaaatatgcgaaaaattttaggcttaactttttttttataaactgatcagaagcgaaccagattttgcgagggcatcaaaaagacaaggaaaagcactgctatgatgctaactccagtaattctgaatttaaaattttttattaatttttaaagcttcactattttatttttttagcaaaatcaattcataaatattttttcagaaactgctctgaaacgcaccaaatgttaattaaaagttaaataaggctctctgatgctttttctatcaaaagggagatgaataaaatttttaaaaatttttaattcctttttaaacaggccaaaaagtttaggcttatattttaaaaagtttcatcgaacctagcgcactaaaatcgatataatctctccaaattttgcaggccttctccattgtaaaggactaacttaacctgaaaaaatgccaacgcttgttgtttttaaaatttttcgaaattctgactttttcattacttatttattttttgcaaaattaattcataagtattttttcagaaagtgctctgaaacgcacaaaacgttaattaaaagttaaataaggctctctgatgctttttctatcaaaagggagatgaataaatattttaaaaatttttaattcctttttaaacaggccaaaaagtttaggcttatattttaaaaagtttcatcgaacctagcgcactaaaatcgatataatctctccaaattttgcaggccttctccattgtaaaggactaacttaacctgaaaaaatgccaacgcttgttgtttttaaaatttttcgaaattctgactttttcattaattatttattattttgcaaaattaattcataaatattttttagaacgtgctctgaaacgcaccaaatgttaattaaaagttaaataaggctctctgatgctttcactatcaaaaagggagatgaataaataatctaaaaatttttaattgctttttaaacttgccaaaaattttaggctta

SEQ ID NO: 45563 - DNA, 1473 bp, Heterodera glycines
aaatatttaatttgtttattttagtcggcgttcgatcaaaattttttcagatcagagcagaatttttttagataaacttttgtggtcaaaatcagaaaaaaacactacaaaaaaggagcgtaaggtgatttcaaaggacataaggagacaatttttgaatttaaaggacttttcaaaagggagccggaaaatgcgacaccgagagaaagtttttcatttcaagaaaatgcgacaccaagaaaatactacatcaaacttagatttttaaaaatataaatttgtgtttttttttgaatttaaagtcttgaaaatgagcatcaaaaccaaaaaagacttgttaattgtgggtaagttgattttgtaaggtaataaaggaaaagcatcttgaagcaccagaattagcttatgagtctttaaaaattttcatttgcttagaaagagtttcttttcatcaagagcttttgagtggccaactttatatatttttattgcgaaaattcattttaatttttttgaacaaaagaaataaaaaaacgatgctgtatagttttaagggctgccactgatcaatgtttcattttttacgggtgtatttaaaatgttcaggtcaattcatatatatttcctggactgtgggggacctgaaacgcacgaaaaacatgtttttagcttggtttgaagcttctaggatggatttctatatccatatttcgcgatttatgtccatattttggcatttttccaaaaacctattagaacggcccccaacagctaattggccgttttgacccctaaagacctacaatcaggtccaaaagttttacaccaaaaaatattttagtgaaaaacccgattttcttaaaaaaaggaatggtggcaataatgttttgtttatgccaaaagaaacgccaattagtgcactaattaattcccaaaacttccccgataactctcttagtcgacaagaaaattttttcatgacccgaacaaccccctttttggcggtgcaaaagtaatgcaccaaaagatgtttgcacgattaattcaattttttatgagattttgatgctgatcaaacagtcttttggaccaacatgatcagaacacttcttcatggtgatctggaaagtcaaaaatggcttgaaatcgggaaaattttcaaaaaaaattctaggggattgaaaaagttttctggaagtttttgggaatttattagtgcattaattggcgtttcattcggcaacatttttgagaaaatcgagtttttcactaaaatattttttggtgtaatactttttccacttgactggtaaaaaatttccgaaacggacattttttagcaaaattttttaaaaatattgattaaatttagatttttcttacaaaattggttaatttatgtcaaatataaacaaaaaagcgaaaatttcgcttttcaggttgatttttcgctaaaatgagcaaatgttaatc

SEQ ID NO: 45564 - DNA, 787 bp, Heterodera glycines
atttacatatttatacatagcataatttgcgcgattaaccggttatatatatcaagcacagatcagacaaaacaacacatggcgaaatattataataatacgatacaatgtgtacatatatctttggggacatacagtaggataaatatttcaacaacaacaacaacaatacacgtgattgggatatcattgggttttcatgtcactaaacggtatttcgacatcgatgtcactaagagctctccgatgaagacgatgatgcgtccgaagttttgtcagaagtggcgtccgaagtcgaaccctccgatcccgagccagaggcagatgacgatgccgagccggagccgctttcggaagtctcagtggttccagaagtttcgtctgtcgtttccgtcgtttcctcagtcgtctcttccgtggtcgccgacttctctccgccggtctccgcggctgcctcctctttcttctcttccgctgccgacccgccctccttcttctcctcttcagctttgtcgtcactatgaaagaaaagcaacaaagttcgatgaaagcaccaaaatgcgcccgttttgctcacccctcgtcctccttttgctgctcatcaaccacgcgttccgatggcaccgccacgccgtcaccagcagcagaaggtggagtctcctttctgaaaagggacaaaaaccgttattcctcttccaattgttgacaaataaaatcggacttgtcgtcgtccgctcccttctcgacatcgccgtcagctcctcctttgccttcttcgtcttcttcg

SEQ ID NO: 45565 - DNA, 226 bp, Heterodera glycines
ttggattaatggcttttcctctaatgatgatgacaataataaataagcatccactgcttctgggagcgccttttatgctgctgcttcttctgctgcttctccgcttgcccgtgcccgtacccccggcgatttccgcgcgcgttgcgcgcattcggcggaacacataaaagggagatggggtgcacttttgctgcttggatacttctctctctctcagtctctctct

SEQ ID NO: 45566 - DNA, 922 bp, Heterodera glycines
cccaacaacaaaaaaaaaatatatgggtgaattatgtaggaggaacaattgcctcttcttgttggattgttgcagaaaaaagtgttgagcatggccaaggacaaattatgggagttaaaaaattgggaaaattgatggaaatttactaattgttgtttatatattcttaataaaattaaaaaatttgaaaatattcataaatcagaaattaaaaactggaaattttttttctccgactaatttgccattatatgtggtgcaaaaaattttcttaatgaagtggtattttcagtaattgaattcccatattgttttatcacgaattttccgattgaaaaatttacccaaaacagatttaattaactgaaccatgaaaagaatttgcgagacgagagaatttaattaaacttcgtaaaccccattttcttttatttcttaatttaaagaatgaaaataataaaatgtaaaaaattttaaataaaattagacatttcttatctatttcataaaaaaaaatatttattagttttgttgttagttttcaactttgtgttctttaatttctttattttacttcttaatttctaaattgattccgctttctgttcttacagagtgccaaaaatatttcgctaattaaaaaaattattttgaagaagaggcgggcaaatatgtatcaaagggaagctgagtgtttgccaataattttagggcccgagaaaaatatcaaaattttttaaatgctttttgagccgagaacatgtcgtcgtcgtccatgacacaaacacacatataaagtgaataccatgtgctatatattttatgttggcgtggtgcttgaagtgaagccagaaaaagagcaatggcagggaataaattagtgagagaatgagaggagtgcgagagagtgagagaacagaac

SEQ ID NO: 45567 - DNA, 893 bp, Heterodera glycines
aaaaaaaattctcgcacaaaaatggttatctcttttttctcatttttttaccgcaaacttggtaccaacagttgccttctcttgtctggccctatcaaacaatcttacgatatttgaaacgcaaacaaaaaaaattcttgaccaaaaaatggctatctcttttttcgcatttttttaccgcaaacttggtaccaacagttgccttctcttgtctggccctatcaaacaatcttacgatatttgaaacgcaaacaaaaaaaattcttgaccaaaaatggttatctcttttttctcattttttaccgcaaaattggtaccaacagttgccttctcttgtctggccctatcaaacaatcttacgatatttgaaacgcaaacaaaaaaaattcttgaccaaaaaatggctatctcttttttctcatttttttaccgcaaacttggtaccaacagttgccttctcttgtctggccctatcaaacaatcttacgatatttgaaacgcaaacaaaaaaaattcttgaccaaaaaatggctatctcttttttcgcatttttttaccgcaaacttggtaccaacagttgccttctcttgtctggccctatcaaacaatatatttgaaacgcaaacaaaaaaaattcttgaccaaaaatggctatctcttttttctcattttttaaacgcaaaattggtaccaacagttgccttctcttgtctggccctatcaaacaatcttacgatatttgaaacgcaaacaaaaaaaattcttgaccaaaaaatggctatctcttttttctcatttttttaccgcaaacttggtaccaacagttgccttctcttgtctggccctatcaaacaataatctgaaacgcaaacaaaaaaaattctgaccaaaaa

SEQ ID NO: 45568 - DNA, 1201 bp, Heterodera glycines
tgctaattagatcgattcttgtccaacatcaccagagagtcgcattcacccataaccaccagcattatccctccggcgggcactggttgtttgaatttgatgctcaccgctgtagttccattttttatcaggtcaaacagcgcagcttgatcatccccgctgttagtcaaattgaacacataaatgcaatgggttttcccgaactgttcatagctaatcccattgctttccaatgaattggcgaatcccaccgcttcgttcatgtcattgaaagggcgaacatatttcaaattagggtagtccaagtcgtaaggcgcttggggaaaggagcggccattagcaacaattgagatttcgcgcacattaaacggttgaaagttgaacggactacgcgaaattgttccaatatagtcagagttagccaccaatcccattgtgatacggcgaggaatttggtccatgaacaaattggcagtaaactcaaaacgacctggactgatgaacattgacttcatcaacgttttcctcacggcgtatcgtgccggtttcacttcaagttttcgcgcaatgtccaacgccagtccatccatcaatgaaatcttcttcacatacattttcaaaccgacaacctcaaagtggtagcgaggggcagccgcaagagtcgtaattaacaaaaagttgttgtcattgggtaaaacttcaatgtccagctcacagaagttgatcaaatagagtggctggttgaacaaatcggcgtcaattttggcaatgaattgagctgttctgcttcctgcaaacaagttacgtcgcgcaatgcagccgtcccctgtctcaagcgtgccgcccgtgtccctataatagcccgctgcattcaaatgagagtcctttgccgtagtggaataggacaactcatgggagaagtatgttttgtaggccatcagagaatttgagttgaaaacttcacgtccatttatgctcattttgatgtttcggatgaaagtctgaccaatcatctggatcggagcaacttcgtcagctgcgaggtcaatcagttgaccatgctcattttctttgcgaattcggaattcagttagtaaataacatttggacaaatcaacaaagttttggctggagtgaagcttaaagtggtagggagtgtccgtcagtggattactagggcacagctcaaaaacttttgatg

SEQ ID NO: 45569 - DNA, 10330 bp, Heterodera glycines
cacacaaaatcgcttcacaatgccacgacgacgactcgtatgaccaaaaaatgccacgacgacgactagtatgactaaaaaatgccacgacgacgactagtatgactaaaaaatgccacgacgacgactcgcacaaccaaaaaatgccacgacgacgactcgtatgactaaaaaatgccacgacgacgactagtatgactaaaaaatgccacgacgacgactagtatgactaaaaaatgccacgacgacgactcgcacaaccaaaaatgccacgacgacgactagtatgactaaaaaatgccacgacgacgactagtatgactaaaaaatgccacgacgacgactcgcacaaccaaaaaatgcaacgacgacgactcgcacaaccaaaaaatgccacgacgacgactagtatgactaaaaaatgccacgacgaccaatcgtatgaccaaaaaatgccacgacgacgactagtatgactaaaaaatgcaacgacgacgactcgtatgaccaaaaaatgcaacgacgacgactcgcacaaccaaaaatgccacgacgacgactcgtatgaccaaaaaatgcaacgacgacgactcgcacaaccaaaaaatgccacgacgacgactcgtatgaccaaaaaatgcaacgacgacgactcgcacaaccaaaaaatgccacgacgacgactcgcacaaccaaaaaatgccacgacgacgactcgtatgaccaaaaaatgccacgacgacgactcgtatgaccaaaaaatgcaacgacgacgactcgtatgaccaaaaaatgcaacgacgacgactcgcacaaccaaaaaatgccacgacgacgactcgtatgaccaaaaaatgccacgacgacgactcgtatgaacaaaaaatgcaacgacgacgactcgtatgaacaaaaaatgcaacgacgacgactcgcacaaccaaaaaatgccacgacgacgactcgtatgaccaaaaaatgccacgacgacgactcgtatgaacaaaaaatgcaacgacgacgactcgtatgaccaaaaaatgccacgacgacgactcgtatgaccaaaaaatgccacgacgacgactcgtatgaacaaaaaatgcaacgacgactcgtatgaataaaaaacaataactatttcgagattcttcgtcattaaaaaatcgcaaccctacttattactagggcttccaattatgtatatggaaatccattttttttcatggactgtgggaggcctgaaacgcacgaaaaccatctttttagcttggtttgaagcttctagtatgaatttctatatccattttttccatatttcgcgatttatgtccatatttttggaagccctatttattaccctagtgaatttttttctaagcgaggaggaaggaaacaaaaactactgtatttccacattctataaataatcgtttcattgataattaataaatgttcaacaaaaaagccaataaaataaatgttttatataattggaacgaaacaattaacaaaagcatttctgagagaaaaaagcacaacaaattgagatagatcatttctcaaatagaattattcaatcattcatttccgtacacttaatcagcagacgacatttccgttgcttttatccgcttcttcttcttctttttcttcttccgttggtggcgacaatggcctaaaattaattaaatattttatttttcgataaaattcaaatgctattgctgctgctcactcaatggatttatcgaaactccacagatcaaatctgatactgttcaaattggcactcggatttaagctgtctccccatttaattgctggcaccctcgccgtctccccaattgggcaccgttgcaacagccaattatacacatttacgtcgaattcgtcgatctcctgtttcagtgtcagcttttcattcgtccgtttgttcaccaattcaaatggttcagttggaattgtgttcacatgaaaataaagttgaatattgtaactgacagaagtggtggcactgataaatggctaaacaaatttggaaaaacaaaaacaatttatagaaaatatggctagacacacctctttgaagttgttgacccattcgagattctgtggaccaaaataattattgcgatacaatcgcttcggttggccatttttgctcggagtgtgaagccatttgaccaaagcttggccagcagttgcatttgcccatcgtcagcaattccatcgcgtaacagagcaccagaatcgattgaaatcaattgatcaagatcagtgagaatcgttggtgaaatgcgactgcgcaagttgttcaaagcatcggcatcgtgaaagcccaaatgacgaatgcttttcgcaaaaaactcaaatttggtgcccattctgtcccaaattggcttgtttgaacggataaatgtgagcacagaatggtcaatgtagctgaaaagggggaacaatgaagaagatgaccaaccatattaattggtttctgtatagtttttgatttactgaatctgaaggaaacgaaaacggattttgtttggcagcgaatggtccggcaatggaaatcccacaaatttgccatcgatcgccacagacagtttcgcttattttgatacgtctccaaattgtcaattcgctttttccatcgaaatgtttgtccaccaaaacatcgaaacggtcggaaagcaatgccattttgagtccgagttgagcatggtcaaaagatgggagaatgtccatccacacgtcgccacaaatccaactgaaacataagaaaattgggtaaatgaaaacttgcaattttttaaatcctttcttaccgtcggtccatttttgtggttcaattgaatgaacaatcgttgagaagtgacggggccaattgacgcaaacgacgaaaagcgatggtattcaaaatcatcgcacacatagaattgcggaacattggccaaatgttgtccaaaaggctaacattgcccgtgaaaatgaacaaatccgttaaacaaacggcgaaaatacaacggtgaaaacggcggagaaatgcgatgacattttgatcgatgtaactgaaaagcagaaattaagacgaaaaattgcaaattaatcaatctttacatgcttttgatgtgtctgaatccgatgattttgttcggaaacggattttggggattggcaatggatttgcatcggcattgtgaatatgcatttgcttagtgccattttcttcaattttgtagcaaattcgaatttcgcccaatttccatttgcgtgtcttgaaatgttcgtccacgtaaatgtcaaagcagcggttgatcaatgcaatttcggggccaaattgggaaggcgtaagaaaatcaaacaccaaaagccaacaatcggcgcagataaagctgaaaaattgaagaaatatttaaaattttttgttgaatttttacatttcttttttgttggggcgtcgtcgttttttgacatggccaaaaaataaccaaagagtgatggcacaatcgaccaacagcagaaaagtgcagcaacaaaatgagaaaaatttagggagaacgaatgaaatgaggaggaggaaacgaaaaaagggaccacataaaagcaagcaaataaataaattaattgtctcttatgtatgtcatgggaatttttttttggggggggggggaaccactttaactactaccaaattctttagacaatctttcaattatcctaaaccaattggccaacaaaaaaaatcgagaaaaataaatgagtatgtatattatagaaggaatgaattaacaagcatttctgagagaaaataagcacaacaattgagatcgatcatttctcaaatacaataatattcatttccatacacttaatcagacgacatctttgttgcttctatccgcttcttcttttcttccatcactttttcttctgctgctcaccgcactaaaaaaagaaatgcgtatttttgtttaaggtatagtgagtaaacatacgcggctggagcggtccttctggcgttcaacgtaatccgattttgccatggaagacgaattgtcattggaagtgcccgcggcagtggcagatgccgacttgtctttggaagtgccagaggaatggtcagatgacgatttggtgttcgctccagatgccttggcagatgccgacttgtctttggaagtgccagaggaatggtcagatgacgatttggtgttcgctccagatgccttggcagatgccgacttgtctttggaagtgccagaggaatggtcagatgacgatttggtgttcgctccagatccattggcagatgccgacttgtctttggaagtgccagaggaatggtcagatgatgatttggtgttcgcagttccagatgcattggcagatgccgattgctttgaagcggaagtggtcttcttcgaagttttgacagagccgtaaaaagtagaacaaatcaccggccagagtgcaccgaacttaaaaaagaaatattttgtgctaaagtgaaaattacataacaactaccataattccaatgaggaatgaaaaggtcgcaacagtcagggcataataatccaccacctgaagaggaagacagtgttattcagaaaaatggaattgtatgactaacaaataagcagatgccgaacagaatagcggaaaacaaaatacattcggaggtgctcagcggcataacggcaagaatttggtaaatatgtccggtggtgttcgcgaaaaaaattatttggtatgagataaagtgaaaagtttcatcccttttatacacagatagtcagtgctggacaacggaaaaattctaaaatccaaccaaagtgattagggtcggaaaaaccgattccggcatctattttcgcccaattcgaaccccgaacccggaattcgaacaaaaaagtcaaaatccgttttttaaaaaattcacattttacacacaaaatcgcttcacaatgccacgacgacgactcgtatgaccaaaaaatgccacgacgacgactcgtatgactaaaaaatgccacgacgacgactagtatgaccaaaaaatgcaacgacgacgactcgcacaaccaaaaaatgccacgacgacgactcgtatgactaaaaaatgccacgacgacgactagtatgactaaaaaatgccacgacgacgactagtatgactaaaaaatgccacgacgacgactcgcacaaccaaaaaatgccacgacgacgactcgtatgaacaaaaaatgcaacgacgacgactcgcacaaccaaaaaatgccacgacgacgactcgtatgaccaaaaaatgccacgacgacgactcgtatgaccaaaaaatgcaacgacgacgactcgcacaaccaaaaaatgccacgacgacgactcgtatgaccaaaaaatgccacgacgacgactcgtatgaccaaaaaatgcaacgacgacgactcgcacaaccaaaaaatgccacgacgacgactcgtatgaccaaaaaatgccacgacgacgactcgtatgaccaaaaaatgcaacgacgacgactcgcacaaccaaaaaatgccacgacgacgactcgtatgaccaaaaaatgccacgacgacgactcgtatgaccaaaaaatgcaacgacgacgactcgcacaaccaaaaaatgccacgacgacgactcgtatgaccaaaaaatgccacgacgacgactcgtatgaccaaaaaatgcaacgacgacgactcgcacaaccaaaaaatgccacgacgacgactcgtatgaccaaaaaatgccacgacgacgactcgtatgaccaaaaaatgccacgacgacgactcgtatgaacaaaaaatgcaacgacgactcgtatgaataaaaaacaataactatttcgagattcttcgtcattaaaaaatcgcaaccctacttattactagggcttccaattatgtatatggaaatccattttttttcatggactgtgggaggcctgaaacgcacgaaaaccatctttttagcttggtttgaagcttctagtatgaatttctatatccattttttccatatttcgcgatttatgtccatatttttggaagccctatttattaccctagtgaatttttttctaagcgaggaggaaggaaacaaaaactactgtatttccacattctataaataatcgtttcattgataattaataaatgttcaacaaaaaagccaataaaataaatgttttatataattggaacgaaacaattaacaaaagcatttctgagagaaaaaagcacaacaaattgagatagatcatttctcaaatagaattattcaatcattcatttccgtacacttaatcagcagacgacatttccgttgcttttatccgcttcttcttcttctttttcttcttccgttggtggcgacaatggcctaaaattaattaaatattttatttttcgataaaattcaaatgctattgctgctgctcactcaatggatttatcaaaactccacagatcaaatctgatactgttcaaattggcactcggatttaagctgtctccccatttaattgctggcaccctcgccgtctccccaattgggcaccgttgcaacagccaattatacacatttacgtcgaattcgtcgatctcctgtttcagtgtcagcttttcattcgtccgtttgttcaccaattcaaatggttcagttggaattgtgttcacatgaaaataaagttgaatattgtaactgacagaagtggtggcactgataaatgttaaacaaatttggaaaaacaaaaacaatttatagaaaatatggctagacacacctctttgaagttgttgacccattcgagattctgtggaccaaaataattattgcgatacaatcgcttcggttggccatttttgctcggagtgtgaagccatttgaccaaagcttggccagcagttgcatttggtccatcgtcagcaattccatcggggaacagttcattggaatcaattgaattcaattggtcaagaccagtgagaattgtcggcgagatcagacgacgcaaattgtcaaaggcatcgccactggtaaagcccaactggcgaatgtttgccgcaaaaattggccaaatttcatgggcgaaaacatcccaaattggttgttcatttgaaatagacaactccaaattggtgccacttctgtcccaaatttgtttgttgacacggataaatgtgagtacagaatggtcaatgtaactgaaaaggggaaaaatgaagaagatgaccaaccatattaagtagggttgcaaccccgacgtcggggttggaagtgtcggggtcggggttgccaaatcgttcggggttcggggtcggggtttttcaatttttgccttatgccaaatagtcaaaaaactttataaatttttgcttaaaaatatttaaatttcgtaataataattttatgtgctttttatattttttttatcataaatattttgtatagaattaattaaaaacacatacctaaagcatttaaaatggccaattttcagcgaaaatctgtataaatcttttttttttggtcttttttttgcggcgctctttatctaaagacgtttaggagaaatgggttcggcggtgccgataggcgccgccgtgaaaaattttgaaaatttggatgggcctgttaacagattttgtccaaaaaatgatagattttttcgattttgggccaattttttttaagaaaaaataggtttttttgtggcgccggcgatgccgataggcagcgccgggtgaattttgaaatttaaggtctattttgtaacatattttcaccaaaaatttatgaatttctggtaaatttttattttttttcttttttttgtaaattttcatgatttagtcaaaaaattgaatttttattcaaagaaaataaaattgggttcaatacgtctataaattacgggacaggacgttttcgcgtggccgttttcgcgtggttgcatataaaagagaagtgcaaaagcaactctaagcacacttattgatgtcaacagaaattcaactataagaaaaaaaaatttacaaaagcctaaacttaggcctagtctaacaataagccattgttcgagttgcctgtgtatgagttgtcatgataaccttaggtttaacaacgaaatttatagttaaaaactttactgaatacctaacaaaaaaaaatagtttttctcttagttattaggacaactataataccatgagaccagggatggcacggaattccgatttccgaaaatttttggggcctcggaatgccatccctgccatggacacaaaatgtcatgggacgcgtaaagtgttgttgggactcgtaaaatgtgatgggacgcgtaaaatgttatgggacgcgtaaaatgtcatgggacgcgtaaaaccgactagaaccaattttaattattttttccgtttgacgcacatccgaccaaactgacaaattattgtagaagatactagccgcaagaaataaaaaagttaagaaatttgtccgaattcgggttcgggattcgaaacatagatgttttgcacaaatccgaccaatttcagtcctaaacaggtactcacgcgaaaacgtaccccacgcgaaaacggccacgcgaaaacgtccccacgcgaaaacggccacgcgaaaatggccacgcgaaaacgaccccgaccgaaatccaactgaaacatggaaaatttgtaatttttaaaaattttccttaccgtctgttcattgtttgctgcaattttagagcacacttttccctttcaagaagtactgaaatttgaagatatgtagtattcaagcgtaaaaatgttcgatcgtccgccaaatcatgggtccaggatctttgctttttgaaaaatcgattctgaggggtgcattttttgaaaaaaagtaacgccaattttttgttttgtttttttattgctttttcataataatgtttctgttaaagcagaaatattttaaaagttttttaaaaatttcacaagtcataataattgtttaaaagtcgctctaaatcgaaaagtgatcgaagaaaatgtgttttttgcgcttatctcagcatatgttatccccccaaaaaagtaggtgaaaacctaaaaatccgttccctgctaatatcgatgattgaaaaattgttaattgctaggaaactgaggcggactctctgatcggggttttccggatttggtaattctcaccgatcgatgcacgttcaaatgcacgaaagcttgcctttgatttgaatgttgcttgcttatttgttagctcggattcgtatgtacttgaatggcaagtacgtacttgaaattgactctcatgcgagaaaatttagaaaaactctcgagatttttcgtcactaaaaatcgcaacctttcttattaccctagtgaatttttaattatttttttctaagcggggggatgagtgaacccttaactacttaatggatttccaaattctctagataatcgtttcaatcgaaaattcatttctcaaatacaattaatcaatttaattattcatttccgtacacttaatcagcagacgacatttccgttgcttttatccgcttcttcttcgtctttttgaaaggttaccaaaatgctttcttacgcacaacaattaagaactactgaatatataaaggggtcaaaaagactttttggatgcacagacggtgaggaatttcattttcatttacccatgctgtttttcaaaagaaattgcttaccgtctgttcattttttctctattctgcatcaaaaatgtcttttcgacctctttatatatctaccaaaataaaagtgagagatttgaaaacggatgaacggatggggggagattaaaatgatttgttggccaaaataatggccataacgcattaatttatgcgtatataaagagagagtaatggggaagggtgttttgctgattttgttcaatacatacataatttacacggcttccttatttttgtaaatgcatatatttttttcctggattctccgtatcctaattgctgctcacccaatggatttatcgaaactccacagatcaaaagtgacattgttcaaattggcactcggatttacgctgtctttccatttaattgctggcaccgtcgccgtctccccaattgggcaccgtttcaacagccaattataaattattccgttggataatgcttcgatctcctgtttcagtgtcagcttttctttcgtccgtttgttcaccaattcaaatgattcaattggcattgtgtccaaaagaaaaaacagttgaattgtgtaac

SEQ ID NO: 45570 - DNA, 5670 bp, Heterodera glycines
tgaaaaatagtgacgacgccaaaatagtgatttttaactactattttagtgacggagtcgccaaaatagtgatttctagtgactgataatgacatcagaatcgaaaaattttaatgcagaacactttttattataattttagtaattttacaaaaggaaaaattttgcgttagtgcatcattaatgcagtggactttggacaagtacagtcgattggcagacacacgtaatatgcaattggtaaatggttgtccaattagtgcgttgaatgtttcatttgaccatttttagacgatcgaaaggggtccttttgagcagttatttttacaattggattaccctatcaaaatgctcttcgtttaccataacggaaaccaattagaaatgtttttgcttcatccgctcgcttttccccatgatttggtgcgcagagaccagcgaattttgttctgcatcaaagaccaggtcagaataatattgaaattgattccctttctataattttagaatgatggaaatgtttctgtgaagtttcgcgtccgtttctcatctccggactctatgaataatttttgcgctacaatcggaaaattcatcggagttaaggccttcgatgattggaactgtcgcagctcctcgcctttctcagtcgatttgaattgttcgtccgttactaacacgaatcgcccaataaagaatggttcaaacgaaggtgaggagagatacccaaattaatttaaggattcattggcggtcacttcttttcaattgtcgtttagcttcctttgttgttgaccccgatttgtcgacgtcctccgtcagtttgctcaactgctttagccaaagcagcaaattttcttcccaagacacatcgacgtttgacattttctcatacgcaagcgccggaacaaaagaaacttatcgatatggtaattgacaagaaaaggtttctttctaatgttaagccagtattaatagagcactcagacggttgtggatgagaacaccgaccctaaccaaaagtcaaaagcccctccctcctcttccacccacccctctgcgtcttcgtcaatccatctgcacattgaaaatctattctcatcagaagctgtgcacgcatttggtggagtattgcgtcaattggcgaatggaaccagcaaaactgagacgagggggaggaaaaggaagagagacaaagggacgaaaccaccaaagagaccggtgagaaatgacaggaataaaacaaaggaacaaccaatgtttttgtcagttgaattcgtatatgctgtggaacacggatggccgtaaacgcagcgcaaaagagtggcgagaattgccagcagaggaaaaggaacactggaaattgtgcgctgccgtgggaagggtccgttacaacgaacaggtcgagcaataaatagcaaacccaaaccagaggacacgaatttatgtttttagatggaaacctataaaaagtcacagcaaacatgagggatttggcatttaattggtatattattgaatttggaaaatttaatttgccatggtgcttttcatttcactttccaattgttgtattttgtgtgaatgtgtttcaaccaataaaatggcaaaaggttatataataataaaaggcgaatcagtgtaatctcttccatccttcccatccaatttcactgtggatacctgaataatttgtttaaaacagaaaatgacttattgagagaaatagctaactgtaagaggtatacaaatttcctaacctttttcatctacgcattttgaccggaatccccgttgacaaccttcatgatctgcttaaaggatccagccgaaagaatctcagaaactggtctgagggagtcatcagtcaaatgacaagccatcacggaatctttctgtttctgttgtttgtccgacccattgctttcactgacaacgcaagtaacgatggagcccggctgttttccctgttgattgccaatattttcaataaactttttcacacacggcccttgtttcgacttaaaaaggattggttatttgtaaaagaaaatagaattacttgacagttatcaatgggatggacatgtcccaccggcagcaataaattcaattcgtcatctggaacatcgccaacttgcgcgggagtaaggacaattgaacgctttacactttgccatgactaaaagctttctccttttttgtagttagtatataaaatatattaccgcttcatatacaacggcaatgttcggctcatcggtttcgtaaatgtttgtgagagaaaactcgaaacaagccctaggagaaaacattaaatagtgacagttccgccggggatccatcgttgggtctctttcctaagtcaaacttgaggctaccatgaatatctttagctcaaaaggctttcatatatgactgtgtacctgtctgcctctttgaactgcttttgccaccaaacaaaactgcagattcccttagaagcccagcttgcaatagttccatgaaaaacatttaatttgacagtgcctctatatggtttgtttggcaagtacttaaaacggagacattttgtaggtaaattaaacaaaaatatttactgcccacttacgtcgtttaagttgatcaaagtcttcatcagagtgcccggcaaaaaaggagaacaaacaaagacttgacgaggttgctcatcggagacggccacatcgacatccatctgcgaaacggaatttattttaagtgtattacgacgaattgtcaccgcttaccatccaatccgacccgcgcttatccagtccaaataagccagtcccgcccttcatcatacaagtgactttcgacgctttcgaatcaacttggacagtgacaacggagtcttctgactgaacagtggtcatcttattgcactgagattttgacatgtacgcatgctgaagcggatccaaagtgtacaacgaacgagggacagggtaaaggatctaaaaacaaaaggatggaaatgtttaatttaaagtcggtctattattattatgcaacctcgtcaggagcaacataaacaacattggcaatttccattccaaagtcgttaggaaaggacgaaacgatcagagccggtctcataatgccattttcttgattcttttttccccagaattccattttgggagtttgtgaatatatggaagagaaaaaagcaaattaaattatcctaaactattgcaaaattaaaggcaataatgaaggtgtttggcgtatgtatggagtagacccaactcatcttacgcaactcttttatactcaattcatccataataggagtgtttcactatgaggaagtggatcatctgatcaagttggataagtttttttttgatcagcaataaaagttagaacagaatgaattatttaggattttaggcccacaaaaatagttttgtaattgatgctaaacatatgactagggatattatgatattatttttaagttataaaaaatccaaaataggtgtaaaaatggagaagtggcaattagagctcggtattttgaaaaaagcctggacctggacctggattccatgttggacctggacctggatttcctggacaaaaatccaggaaaatccaggctcttcgagacctggatccaggcctggacctggatttttttaaactcattttaaaaatcaaaaaaatgtttgaaaaattcaattaattgcttgggaacatctaaaaatatctaatttacaataataatttgtttttaaatatatttaatcattttttgaaaacttgaaaaaatatcggtcacttgaaataataaattctaaaattttgtccaggaaaatcggtactttttcactttacgccacataaaataatttttaattttttttctggagttttcggggtcgctgatcatgaatatgacgtttatttcgaacaattccgaaatccggacccatactcgaacaaaaaatcaaaaatttaattatccaatttatctttttcatctaaaaacgatttaaacacatggaaacaaactgaaagctatccactcatgcaataaaagatcattaaaccatttttagacgaaattcgaaaaattaaattttagattttttgttcgaatttgggtccggatttcgaaattgttcgaaatgaatgccatattcgtgatcagcgaccccgaaaatcccagaaaaataaaaatatttttttttatgtggcgtaaagtgaaaacgtaccgaaattccaatccatctaattttaccatttatttttggtcaaagaaaaagtgggagaaatgagttttttaatgaaaagaaaaagcttcttaaaaaacaattaaagcaagagattgtgttgagttttttgattcaagcggttctttttttctttgtatttaaccggatttggacataattgcgaaattcggaaattttttttaaggttcgggattttggttgatataatgtaatagagtgatcaaagcccccttgaaatttatcttcctgaatttttaggcgtggaagagttggacgcgtcaaattttgaccgcactgtcctacttgcactcgtgcgacccgcccattgtgcacgccaacctcacgtgcaattccgtgttcatccaacagaacggactggtcaaaattggatgcggtaaatgcctattcagtcacagaaaaaccgggtccttacccaaatttttcgaaaagtttttttcccttagaatttcttataaacccaatgaattacaatgcccatgttccatatggacgttcttagcacactttcccatcaatttttagtcgcgccaaaaaccattcaccaccatgtgaagacattccgtgagaacatcaaaaatgttcattatctggcgcctgaatacgaccgtaagtgtttgttatgtttttgaagtgctttacatggggaacaggattacactaatgttattagtaaatttttattttgttactttttcgaattttctccgcccccccccccccccacttggtatttgtcaatgcgatttttttttaatttaaaaggttttattacccgaaataatgaattgatttttttccatttagaccaaacggagacgacaattcaggcggacatttattcgttcggagtctgcgctcttgaggtttttttatttttaattaacacttgctatttcttcatcaatgggatgggggaggaagttgcagaaaaaaattattccggacgaaaaaaatattttaaaaaattctggtaacgtctgtcgagccgaaattttagcatgtttgttcaattccccccccccccccccctcaacattggacgcgtttttttttgcattcttgttgccaactcggacacattccacccctttgcagatggccaccacgggtgcactgcaaagtggctgtttcaacggtgctcctccgtccagcatggcatcgtccgccagcgtcgccccaccctccgccgcctctttcgcgtcgcttccgcttcatgcgacggctgtgcctttgccttcaaccgatcgggacagaggagcggtgaccgaaaatgaaccaccaaatggcaccggttgttccctggcatccgcagcctcgaccggtacactgcaggcgacggtcagcaactggccaaccgcgactgcatcagctgtgacatcattac

SEQ ID NO: 45571 - DNA, 1650 bp, Heterodera glycines
tttttaatggatataaaaaccaaaaagaaccgtcgatatgaaaaaattaaacatttgggtgaaggtcaggtaagtaaaacaaaagatacaagaatagttttgctcttttaagttcgcaaatgtttaccaagcaaaggtaaataaataccagaaaatggcaaatttttaattgacattaaaataaaaataggtatgtagacttgtttaggtaccttttaataaaccttttataaaacgacatatttgtttcatattttaggacattgaaaccgggacgatagttgctgtgaagaaggtgcaactctcagcattttattgcaattaaattcaattatggctttatagatcaaacttggctcaagacatgaagcgcgcgatggtgttaataggacggcaattcgcgaaatcaaattgttgatggaaatacgccatgacaacataatcacacttttggacgtgattggtcacagaacgagcatccaattggtattcgactttatggagacagatttggaggcgagttatccaaagtgactttcaaccgcattttgccttatgggcacttcatttagcgttttaagaagcggggattctcccctttctcattgtcagccttccctcttgatgagtttcccgtgaataaattttctcaggtttagaatgttatcaaggatagtgaaacaattctccagcactcccacattaaaaatatgcttttgcaagtctttttgggccttgaacaccttcatttgctcttcatactccaccgagtaagcttttacaatttatttattcgttaaattttatttccaggatttaaagccaaataatttgcttatgaatacttctggtcgcataaaaattgctgattttggccttgcccgttattttggctctcctaaccgttattacactcaccaagttgtcactcgatggtaccgagcaccggaattgctctacggggcacgggcatattcgacgggtgtggacatttgggcgatgggatgcataattggcgagctccttttgagggtgagttggtttcgcctttgagtcagttttgacgatattattcctttctaataatttttttagggcgcgaggtgtaagtctgaaaacggttttttttcaggcgcacttttttcaaaaaaattttgtcttttaatccgtttttcggcactgaattttacttcggagtccgtaacatcgtcttttaggttcctgtttttcaaggcgagtctgatcttgaccagctgatgcaaatttacaaagtgcttggcattcctacggaaacggattggcctgtctgtctgtttttttaaatttgttttaaaatcgcttcagggcatgacttctcttccggattatgttcaaatacaaaattgtggtccaggacatgaattgactgccgtttttcctgccgcgagttctgatctgattgagttaatcggccaatgccttcgctttgatccgttgaaacgatggaattccacccaagcacttcaatccgactattttcgctcccagccattcgcatgcgacgactccgaattgccggttgcaggcagacgaaaacgaaaacagcaatcgttgagggagaatgttgaagcgggtgatgagccgccgtttagtcgaaggcgtttggatttt

SEQ ID NO: 45572 - DNA, 1653 bp, Heterodera glycines
atgttttttggcgaagagattactaaaattccgcgggaagtcggcaaagaggacgtgtgtaaagcaatttctcatcaaattgaggccattgacatagatcagtgcaatttgaatatgtatttgaagcctgacacgggagtgatttcacttgaccaattccaagcgatgggttccaaaagattgacaatgctaaggaaactcgaaatgcttaaagaaaaatttggaaatgccaattcgcaggatgagtacaaaaaggcatttcgagaggttgttgcatattgcgttgcgttatcatcgttaattattttatcaaggacatcggtgctctgatgccattggtaaccaatttatgcgtaaatgccggactcaatgaagcaagaagagaggaccgcatttcgcattttatacttcgtcttgctttttgccatattccagaacaatccgattggtttgttcggttggaaaccgaactttttcgcatgcgctttcaaaacgagacgaaaaaaaatatggcactttttgtggcatcgatcggcatacaattgaaccaagtaatggtggtttttttgcgatttgttgttatctcccacccctcacagtgacggtcccaaggttaagggtttttggggcctacgggtacccttaggaaaaaaatttttttttgccattgttttgaataacggcgcctttttaaatcagataaacgaagtttaaaaatttattattctcgcgtcgtttttaggttgacacttctgagagagagcagttagttgacgaactttgccaagcgctgtcactgagtgctgaagagatggaaggggtagatttgtacaaagtgaacgaacagcaatttgttggtcattattttctcaatgtttactttaggttgatttcgttgatgttttggaattgctttcctcacaccgaattctgttaaaaaatggcaccgcttacatttcctcaaatgaactttttgcatttgtggtgcctcgttttcgtgacaacctttccgcgtcgatgactcgagccaggaaagaaatcggatttttgcaggagaatgacaggctagtgcccctgatgaggagcatggtccagggaggagcaatgtgccaaaatgagttcgttttattttttattcatttggcataactgtgtcaaatttagaaacacaaatgtcgagcaaatcacttcggacatgattgattcactagcccaaagctcattcccactttgcatgcggcaaattcatttggttttgcggcgggagcaccaccttcgacattttgcaagacgacagttcggccttttcttaaaagtttgttcgttttttgacggatatttacatgtattttcagggcgctggtctttcgctcgagggatctttggaattttttaggatggaattcaccaagaaaatgaataacgagaaattttcaaaagaatactcgtataacattcggcacatgtacggaagagaaggaagtcgcatcgaccaaaggcctttgtcctgtgcctccattatccttggcagtttaccaacggcgctcgattgtcacgggtgtccgtataagtgagcaggcaccacgggtcaatttaaaaatgtgtaatttcttgaatttatgaaagatacccaaaggcttaggatatgaaaaa

SEQ ID NO: 45573 - DNA, 683 bp, Heterodera glycines
atgctggacgaacgagaacagcagcaaatggaggaggaggaggaggacagctgctactgggtgaccgtctttggcttttctcctgaccatttacaacacattttggaactgttttctcgccacggcgatataatggcacaaaaggtcaatcgctaaatggcaaaactagaaaatattgccaatatttgactttcagactccaaaacggggcaattgggtgcacattcgctactccactccaatccatgcaaaacaggcgttgggcagaaacggcagcatttttgaagggcaaatgatcggcgtggttccgtgccaagaccgcgtgagtaaatggctattgtcgggataagttgggatctaaagcacttgtttaaggaagcgctggaagacgatttgtcactttcccgaagtgcaactccgctcatcccgcgacattctgtgacccctcatgacacttctcgacagaacggctctttgttggacggcaactattccatccatgacgactcacaaatggtcccttcaacatctcaatacaaaaccaatggacttccaaggtggcgtagttttgtcccgattttaatgccacctttacattcagccgggctcgactcagcatttcgtctcgtgccggaatgcgtccattgaatgccagtgccatttcggacggaccgaaccaaagt

SEQ ID NO: 45574 - DNA, 765 bp, Heterodera glycines
atggcatcaattgtggacagcgcaaaagtgaacaattttggaattggcactgttgttgagccgattctcgtcaataaaaatggatccaccggcggtggcggacggaggaaaaagaaaagtgaattcgaaattgaaatatattctaatttaatatgcatgaaaagattgaacatttaaaattattttaaaataaaataattcgttacaataaaatctctctcttttttatagctctgttcggcatttcacaagcagtgcatgccgaacatcctcaacagcaattgtccgaattcgctggtggcatttcgcctgtcgacgccgtgccaatgccaaccgcggccaatgactgcaacaataattccatcgaagacattcaatcggaccgccgaaggggcccaattgagtgaggcggcacaatgagtggcatttaatattttatgcctttggatcttattcaaaataattgggttttggggttgctattaagaaaatgcttaaaaaatgggaaaacgcacttttggctttttcagtccgacaaacttcgaccatttggtccgtctgagtgagctcatccgttccatggccgaccttggcactttgcagcccgagttcggcataatctgtggctccggattgggcgcaattgccgaccaaatggagggggcgcggattttgcctttctccgaggtgcccggctttccacagccgagtgttattgggcacaaaggcaaaacaaatcagaggcgattgattaattgtcgatga

SEQ ID NO: 45575 - DNA, 2634 bp, Heterodera glycines; identical to SEQ ID NO: 20342

SEQ ID NO: 45576 - DNA, 1670 bp, Heterodera glycines
atggagaaattgctatcgccaaatattgccaatgctcagtcgacctcgacaacgacaacttcagcaacagcgtcgtccaataataaagaagagaatagcaaagaaaaggacgcggaacaaatttgtcactggattcgcgaactaagggagcacgaaaagcgagaaaatgcacttttgcagataaggttaggttggggagttgccgttctttttaacgcaatttaaggcagactctgtcaaataaaagccaaaacaaattttataaaaattttggatgaatgcgacataataaaaaacatcctgttaaaatgtgaacagttttttgtttttattaataaaattttagttcccactatccataaataaaaagaaaagaactgatgaatttggtagttgttttttccaaattcaaaaatccgttttcaaatgcctaaataatcacacattttgttcagcaaacgtcgcgagggagtggaggacctcgccgtttggttgtggttctcttatgggacagtgaggtgctgctccaatttgattccaactgaaactgcatttccttcggcttttagcgtgcttctccaagagatcattagcatttacccgttcattttgccgcccactctcaccgctgcccagtcaaaccgcgtctgcaacgcattggcactaatgcaatgcattgcctcccatcggaacacccgcaaacaatttctggacggtaaatgaaatacaaattaagggaaatctgatcagacaatgacatatttttttctattaaaaatctaaaattaattttattggaaaggaagttagaaaattaaattaagaaatttgtttttcaaaagtttctaaggggggtggggcgatgggagaaaaccaaatactcccgttttcagtgcatttttgggttccgttcacccgaaggagttagtctgaccattttatctatcatcaacactatgtttctttggatgttttaccattctatcaaaatttattctttcaatgctggataattcgattgttttctttcgcttactcttttttctttccttttagctaaggttccgttgtacctttaccctttccttcacaccaccagcgattctcgtccttttgagtacctccgtctcacttcgctcggtgtccttggcgctctggtgaaaacggatgaaaaggatgtacgtatcgcccctttttgtgtttgattgtttggaattcgtttaggttgtcaaattcttgctgtccacggaaatcattcccatttgcttacgaattatggagcagggcactgagctttctcgcactgtcgcaacttttatacttcagaaaatccttctcgacgacatcggcctttcttatgtttgtcagacgtacgaacgtttctcccacgtcgcaattgttttggtgagcgaaacgatttgaattttagttaatttttaggcttttcccattttctcagggaaaaatggtcattcaattgtcaaaagagccttcacatcgtttgctcaaacacctcatccgctgttatcatcgtctctccgaaaataatcgtgctcttcaggcgttggcccaatgtctcccggaccaacttaaggatgacaccttcaagaatttgctcgaccaggatcgcccaacaaagcactggtggaagatgttgatgaagaatttaa

SEQ ID NO: 45577 - DNA, 113 bp, Heterodera glycines
atgatggaaattacagtgaatgatcgtctgggcaaaaaagttcgaattaaatgcaatccgaccgacacaattggggatctgaagaagttggtgtcaactcaagttggaaccaa

SEQ ID NO: 45578 - DNA, 584 bp, Heterodera glycines
atgtccaaccaaaattcgtccaccggtggcgcggacagtcggaaaattgaccatttgttcaacaaatatgctagaggtttgttcattttattatgatgataattccggtgtgcccttggatcgtaaaaaaataacgcggttcggaaaatttgaatttacaactttttgttcgagtttacattagtagggattagcattggtcaaaatgttgtcagagtatcgccccgtgatcaaaaagtttccatgacttattatgacaaaaatttagcaaaaccaattgaattttaaattttgttttttatggtccatcctaaggtcgagactatccctaacaaaaaaaaatttttttttcctaccccccccccccctctttttcagatgcaaaggacaaagcgcagaaaatcggacccgatcggatcggtcccaatggcatggtgcgtttcttgcgcgacttgaacatcgagccaacgagtcgggcagtgatggttttggcgtggaaaatgggtgctcaaaaacagtgcgaattcactgtacaggagttccgcgacggaatttccacactgatgtttgtgtctttattttaa

SEQ ID NO: 45579 - DNA, 1831 bp, Heterodera glycines
aaaaatggggaatgcaagttttgcctgtttgtttgttttgatataaattaattgttccctcctcccggtgcacagatttacctctgttttgaatgtgtgccgccgcgcaatctgtgcaacgacgtgcgcctgtacaaccaccggacaaaattccatcgtggccaaaattcggggttcaaatgcaacctgtgcaatcagaagtttttgacgccgcgcaagttgcgcaagcacaagaaaatgtcgcatgtgttcaccaagacttaccagtgccatttctgcgaggaactgttcatcagcgaaacggcggtgggatatttttttttacacattttatgtactgatgccataattattgggatttggtacctcatttaaaattgaaatgtcaccagtttggtaagcatttattgttaccgccaacttcaaaccttggtatcttcatttctaaactcaaatgtcatcagtcggagaatttcttggtacccccattttcaaatcgtggtacccctattttcaggtcttgctaccttccttgataaaatcgaatgccatcagttggcaaccatttcttggtaccccaattttccactattgatacttccattttcgtaaattcaaatgctcattgtttttttatccaaaaatgccattttcccatgataggtgaccacccacgagcgcatccacacgggcatcatcaaatttgagtgcaaaatttgtgactacaaatgcaatcgtttcctgaacatggaggaccatgtgaaggaggaccatggctatctgtgctccatttgtcagagcaaactcagcgaatggggtgacctcaaaaatcacatgctcatggaccacggcggctatctgtcgtcagagttcaactcaggtcagactggacaggaccggcggcgtcatttcaatctcttcctcctggtgtggtggtggtggtcaggcaggctcgtaaccagaaaaacgaaaattcggagaggagttagttccatttttgtcccaacaaatttttgcggtaattttcagtatccattttggtgatttttgtttcaaaaactgagagagtaaccaattgataggcgctgccaacaaaaaaaatttttttttaccaaatttgaaaaaatatttgacagaaatatcaaaaaagaatgaaacctcccaccttccatggttatgtgcctgctttttcttgggtcatatcattcattatttattaatggcgttttgaattttcggccgatatctcatcatcgcttcccatcttcaacattaccaagaaccattcaattcattatacgattttaaaaaaatggattttatcattttaacaaatttgcgcattgatcaaatagccagccaaagagtgctaatggctttgatcgcgctgctttaatgtgtttttaaggaatttgtttattcaaaacccatttcagccaaccaaactcttacggtataccacaatgggacgaggccgaatttgttgttgttgttgttgttgttgttcttattgttgttacccacccattgggcgaagcgaacatttcttattattacaattactgtcatttaaggaaaaaaaagacaattttaaccgctcattttttattcgcttaatcacaaacattttcaacaaatcttgttacacatatattacttttttttttacttgtttcttggcgaaatttttgtgatctgacatataatcaaccggcacaaatcccatggtggaaaccgccggatgggacacactttcagagactgtgaatggagatgtgctgtttcagggtacatcgaaagcccgcgcgtttggctgatgttcaagggggac

SEQ ID NO: 45580 - DNA, 808 bp, Heterodera glycines
atggaatggcgggaggaaaacaaagcgcaaataatcccgggtgttctgttcgtcgacgaagtgcacatgttcgacctcgagtgcttctccttcatcaaccgttacatcgaatcggacctttcgcccattttggtgatggccaccaaccgcggcattgtgaacattcgtggcacttccgttgagtctccccacggcgtgcctttggacttattggaccgcagccttatcatcaggacgtcgagttacaaagaaaatgtgagtgtttactccggcggggaaacaatcctttcgattctttaaggcccgaaaattaaaaaaaacatttgcttgtaaatataaaatccaaaacttgaaaaattaatgcaattatttatgtttaatacctttctttattggtcaatcagaattgggccccgaaaaagaaattattaatttagcgttgctatccaacaacaattttggaattttgaccaaaaaccttcaggaaattggagagatactgaaaatccgtgcttctgatgaactcgttgaaatggaggatgccagcatcgcagtgctcgtccaaatagcattggaaacatcgatgcgttactgcatgcaactcatttcaactgccgacattttacgacagagaagaaaaggcgaaaaggtctatttacgagggttaaaaagggaacacaaaatcagacaaaatgtttaggtcactgaagaagatgtgagaaaggcgagaagtcttttcatcgatgtgaagcggtgcagaaaagagatggaaaagcacggggacagtttcatcaacgatttcaactga

SEQ ID NO: 45581 - DNA, 1886 bp, Heterodera glycines
atgtccaatccatcattttttcaggctcgcaacgtgcacaaacagggctgcacgttgagctggaaaccgccagaagatgatggcggtgcgccaattgtgggctatgtagtggagaaaatggacacctcgcgcggcacttggcaagaagttggccaattccctgactgcgaggccaaggtcaaccggctggtgcccggcaaggcgtacatgttccgtgtcaaagcggtcaacgtgtacggcgagagcaagccgttggagggggacaaggaaatagtggccaagaatccgtttgatgtgccggatgcaccggacgcgcccgcgatcatcgactttgatgagaatcggattgacgtagcatggaagccgccgacaaatgacggcggcgcgcccatcaaggagtacattgtggagcggcgcgagaagggctcgtccagctggattgaagttgggcacacgcccgccacatccttctcctgcaccgggctgcgcaagggccaagagtacgagttccgtgtgctggccgtcaacgaagcgggcccgtccgcaccgtcggccccgtcagcgtcccaaatttgcaaggcgcgcttcctgaagccgcagatcatcaccgcgcaacgcaagtggaaagtacgcgccggcaacacactgacgctggacatcgaatttgttggcacgcctgacccgtctgtgggctgggtgaaggcaggcggtgccggcacgctgccgcccgagctgatcatggacgtacgccgtccgggcaacacgtcaatcttcttcccggccgcaaagcgctctgagaccggcatctatgagctacggctgaagaacgaagtgggcgagacggaaggccactttgaagtgctggtgcaagaccgtccggcgccgccgaaaggaccacttgtggtggacaacgtgacgcgcgactcgtgcacattgtcatggcaaccgccggaggacgacggtggctccgaggtcaccaactatgtggttgaacgccgtgatgtgggcagccaagtttgggtgccggtcaacaactttgtggtcggcacaagcagcaccgtgccgaagctgcaggagggccacgagtatgagttccgcgtctgtgccgaaaatgcgtttggccgttccgacccgttgaacaccgattcggccgtgctggccaaggacccgtacggccggcctggcaagccgggacgtcccgagatcacggaccacgacaacaatcacatcagcatcaaatggacaccgccgacggacactggcggatcgccaatcacccattatgatgtgcaacggaaggacgcaaaaacgggccgttggatcaaggtgatcggaaagattgcgaatttaaaaaaaaaaagattaaaccgatattgaaaaacaattcaacaaaaattttttgatggtttcatcagcccaaaagaggaattgttctccgcatttattccaaagtgtttttgttaattagcctttaaaatttcatttattattcaagaaaacctggtttttcaaaatattttgtcataattttttttaattaattcgatttttgaaatttgctgggagaatgtttagggtttttagtacgacataacaccgaaaaaaaggtatgactaaaaaacagacgatttttaattttttttttcggtttgattgattttttaattaattaaaaaaacaattaggcttttttactagaaaggaaattattttctttttataaaaaaattaaaattaataatttaatattattcatattaatttcatttttcattttttttcaaaatttgggcgttttctaggtgaacacacatccggtgtacgactgcgcgtacactgacgaacgcgtacagcctggtcacggctacgagtatcggatagtcgct

SEQ ID NO: 45582 - DNA, 593 bp, Heterodera glycines
atgtctggcgttacaacttgcctccgtttcccggggcaactcaatgccgacctccgaaagttggccgtcaacatggttccgttcccgcggctccactttttcatgccaggatttgcgccgctttctgccaagggggcagctgcgtaccaagccttgtctgtgtcagaacttaccaagcaaatgttcgatgctaaaaatatgatggcagcgtgtgacccgcgtcatggccgttatttaacagtcgcggcgatgttccgcgggcgaatgtcaatgcgcgaagtggacgatcaaatgatgtcggtgcagaacaaaaattcgtcttacttcgtcgaatggataccaaataatgtgaagactgccgtatgtgacattccgccgcgcggtctcaaaatgtctgcaacttttgtcggaaattccaccgccatccaagaattattcaaacggatttcggaacaattcacgggttgttttttgcaatttttttcatttatattttaagtttttagcaatgtttcgccgtaaggcatttctccattggtacactggcgaaggaatggacgaaatggaatttaccgaagcggagtcaaacatga

SEQ ID NO: 45583 - DNA, 2046 bp, Heterodera glycines
ttctgccaggaatcccaatatggctttgtttacggcgtttcgggaccgggttggttttatttcgcctcattttttgataattttttacttttaagtggtaactgctgagaaaatgtccggtgctgcaatgtacgaactcgtcagagtcggccattctgaattggtgggcgaaatcatccgattggaaggcgactacgccacgattcaagtctacgaggagacttgtaagctcgtcaagttcgataagttcactcgtcctccgttaagcgtccgtcacaatcggtgaccccgtgctgcggacggggcagcctttgtctgttgagcttggcccgggcattatgggctccatttttgacggaatacaacggccattgcacgacatttcagaaatgaccaaatccatttacattccgaagggtaaaatttgtgattttattcccttcgaattttaatttgacattttaggggtcaatgtgaaggcattaaaccgtgcaaaacgatgggaatttatgccgaggaaagatttgcgagttggggaccacgtgacgggcggagatatcatcggaatggtgcacgaaagtgcgttggtcaagcacaaaattatggtggagccgaaggcgtgcggaacggtcaaattcatcgccccgcaaggccaatacaccgtcgaagttggcatttggacgaaatgccaaacttattgactctttccccccccccccccccctccacaaaggacaccattttggaagtcgaattcgctggacacacccaaaagcttacgatgatgcacatttggccagtcagaaacccccgcccgtccgccgaaaaattagcggccaatttccctctcctctgtgggcagcgcgtgttggacgcgctcttcccgtgtgtccagggcggcacaacggcaattcctggtaaacagttatttttgctctcattggcacttcggcgtttttctattttatattttttaaattttcaatctattttgttggtctaataaaactttgtgaaacgtgctaatagagaccgaaattttgaaatgaccagtacttggaaaagggaccgggacgggatccccccgatcccaatttttggagcggagcccgacgagacttttcaaaaacgatgaaaaaatgtaataactatttttttaacttttctccgacgatgattagggagagtaattccatatttgcagtgtaattggtcgcttttcaaatttttgctccgttagctctgtttttacccaatttccttataatttttcttccccagtcttttaatctgttgtcatttgtccgtcctttttcaggtgcctttggctgtggtaaaactgtcatttcgcagtcgttgtccaaatattccaactccgatgccattatttacgtgggctgtggcgagcgtggcaacgaaatgtcggaagtgttgcgcgactttcccgaactgacgatggaagtggatggagtgaccacgtccatcatggagaggacggcgctggtggccaacacttcgaatatgcccgtggcggcgcgtgaagcgtccatttacacgggtgggcactttgccaagactgtatttttatttttcgttaaatctcccctcccccttccgcaggaattactctggccgaatacttccgcgacatgggtctgaacgtggccatgatggccgactcgacctcccgatgggccgaggcgctccgtgagatttcgggccgtctcggggaaatgccggctgactcgggttaccccgcctatttggccgcacggctcgcttccttctacgaaagggcgggaaaagtgaaatgttttgggtcgcctgaacgcgaagggtccgtcactattgtcggcgcgtaagtgcatgtcgaccgatggcactttcccttcccttccctttgctcagagtgtcgccgcccggcggagacttcgccgaccccgtcacatcggcaaccctcggcattgtccaagtgttttggggactcgacaaaaaattggcccaacgaaagcacttcccttcaatcaattggctcatttcttacag

SEQ ID NO: 45584 - DNA, 1847 bp, Heterodera glycines
atgcactcaccactgttcggctcaatgttggacaacaaggaatattcacgtcatatcgaaaacttccgttcttctatttctccacccaaaggcatcaccaacggactccactgtcatgacttcagatctccttcggatttcgacgttttagtgaagttggcaaaagaccccgccggggtgggcaaccgcgaattgcagcaacggatggaccaggaccaacaattccgacagcaagtacgatcaaatccatcaaaactgacttttggattcatttggcagagaacgtcttttgttgatgttgtgaattttccaggttttgtgtgcaattgtcaacggtggaaaagaacgctttctgcaattgtgcatcgattgcaacggatgtttcgtcattcaggtgcatcacatttgggactgaaacagattcgttaacaatagtttcagaagttagttgagaacggttcaaaagaaaccaatcaaatgttgctcaatttggtccgtccgctcgcctttaaaatggtgctcaatcgttttgcttgtcgcattgtccagaaggtaaaaaaagacggagcaggacaaaactcagccgccgaaactcagccgaccaaaactcagccgagacataattcagccgtgaataaatttttttaaaaagaaattttcagttggttttttcaaaatttactaagaattcaaaaaatttaaaaaaaaaatcgctgaaaatttcttgaaaatttgaattatgtctcggctgagtttcggcggctgagttttggggtccaccgaaaaaaagacattattacctattgagacacgtccttgattcatacttatgcccattttgtttagctcgtcgttaatttgtccgggtcccaagtccgccaattgttctgccaacagttcaaaggacacgagaacactttggtcaccgaccaaaacgggaaccattttgtgcaatgcgtagttgaccattttgcgcccgacgtgtacggaccttttatcctcgccttggccaactgtcccacccgactgagcgccgttttcgaagttcgattgaggggagggtagtggatgagatgtatagacaattcaaagaattgggagtgaagctaaatgccgtcacgtcgatagaatcattcaccagaatattccttcgttgactgtttagttaactgattgcgtgtctttttgcagaataagtacggctgtcgtgtgatccaattcgtccttgaaaatgtcgtccaactcgtccatggcactgcgaatgccaacaacagcttggaaaagtgaattgttctttttttggcccgttatcattcgtaaagcttaagggaaatttccatccaaatattgcatgttctcattgaacccattctcaaaaatgcgtattcgttggcccaaaacgaattcgccaattacctcgtccaatttattatcaaatcgccctatctccgccgccaacgctgttacatcatcaaaactcacatcatgtaaaataaagcctaatctttcatcgctcaaaaacacaaatttcagtcgcaacgtttaccatctctcgctgcttaaatactcttcgcacgtggtcgagcaggcttttaagcacgcggaggaccgctgcaactgtttggccatgttattccgggaggtgttggaggggtacaaaccttcaacgtaattgtttttttccgaatttccatttttaccaatttattttcagtgatggaaagcagcggactgctctgtatgaaatgctgttcaatcaggtgaacctgacttattccatgaccttctgcatgggcatctcattacgtgtccctttcagtacggcaattacgtcgttcagaggatga

SEQ ID NO: 45585 - DNA, 1629 bp, Heterodera glycines
attgacattgtcgcgcgatgccaaggcggtaacaatgcgggccataccgttctggcaaatggccgcgagtatcatttccaccttttgccttccggattggcctcagaaaaggtgacccaaaaaacaaaacaaaaactaatgttgctgttgcaggtgttgaacattgtcgggaacggagtcgtcgtcaatttggacgcccttttcgaggaattggagagcaacaaaattgaggattcggcagaccgactgttcgtcagtgacagtgcccatttggtgttgcctgtgcacatcgcaacggatatcatgcgggaaaatgcgttgggacaaaactcgtaacaaacggaacattaaacatcgatcaaattatttacatttttgcagaaaactcggcaccaccaaacgtggcattggtcccgcctattcgagcaaatgcttccgcaatggcatacgactgggcgaactgctccaccaaccagagaaatttgaacaaaagttagtcgattaataaaattagttgaccttttgtcgtgtttagctatcgttcgctggtcgcccacttcaaaactcttttccctgacattgaattggacacggaaagtgacgtcaaacagttgaaggtagtttcttttttaaatttcattttgcatttgtcctttttttgttaggcccatgccgcacgtcttctccaaatgggcattgtctgcaacacaaccgttttcctgcacaaaaagcgtttggagggcaaatcgattttggtggaaggagccaacggcactctgttggacatcgactttggtcctatccaataatgttccaatttcttttaccttttcttctcaggtacctatccgttcgtcacttcgtccaattccaccgtcggcggttgcatcaccggccttggcattccgccgacagccgtccgtcgcgtcatcggcgtggtcaaagcctaccaaacgcgtgtcggctccggtccattcccgactgaactgcttgacgccgatgtatgtacttgccccaaaaattatgttaatttgatcgcattgtttgtctttccatagggacagcccagcgaagagggcaaacgtttgcaagaagttggtgctgagattggcgtgaccactcgcagaaaacggcgctgtggttggcttgacttggtgctgttgcgttattctgcaatgatcaacggattcacttcgtacgtttcacccatttattattttatatgttcatatttatagtttttttcataattttagtttggctgtaacaaaggtggacatcctggaccaatttcatgaaattaaaattgccattggttacgaattgaatggacggcaaattgagtaccctccaggtgagctgaacaaaattaacgactgtttttatgccattccaagtgtttatcttttttcagcgaccgtcgatgattgggcaaatttgtgcgtccattacaaaacctttgagggttggcagtcgccaacgaccagtgcccgtcagtgggaacagttgccggacaaatgccgtgcctatttggagttcatacaaaatcaactgggcgtacccgtcgaatacatcggagttgggaagggacgggagcagctgattgtgtgcacgaataacggagggtga

SEQ ID NO: 45586 - DNA, 1452 bp, Heterodera glycines
gggttagaaatttcaactgaaaaatgttttgtttcatattttagggaaaaataatatgaaaaaagaatattttattaactcaaaaaagatttctgagtcggataatgttcgtgacttgggcattataattgactcgaaacttaatttttcagaacacataagcaaaattgtacgaaacgcatatcttagaagctttcagattttgagagtgttgaaaagcagggaaataaagactctaacagcagcttataaaacttttgtacgacctcaattacaatacgctaccgaagtttggaaccctaatttaaaaaaagatatagacaaaattgagcgggtacaaaaatttttcacaagaaaagtttttcgaaaatgtggatttgtgtacaaaaaatatgtggaaagacttaaaatcgcgggtttacataaattagaagaaagaagaaaaattaatgatttgacaacagcttttaaaattataaaagggttcgccagcctagaggctgagcaaaatttctttttctcagaaaggcccaggaggcctttacttttacgagtaaagcgccacacggccaaaacacaaaataatttttttcataggatagtaagaaactggaataaccttccagtggtagcggtgcaaattaataaggcaaaggaattcaggggtttactaaaagcaatgagttctgagtaggaaattttctgtgtcacatatacactatattttaatcacctgtgaatttttaacatttgatttatttttattcatttttattacggtattcattttgtattttttatttgatttttatttgtttgtttttggcaccatataagagcactatgtgcctttggtttgctcgataaaattaaattaaaaattaaatttaaaaaaaccaaataaaaaaggacttttgtaaaagtttgtatctttgccaattgtcccagggtttggcaaatgatttgtggccattcagcggagtaacgtctctccaattggtccgcatgaatcagaacttttctgatggagttccccgtcatgtccttttttctgaacgcttccctcctgacccggatgcttctgaaaaattcgttcgcaatttccgcgctttccgttgacccttcgagctctttgatcaaggcatttccaatgccctggaagacgtgaaaaggcgccagaattatccggtcaaattcgattgatccatggacccaaaaaacccaggggataaattttcatgactatatattaagaaattttgcgaaccaaatggtccccccttttgtttttactttttgataaattcaaaaacgaaaacggtaactttgcatatagcgcgctttctttttagaaattaatgttttaaaattttgcaattcggcaattttttattcgattttcccccgtgccgcacttttgtcttcgctctgtccattcatttcctttgaccg

SEQ ID NO: 45587 - DNA, 1608 bp, Heterodera glycines
gataatgaaatgaataaggatcattcgataagacaacgccgtgggctaaaacaagcggattcatcagaatccaaattaccaccaaagcaaagttcaaaagctttgacaaagattattttggctgttatattctgcattgttggtgtgttcgcctttatctcttttcgctggaacaatactttcattcgtcgaaatgattctttacaaaaatcgaatcttccacttgcgtcaaatgatgatctttacaatcaggtagcaagacaaagtgacaacaaagtctgcccactaatttttaaatttcgactggaattttagctgattatttttgtttatgtatatttatttatagaccaactggagcacacacagaccgcaactttattttgggttaaagacgaaacatcctgaatccccattatttggttttatttggtatcagcagtcgaatgatacgtttattaaacaattttcaccaaggcattggtgcgaacatggtgaatatttttaataactatttaattcatctgacttttaggggataatgttaaattttcttggctcgcgcacgatggtcggacttttggccgccaagtgattgaagacaatgacttggcaatgcaagtggattggatggcaaatggcagaaagtcatggaaagtgcatctttcagcgaatagcacaaataattatgcactgctcttctatttggctttacaagacaaagcttcacattttgttttacaagaccagcagtaccgcaaatcgtcaaacaactttggctatggctttctcgacggatattctcatattcttggtcaattcgctatgaatatgaatatccaaggcgttttttcctccgaagctgtttcaaaaattgcttacaaaatgacaccgattttggatgtacgacacgtcgatgaattgattaaagtttcaattggacagactgaagggaagctcggactgcagttaacgcaaaacccagagatacctgacgaggaagcaaatttcgcagcgattcaatttgatttttcaagttggtggttttaaatattttgtaattagaataatttagagaatatccatattgaattagaaatgcttgctgaaggcgatgctaaaattgcgaatttcgatcatatttttactcgaaaattggaaacgtttagcaacaaatttgatgaaatattcccgattgatcaccaggtcgggtttcttttttcttttttacttctttttgacattattttaggaaggctctgattcatttaatcgcttgggaaaaattgcattgtccaatttactcggaggaattggagtttggcacggatattccttggtcaaaatcgacgaatccgaccatatcaactcatatggtcccctttctctcatttccgcagtgccttcaagaccatttttccctcgtggttttttatgggatgaaggtaaaacgcactcgtaacattcccaaaccaatttgttgttcttaggttttcataatttaatcattcgacattttgacccgcaacttacgcttcaggtttacttctatcgttttgcccttcccataaaaatgcgtctttttcagattttggcttcttggcttga

SEQ ID NO: 45588 - DNA, 1185 bp, Heterodera glycines
catcctcaagtgaaggccaaaggatcgacgttggacttgtccgatttgacctccgacccgttgttggcattccaacgaaagtggggcgccaaataattggcataataatgattaatttaaatttatttattttttacaattttaaacacttttttattttcattttcacaggttttacctccctttggtccttctgttctgctttctgttgcccgtggtaggtgtattcaaccaattttttcaaaacgatattattggggttttgaaaatggtcaaaacgtgtccccacgactcaatctcttggccaaaaaccaaatctagcaattttgatttgtgtgtttaaaattagaattatttataacggtaaatcttaattttttcacccacaatactcaattttcattccttttcagtttattcccgttttgttatggcatgaatcggcaagtgtggcattttacaccgcctcactgttccgctacacattcacattgcactcaacttggctgatcaacagtgtggcgcacatgtgagtgatgaaggccaatcaatgggctgatcaatagcagctacacactgatgaaactaatgatatagtcattttgatcagaggcatttgactgggtttctcgagaatttgtgccctgtgccatgagtttggtcagtcaaaaatgtgatttttaattccgttcagaacccgggagtaattttttctggctcagaaccgatcattaggtcaaataccctttgtactgctgataaatagagggatttttggattaagaaaatgtatatttattgattagtcgcgagaatttttttctttgctcttactgatcattagttggaaaatgtctacttcctctgatcattagctcactgatcatcgggggtttaagttccattctgatcaattgggatttctttcagtgttggctaccgcccctacgacgtttcgatcagttccaccgagtccgtgtggaccaccgttttggcgggcggagaaggcggccacaattaccaccacacattcccacaagactatcggacaagcgaaatgcgaacactgctcaacttcaccaaggcaccaaacaacagaaaattggcactatttacctttgccattcattttaggcattcatcgatttgtttgagaaaatcggatgggcctacgatttgcgaacg

SEQ ID NO: 45589 - DNA, 1088 bp, Heterodera glycines
atgttttttgccaagggattgcgtgccaaattcacgcctcacgttttgttggttgtcccggtgattttcgacaagttcaaggaaaagaaacagttgctcagagatgcgctggtcgaatgcatcgatgtcatcgcagcatataccgtaaaaatagataaaaaaaacccgattgaaatggatgatttaaaaaaaataaaaataatatttttagagtttcgaccacctaagcaaggccttgctcgaggctatgacctccaaacagaatccgagtcagaaatcacagacggatttgttcatctaccgcgtgttccgttctctcccggccaaagacattcccaagggtttgctgaaggatttggtggccattcttagcaaagtcaacattttgtcatgttttacccctattttttggcatttttagcatggctctgatgccgactctgaagtgagggactcctcttttgctgctttgggtgccattatgaaatgcattggggaaaaggccttgggctgtttcatttcgcctgaattggccaaagatgcgaacaaaatggccaaggtcttttcataaacttttttcaattaatttttgttttattttacttttagattgccgaaaaccgtgacaaggctttgacagactctccaaatggaccaaatgtattacctatttccctcaatttttaattattattattttcaaattcgttttaggatcgtgttgagctctttgccaatgcgaatccctcttcacgtcctgttgctgactcggcaaaaaagagagatgcgtccacttcgcggctcaaccaaacaatcaactcaactgcggacgatccaaatgcgacaaaaagggctcggtctgctagcgggtaaatgaaaaatcgtacaattttcatttttgctctttattttttagccgtcgtcgttcggttgctgtcctccccaacaattcaatgctcaatgacaacaccgatgagggcaatccgcgtgccccgcgccggtcacattttgttggcagtggtggactttcctcagccgtttcgtactcatccaacttgaacaccacgatgacacttcaatcgcaaaat

SEQ ID NO: 45590 - DNA, 3616 bp, Heterodera glycines
atgattggattgctcactcgctacgcccgcactcagttcacttcaccgtttaagaactcagaaacaaacaacgaacagaaggaactgtacagcagcggggaagagagcgaagagaaagacggcggaagacaggtaattaaatatgagcaaattaatggtctaatacgttttccattaacgagaaaaggtggggggtgtagaaaaatatacttaaaacgaacctagattttttaaagaaaacaaaggatattgtttaagttccaaaatgagcaaatgcatttggaccccgactacaatttgctaattgcctccgttcgtccgttgcttcaaagtcgcaatccggcagtggtcatggtgaagctgattagttcatttgagtttctttattgcttcctttcccattaggctgttgcccagcttttctttcacattgctccccatgcccaactcgtcgccgttccgcgtgcgttggttcgcctcctccgcggccctaccgaagttcagtacgtcgttctcgtgaacatcgcgacaatttgcgcaacgcgtcaagcggaagagctttttgcgattaataaggtgagttttttaatttaaaatgtattcaaaaatctttttcttttagaaccttttccagccctttttgaagagttttttcgttcgtaattccgacacaattcatgtgaagagaatgaagctgtacgttctgtccagtttagtgaccgaagcgaatgttcagttggtcgttcgggaattgcaggcatttcatttagtgccacaaatgcttggccaactcctcttaattgttaggcctatctccaaatgacagacattgccgagacggccatcgacacaattggacgttgtgctttggcagttccctccgcttctgaaacatgtttgagttgtctgattcggcttatttcaacgagtggcaacgatcaaattgtaatttttatttatttttaaaataccctgtccattattttttataattgttacaacataaggtttgtgcttccgtcgttgtccttaaacggcttcttcacgctgatgccccaatgggactgttgaagaaaatgttccatttgattaataccgtcaaagtaagaatcagctgaatttgcatgccatttttacctaaaaattcatggaaattcatttgatacaatatttaggctccaatggctcgttcatgcattctctggttggtcggcacacacattgacaaagtgccgaaattggcacccgatttattgcgaattgttgcgaaaaccttttgcgaagaagctgattttgtcaaggtgatttaaaatagtattgttagtaactttatttcaacttcgttcccaatttagctccaggcattgaatttggctgtccgaatttgggcgattgattccgaaaaccgcgaaggaaaatgtgctctgctcatcaaatatgtgttccaactcgcccgctacgaccgttcttatgacatccgagacagatgccgttttctgcgcaattttttgtttgacaaagaccaaaattcagtgagtttttaaatttctcatataaatgttaaattaaaatattttatttattttcagttaaaatttcctttggacattttcctgcaagaacgtcctgcgcctgctgtgaataattctttcactgatcgggctgagcatttccaattgggcactctttctcacctgctcaaccaggcgaaaattatgattattagcttacactgatagaatccattcatttatttggtttattaattagttttttttcaacctttagaaatgcaatggttacactgaacttcctgactttccgtcggaacagcccgacccaaccattcgacgttcggcataccctttgccaagcgacggtatcgtacaaggaacggaaattgcaatggacgaagcggaggaggaggaggaggaagactcattggatgaagaggaaagtgaagaggacgaggaagacgaagatgaggaagaagacgaggaggaggaagaagaggaggaggagagcgagggagaaaaagtaccggatggtgggtttttgaattttaaaaataaaaaaagaaatgggcaaagaaaaactttttccgtaacaatcccatgtcactcattcacaaccaatcagtaataatcatttctacgtgaattgttgtaataatattcctgtctgccgtcgtcttcgaccgttggctgtttcattgctgcagggtgcggaaaattgtgcacgtttctgaaacaaagggacaaataattcattttggaattcattgagactgacctggcattgtagaaaacgatgtctccgtcagtttgtaccggatttcggaatgatcgtcggatcaccctaagggcgtagaacaccaccaaagcggagcagcagaggacgattaccaggaaggaaacgaccaaaatccacctgattaattgttgaggcattggacaactttttctatctatcgttgttttaattcttctctctctgaatgcttttacatcatcggaacgagaacagacgtgagcagtcgcgtgtcgaagggcaaacacgcgtaatgcgcattggccgagtcgccacaattgtccacgtaaacgcactgcgaagatgcggagcatgaacgagcacctccaaaagaaacgcaattcaaaaaaacaaaacaaaaatttgacggcttacaatagtcggcactttcgtaacaggacaacttgtcagaatagacaatgtttcccattttgatgactaataaacaaaggaaaatgtccgaaaatgggttaaaatttaagtgatttcattttcgccacgcctcgaacgcccgaaccggttctgtcttcgcacatacagttcaaaaaagggaaaaaattaaacttttgaaaaggtgatagtaaacaattcggcgagaaagaatgcacatatcaaattgattttatgaattcaagtcgaattaacgctttttttaaaaattaaaaaaagccatgaacagtctttttgactttggcggcaagttcaaaataaatttccattcatttttgaaggagggggagggattgggggacagtcgaaaaaactaatatatctcaagaaaaaattacatcaaatatatttgaaacagaaaaattaatgaatgttttgattgatacatcaacagcaacagattggaatgttagaatggttgcacttttggtttgattaattggcttaattcgtcacatgtattcgtaacttcaaacaattgaaaagggaactgacaaatgaggaaatgaaatggaaacatttgtcgcaatatttaccaacatcgaaaacatcaaataaaatttaacaacaaattacattttttaagtcataataagtccattaagatgaagatgcaaagttgaaaagtcgtcagtttgacattgaagcgatttcaacaaattcgacgacgactcgcgaagatgccatttccgaagaacaaaaagccgaatcgcagcccctagtggctaagaacgcttcgaaaaacgatggacagaaagaattacggtccgagcatttgcttctcttggacatcgattttgcacaaacaacggcacaaagtccgaatgaggagggcgaggacaaaatgaaggactaa

SEQ ID NO: 45591 - DNA, 2999 bp, Heterodera glycines
atgccccaaattttgccgccgattttgttggcgcatttccccccaaaatccaaccccgattccacaactattccgactgacaacatccaaaaagcaccaagaaagcagcagcagcagttgcagctaatttgctgtgatcattttgggtcatcccttccctttctcctccataaggtgctgtgtaatgatgcatttggaaatgtgtgattttcatttattcggatcggataaatttctaattatcatttctattcggcagcacaatttctgaaaatgttttatttattacttaaataaaataatttttttaactctttatgcaaaatagatgatcagaattattcataagttaaaaaaaatcccattagcacttatctaaatcattttaataaaaaaaaagaaaaagttaacaaaccctaccttagcaacggtaaattttttattcgttttttcaaacttttattttaattattacatcaattaaatttgttcctttaaattccattttaaaaagggaaagttatgctaacacatctattcatccttgtattgtgcttgttcacttcaattcttggccaagctgcacatcggccataccaatatgaatatcaacagcagcccaatgaacagtcacagcggactgttgttatgcgattggaaccggtaaaaattgtaaattaattaatataatttcttaattgttttagcttccggcaaagccaacatttatgcggcaggcggatccgcctcgtgccgtgccgcaagcggccacacgacatttgccatcaccagcgaagcaatcggcaccaatcgatgttgctgcgatggctgaacgctcttcagttccgccatcatctgcaactgtaataaaactgattattaaaatttagaaatttttaaaatttttaattgatcatttaaaaaatacccattaaaacttttaaatttattaattaattgcatccaaattcttaagaatggaaaaaatgactttttgaacattaattaattttttaattgttttgactgattgatggccctatttaaattaaaatcagataaattttaacttttttctagcattttacaagtcctgaaatatgaaataattgttgaaaattattatattttaaaacaatttggtggctaattattatatttgttgtcatttcccgattggcttttcattagcattaagtcctaaataattaattaattgcatccaaattcttaagaatggtcaacaagctgtgtcaacatcaaatccaattgcagcattacagcctgtgttaccattgaatccagtacaacagaaattcaacccgcgtgaagacgcaacgccaccgcccgcgccaccgagtaaaaattaatttaaaatatttttataatttaaaattaagtgaatattccgaccgatgtgcaaaatcaactgatcaaattccttggccttgactcatttggtaaaagtgttcatattgtatgataaattcatatgatagtggttgggaatgatttcctgaacggatttttattttctaatttaatttaattattttttgcaattttcaaggaattcctggccttacgggaaatcatccggagggatttgcgggtgctgtcaaggaacttcgttcagccggcattccagttcagggaataccgttagagcatattggaggacaaacagttcatgccccgcaggtcattaaaatgttttataaagcgatttgttgtatttatttttatattttattgtgttaattatttaagttttttgtcgttcagaatgaagcacttgtccaagcgaatccgaaatttggcaacgaattgaacacgttcattgaaagtgccaaagcaccattcaacccatctggcagcagtgctccgtgagcgtccgcccatttattattaattaaacaaaattcaattgttttttttcagcttgccagatgctaaaccgggcgagaatgggttgatcggtttattaagcagctcagtgcgaaaaattgtcaaagatagtgagtatattaaagtttgatgggtccaattaacatattcactttgactttttaacttaatcattttattaattaataacgaaaattcaggtccaatagagcaagaaaaaataaagtaaaaataaattatttaacgactcattgccgtaattcaaattaattaccccataaaattggtggatatcaatgaacataatgaaaatataaaatttaattaagttggcatggctgatgcttaataaagaaaaaaattattcaatgaccataaatctgaatatgtaattttttttaattggttctaaaatcctaattaagcactccataaaattgatggagctcattaaattaaaatcaaaaatcattagaacataatgaaaataaaacatttaattaagctggcatggctgatgctttgtctaactcattgccaaatttgcttggcacaaacactggcccaaatggggctgctgacactaaatccatcgcttcggcacttgccaatgccgccgagtcagtttcatcctccgctggcacaagcagcagttcatctgctgctggtggtggtggtgcttcatccaccagtgggaatggtaaattaaatatccaaaaaactaattttttttttaaatcaatttaatttatttcaaggaattcgtcgccaacaatcgcctgcagagcgtgccattgccggtttcgcttccgcattgggtggcggcggcaatgccaatgggccagcccatgctggattacctagaattcctggtaatgaataatgcattattatgattcattaaaattcggtgcgatcggaaatcttaataattttttttttgttttggttctcgaatttttaattataacgaaatttgtttaaaaaatttatgaaatttttctttaatcttgccttttaaggtatcccaattttacccggaggcattccacgcaattctcaaggccaaattgacgttgtccagcttattg

SEQ ID NO: 45592 - DNA, 1178 bp, Heterodera glycines
acaaagtcacacaaaaggccgccgtcttagaattaaaaccatctgaagaacacctaagaacggaaaaaggcgaagaaagtacgaaaaatgaggatgaaatacacaccgaagaagcggaagaaaatgaggaaaagggaagcgaagcctcggaaagagagggaccaaaatcggaggaatgttcggtggatgagaaagactccgacgaagaggagaaagagcggttatacgaagaacaaatggaaaaggaaaagcaaaagagtaagacatttgctttggaaggaaattagggctctaatgcactttatgagtccaatcgacttttatgagtccgatttaacttttatgagtccaatcgattgacaatcccgggtttttacacaataactttgttcatgttcgaacaaatcctatctttttggtatcattcgaaagcacaaagtctaattaatgtaataatacgataaaactaaagaattctaacatttcaagaaagttacaggcgaaaataatcagcaattacttaattaatcaaatcttttttagcaattgccttaacgatatggttttatatattttagcttcgttagactttgtgttttcgaatgatatcaaaaagatcggtttagctcgaacctaaacaaagttattgtataaaaacccgggattgtcaattgattggactcataaactgcattagagccaatttcctattttcaggattgaagtcattctgaacgtgaatcattcggtcgacatcgaagaggacgaggagtacgaagacgagccacaagcagaaatggagccagaggtttctattttttttttgttttgcttgggtctaagtttcatgtttgatttgacctgaattttcttggaaaatccccaagtgttgcctgtatagtccaattttgggctgggtgtttgaatttgtttaaaagaagctacttacaattagtacttaaaaaatctaattgataataaacccaggcataagtcgaactctgattttcaatatgatccattcattttcagtctgtgcccgtctcgttgccacacttcaccattaggtgttttttcaattccgtttttacaaaacaaatgcattatttttagcatcacaaaaaacaaccagagtatgttcttcgctcttgaaatggtgaagacggaggacggcggat

SEQ ID NO: 45593 - DNA, 1174 bp, Heterodera glycines
gcaatcgtcccctttgacgttgaatatcaacagctaaaaaagaccaacaccccggcaaagctttacgagttcaaactcgacatgttccaaagccaggcactcaaatgcctggacaatcaacagtctgtgctggtctcggctcacacatcggccgggaaaactgttgttgccctgtgggtttattaaactataactttttatcaatcatttcgtttcgggtggtgaatcgttgagttacttttttttaattgtcgtcctttttcagctacgcaattgccatggcattgcgggacaaacagcgagtgatttacacgtccccaatcaaagcattgagcaaccaaaagtaccgtgaacttgttgaagagttcgaagacgttggccttgtcaccggggatgtgacactgaacccaaatgcatcatgtgttgtgatgaccaccgaaatactgcgttcaatgctttaccgaggctgtgaaattgtgagagaagtcggctgggtgatctttgatgagattcattacatgcgcgacaaaggtaagcaaaagaaacccaaagattcattttcatcggattgggaccttggaactcgtcgatgttttaatattctaataattcagttcttttctatcgtttcgtttttagaacgtggcgtcgtctgggaagaaactctcattttattgcccaaaaccaccaatttggtgtttctttctgcaactattccaaatgccaagcaattcacaggttggctttacatttagttagttttcttttttggaattcaaactttcagaatggatttgctatttgcagcacaaacagtgcaacatcatttacacggactatcggcctgttcccctccaacatttggtttattctgccgggtcggacggtctttgggaagttgtgaacataaaggcaaggaaaaatgtttaaaatttacagccaaacattttgtgcattttcagggcgagtttaaacaggacaactttgccaaggcgatgagctgtttggaggagcgccaaccgatgggcggcgaagtgcggcctcagcacggacggcggagtggcgcgaacgacgcgacgcagaagagcaacgttgtgaaaatcattagaaccattcgagagcgagacatgttgccatgcattatcttttcattcagccgaaaggagtgcgaggc

SEQ ID NO: 45594 - DNA, 923 bp, Heterodera glycines
atgcatttccttaccggcaatgagcaatccttcgattctgagggtcaagaggctttgcttgactcggcacttaaagtggtgaaaaatgagtccttcgagatgaaacgagcgttggatcggaacgaactgatggaagggctgaaacacgccgcacaaatgctttgcgaactgcggacatctcttctgactccgaagttctattaccgattgtgtgagtcgaaattgaaaaaggaaaacccacggggcgtacagtcaccgcctttttggcaattgcttcgttaagacatcgacgtcaccaatgagcttcaacatttcctaatttatctgagcgaccgatatttgggtgaagagcggaagtattcagttgcggagctttacgaaactgtccaatacacggggaacatcattccgaggctgtgagtttggttgggaagggaagagaagggtaaaagggctcgatactcgataatcagcgattgtttgttcttaggtatttgcttatcaccgttggcacaacgtacataaagtcgggcgagtcttcgaccagcaacattctcaatgacctcgtcagtgcccccccatggctttgctgggggtttttgttttaccattcgcttttctgttttgtttcttctgttggaccctgtccgtcccttatttcaaccaattcccattttcaggtcgaaatgtgccgtggtgttcagcatcccctgcggggtcttttcctccgcaattatctcctcacttccaccaaggaattgctgcccgacattcccagcacttcgtctgaaaaatccgctcaaaattttgctgcatcggaagaagaagaagagcaaagtttgggcacgcaaataaatgggggaacggtgcgcgacacaatcgaatttatcatgacgaactttgcggagatgaacaaattgtgg

SEQ ID NO: 45595 - DNA, 1061 bp, Heterodera glycines
atgacatttcataaaatcgacaatgactccgtgaactcaatcaccaatgcgctggactttttccgcattccgccgacaaatgtcagcgtctcttcatcaaaggtgtttgaactgcttcccagcaaccctctgacggacaccccctaccatttcaaacttcattcaagtcaaaattacattgacctctccaaatgctatttgctcaccgagttccgaatccggaaggaaaatgcgaatggtcaacttatggacctgaccattgacgacgaaaacattgcgccaatccagatgattgggcaaacattcatccgaaacatcaaaatgagcatcaacgggcgtgaagtgttcaacgcaaatgcactgatggcctacaaaacctatttttcacatgaactctcctactcaacaactgcaaaggactcgcacttgaatgctgcaggctattaccgggatacgggcgagacactggagacggggccgggctgcattcaacgcagggatttgtttgccgaaagcaaaacagcccaatttattgccaaaattgataccgacctattcaaccagccgctgtacttgattaacttttgtgaattggatgtcgaaattttgccaaatgacaacgattttgtgctaattgcacccgccatcggcggtgttgttcctcgttaccgtttcgaggtgatggggctcaaaatgtatgtgaagaaggtgtcattaatggacggattagcgctggacattgcgcgaaagcttgagataaagcctgcacgttatgcagtaaggaaaactatgatgaaatcgatgttcatcagtcagggtcggttcgagtttaccgccaatctgttcatggaccaaattccccgccgcatcacaatggggcttgtttcaaatgccgactattcgggcacaatcacgcggagcccgttcaattttcaaccgtttaatgtgcgggaaattgcgatcatcgccaacggccgttcctacccccaggccccttacgatttggactacccgcatggcaaatatgtgcgcaatgtcaacgatatgaatgaggcggtcgg

SEQ ID NO: 45596 - DNA, 588 bp, Heterodera glycines
atgactttttcccactgcattgctacaccagtgcttttcatcatgtttgccattttgtctggacaatccggcgaaaccttttcgttccaagcggagatgcccctgatcatcaacacctactcgaacaaggttttaaaatgggaaatgctctgggagtctaattaacccgtaaagtctaatctaatcagtttttaaaatcttaatctggtttaggaaatcttcctccgcgagctgatctccgactcatctgacgctctggacaagatccactaccaggctctgaccgacccttctcagatggagagtggcaaagagctcttcatcaaaatcgtgccgaacaaagccgacctcgtcaacaaccacaaacccggaactgaggcgttcattgaggctcttcaggttttgttttttcgtttggtcaacccctaatccctaaaaaacacttttgttggtaatttttaagttgtggaaaaacaacccgggattttcggcccttctgatcacgaatatgatatcagatttgcaaaaatgatttattttatcattgtctggtttttttgagaccttagatttgaaattttgattaaa

SEQ ID NO: 45597 - DNA, 625 bp, Heterodera glycines
atggcgcaacttccaccagaggacgtcgcaacaatgcccacgcagaaggtcgtcttcaacgccccgttcgacaacaaggccacctactacatgcgggtgcgtttggcgtggtgcacgtggcatgcggaataacccccccccccctttttcaggtgatcaaccctgggacgaagcgcatcggctacgccttcaagaccaccaaaccgaagcgcatcaacatgaacccgccgaacggagtgctcggcccaaaggagtccgtcaacgtggccgtctcctgcgacgccttcgaccccggcagcgaggacaccaagggcgaccgtgtgaccgtggagtggaccaacacgccggacccagccgccaccgcgttcaagctcgagtggttccagggagacgggatggtgcgccgcaagaacttgccgatcgagtacaacgtctgatggaaggatgcttcgtcacctcaacatggacatgataggatcccacccacccaccgtcccaaaattgtcattttgtcccccatcatgtaaattgttgtatctgtatgtaaatttctgtgatcatcacttcaaatgaatgtatatttaattgttgcctatgtaattgtattgttgttgtgcttaataaa

SEQ ID NO: 45598 - DNA, 622 bp, Heterodera glycines
atggcgcaacttccaccagaggacgtcgcaacaatgcccacgcagaaggtcgtcttcaacgccccgttcgacaacaaggccacctactacatgcgggtgcgtttggcgtggtgcacgtggcatgcggaataaccccccccccttttcaggtgatcaaccctgggacgaagcgcatcggctacgccttcaagaccaccaaaccgaagcgcatcaacatgaacccgccgaacggagtgctcggcccaaaggagtccgtcaacgtggccgtctcctgcgacgccttcgaccccggcagcgaggacaccaagggcgaccgtgtgaccgtggagtggaccaacacgccggacccagccgccaccgcgttcaagctcgagtggttccagggagacgggatggtgcgccgcaagaacttgccgatcgagtacaacgtctgatggaaggatgcttcgtcacctcaacatggacatgataggatcccacccacccaccgtcccaaaattgtcattttgtcccccatcatgtaaattgttgtatctgtatgtaaatttctgtgatcatcacttcaaatgaatgtatatttaattgttgcctatgtaattgtattgttgttgtgcttaataaa

SEQ ID NO: 45599 - DNA, 3760 bp, Heterodera glycines
taatagaataaattaacaaaataaaagtttatatgactatagtaattaagactaattaggactgattggcacttttcccttttcagcattgttttcgtcgatgcattcacttggcttcggtggcattttcaatgcgaccgtccctatgagctttcttttacgtcttctattaattcctccgatggaattgtaattaattagttttatttattttttattttttaaaatttcccctcagattgatcatttctctcgcatttgcttcgtccgtccttttccttttgctttgctaaattttcgatttgcaattctttcgccctttactgcttttaatctgtttggaatctcaacaattggaaatgaattcacaaatgtttttctcgttgtcagttttatttattattttatttcttttttatttctttttttagaatgcaatttgcgttgagtcatcgcctaaatttgcgccctcttttcatgtcaaattaattgaccaacacattaactcatttccttttgagtgtccattggagcctgaagaggaactcaacaacttttttagagagccaaagttttatttgccactttttaaatgcttttttcttttatttaggttgctttatgatggcgatttatttaatgtatcatcaaatccgaggaattgccgcatttacaaagtgaaaatttcgccatttgaaaattccaatgaatattaattatttaattgaccttcctaattgacatattttcccattaatccgtccccaattaggcttcttttcctccgtcttcttcttcttttgcttcttcagctgctcattttgttcaacgcgacttctcctcctgttttgaggacctttccccgttttctttccacggccgtttcccccaacattcaaatttggcactccatcactttttgccctttcctataagggaattggcacataaattggcaaaaatatttttgcaattgctcagaaatgaaaatgaaaggtaaaataaacgcaaaatgattaaatatattaattattaagcaaaattaacccattagttttgttccaatcgaacttcgaagcggccaaattggccatggaaaggctttgctgccaattggatgttcgactgataagcattgattgtttcgaattcttattaagtgaaaaagaaggccaaaatgacgaaaaaatgttgaaaaatttagcgatggtttttttctcaaaaattaatttgaaaatcacttacaattttcagttcaaaatttcgcgccttgtgtttgttgggttcgcaattccgaagttctgttttcggatgaaatgtcgacacaacgccaaggcacgcgccatttttaaactaaaaaacagaaaataaaatgtttctattttttaacagatttgttcgatgctttggttcggtgcttaaatgctgccaaatgttcctcttcttctgctaatcgctggccttccgttttctttttgaacatttcgccactgtttaacacgagcgaagtgccggaacgtcttgcgaaagcattccattgggaatttcggcttgaagagggcgacgaacgaatgggtgcggaagagagggcggaatatgcggaatgggcactcaaaaacggaccaattgagtggacagacacccaattagtgaacaaaattgttgaaatttcaaaggtaatttgtgacagatgggggggggggaggcagagaagtgatgtgatcagtgaacagaatgagtgcacatgatcaaatcactgatacagggggtcaacaagatcagttgcaaggaattgattgttttgttgtcagaaggactggatggatcattaataaggggtggaccttactactgatcggtaagactagaatgatcagaagaagtggacagatcactgatcatgcgaagtgcggtcgcttattggaaggaatcggtgatcagttgtcatgaatatgatcattatcagagttgatgactggatcaatgatcataagtttagaaataacttactcttaaataagtcattaaaaataaattatgtatttcacgtttattttccatttaccagagcttctctctgtcgcaattgatcaaattgtttgatgatgccaaatgcgttgccattggtgagcatgatcgccattcgttcacagttgccaattcacctcgccttggcattggccattttgaattggcactcaaacggtgggaatccgcttcgaaaagggccggtggctattccgacgtgcaaatggacgacattgggggattggaagaggcgaaggaattactatccgaagcattggccgaattggtggaaaaggatttggccagccaaagcagctgctaatttacacaaattaaggtcgaagagcgaaaatggtcagcaggcgaagaaaatgcaagtcgtctccgacgacggaccggcattttgctgtatggccccccggggtgcgggaaaacgatgttggcaaaaggtgggcaaaacaacgaaaaatggccaaaacgtgcttaaagccgtggccaaccaagcgggactcagttttgtcagcgtgaaggggcccgaattgctgagccaatttgtgggggaaagcgagcgcaatttgcgcgaagtgttctctaaagcgaagcgtactgccccgtcggtgctgttttttgatgagttggactcattagtgcccgcgcgaggggccaattcggactcgggcggggtgatggacaggtgggcaaattgtgatggaaaagaagcggctaatgcaaggatgttcgaattggcaccatagtggaactttaaaagcaattagcttaattattgctatttatttaaatttcgtttaatccgatccccctcatcccccaatccctccccctttctttccttagaatggtctctcagtttttgactgaactcgattcgtgccattggactcgcaacaaagctgtgttcattatgggcgcaacaaatcgcccggatctgcttgacccgtgccttctttccccgggacggttgtccttcaaatttgccgtttggaagtgcatgttggcttttttcagcttcgacaaactcgtccccatcaatccggcaaatgatccaatcgccaaagagcgcattttgcgctcactttgcaagaaaattaaattggaagatggactaagcatcacagaaattgtaaaataaactaaaaagaccccatttcacaaaacgattatttgtttaaggcgaagaaatgccccgaagcgatgtccggggctgaattggccggtttggtcaccgtaaattggggatcccagcagatgtgataatgttttatcatttggcagtggcttttttaataaagtttttgaaattttgaagctttttgtaaagcaattgtcattttttgatcaaaaagcatagaaatttttattttcctttatttcggcctaaaaacatcacaattagacattttagacgaaatctttaagaagactcataaacaacaaatttttgaaaaatgaaagcaaaaaattgttgaggattgaaacagtgtgaaaaaaaggataataataattaatcgtttttactgtttttgaggcttttttggcaccaaaagacttattttcgaattttcatctgtgagtcgagcttttaaggtatttgtgtttcggcgcctcctgttattatcacatggaatcggtgataggcaaaacgccgaacgaacagaaggacaaacggacggaacttttgcagagagtgcggatgtttttggaggataccatc

SEQ ID NO: 45600 - DNA, 1418 bp, Heterodera glycines
caaatgaatttggcactttttgtcgcaatttgtcaattcctgcttctgttttttggcacttttcctcccacaaatggcactatttctacggcattttcacaatttctacgaattacttcaatgatgaggtggagaagaacattgcacgcagagatttgggcactgacggaagttttggcggtggaaaagggcgaattaaggcaaagtatgtaaattataaattaattaattttttttcaaaattaaattcaataattagcctattgaagccaatttcaaatttttaagaaaacgtcctgtaatttttgtgcacggcttaacaaatttagcgggagagttggactacgttcggcgactgttccgcgaaaaaggcggctaccgtgacagcgaattgtacgcgaccacttacggttacggtatgaagggatggaaatggctacgtgatgcaatgaaatgtgatcatgtgaaaatggtgtctgtctaaatacgcattaaaatagttaaattaatgacagtttaattttaaaataaaaatatattaatttaaataataaaaattaatttgtattttgatcattttattcgtcgaaataaataattattaaatttattttattcgatttattccttgaaaacaattacctcagtaggtgtctaatgaaggcattataataaaataattaaattaatcacagtttaattttaaaaataaaaatttaattaactaattaaaaaattaatattttattttaatcgatttttctcttcgaaaataattaccacacaattcagattcgcataatgattcgtgcaatcacacaatttactcattcatctcaagtggatattattggctacagtatgggacgaagaacaattgggcccaccattaacccatttggtgcatacattcatcggcgttggcggtgccaaccgtgaagctgtccatttgtgccgactttttgagtgggcaatgccgtgcaatcctgtcaatggcatgcgatgccattcccaatttttagatgacattaattcaaagtaggaattttcattttagaaaactattttttaaatttacataagccgaaaaaatcggcaggatttattattaaaaacccaaatagggccacaaaattgagaaaatttaaatttaaaatattttaaattaaagggttggttatgaggcaaccacacgaattttcgtcattcggtcaatggacgacggaacggtggggacaagggattgtgaagggcgttcagtgagcgcaattgatggacaaaatgacgaaattgtggtaaatattaataataatttaaataattaaaaattatttgtgtttattcagctgcggaactacagccatcagatggtaatttttggaactggagaacaacagctcaaacttttaacattttga

SEQ ID NO: 45601 - DNA, 5597 bp, Heterodera glycines
tctcatggccaaaacccctccgcctgcggactttcgctcgctcgtctctatcgaacgggtcgcatatttgctgttcttttcgctgtacggccgatatttgagtgttggcaagtttcacaatgttttcaatcgcgagtttttcaaatacacaagtgccggagattcggagagagtcgctttccttaaggtgccatcgccaatttatgggaagggacagcaaataatatccatctttcagatttgtcgaataactttcgaggaatacaagcgaagagtaattgaacacaacaaacgggcctacaaactctcacaaaagcatctgttcagcgatgggcgggcgagtcccgacagtcggtgggacaaagcgcgagtgacttgtctgattttgctgtttaaggttaagcgatcgaccaagcatagaaagcgaggacgtgaacagcaccgactcgctggctaaaggtcggaaaggatcgccatcgcctctttttggccctgactactaacaagggaaccacccgaactaaaaattcacaatagaagtcgaccctgctctatccaatgataccaaacaaatttatatacgttttccgagttacagttcgggtggttcccttgtaagtcgttcaataaaaatgaattattttccttccttccaaaaattattagtaaaaataaaaggtaataataaagtttattcccttcccttcgaaaaatttttagaaacgaagtgaaagacattattgcttcaataaaaatcattcaaactaatcattcaaaactattagactaaaatgaaatcgaagtatttgagtttttgactttacgaatttcggtccggggttcggaattggttgaaatggatccccgaaaaacacttggaaatatgtttccagcctcatctttatgaaacgacttagtaattgcctcttttagttcaaattggcgttttctcctttccgtttagaattgatgtttttccgttttccccacactcccgttcggtttggccgtggtggaagaataatttacgtggacccaacccgctcagttagcactgtctgtattgaagacctgaagcgtttcattaaagatgctgaaggacggagatacgtcgaaattttggaaagttttaaaggttggcttttgccttttcaatgtcggcctaattttcactgtttccacaggccctttgcttgtcggtcacactccgtctcaaacgccgctgctattcatccaatgccaaatcaatcggctcctccaatcggatgtttaccgtgccaatccctcttccggtgatgccaatgattgtctgctcatttggagtctgctcgaaatgctcattcgccaacacggagtgcgcttttctcgatttgttcatttcgatccttacaattaattttcgtgcaaactgtataatacttgtggccgtttaatatatggataattccagaaagtgactggccctgaccttgctcgtctgctttgttccaatcagccaaatcatttggccgctctccgaaaaaactttctcaaaactgacgctgactttgtgcggagttcttctgccatttctcgccaagactctgctgatgctgaaccatcccttgacatttccgccattgaacgaatgacacattttttgcttggcggtcacattgacgtatttcttaccattttttgccaatttatttttctctccaggaagccattgacagtgccatcagcgacggacttctattcgacgcgcttttgctggcccatcgtttgtttcgcgacgacaaggaccgtttggaagcggttgaggggcgtttgatggcttataggtcgcccgatcatccgatcaccaccctgttgagcgtcgcagccgatcagcccgtccctttactggttggttttgcgtttcttacggaacctttcttttccaacttgacatttcccttcagaccaatccaacttcatatgaaaccaacggttggcgttcgcacattgcaattgttcttgccaacttacaaagtccgactgcgatgaacgccgtttatcagcttggcctggctttggcacaaaaggaattcaattcggcagctgatttctgttttcttgcagtaaatttgttgtacggattcgattgcttccaagaacaacaatcgtaaatttgaactcattcacctgtcattttttctttattttgactggaagtgatgaaaatcaccgccgtacaattcgtctgatcagcgccactttgcctgacgatggggcaaattcattccttacgcgttttgggttcgattgatcttttgcggaacacattgttcttttcagctggtctattttggattatcaggcgaccgaactgttcgatttcgccctgcaattagccaacccaaacagtcccactttgttgtccaaatcccattattatgcaaaggttcgtcttcaatacgcgcaattgttggatgaattgggcggattcaaacatgcggttgagctctatcgactcggtaggatttacttattttgttgctccaaagaaggaattggtgtggagtgttagttcggactacattcattttctgataaatttcagagaattccaaccattcgaagacaccgtcgcctcctccactcgttccttctgttcacaaaaccaaattagctcatctcaaaaggcaggaccatgagccaacacctgccgttgctcctgctccacctacttttctaccagtgcagttgcagtcggcatccaaagaggaccatgcgccaaccccttttgccgttgctcctgcttcacatactttccaaccagtgcagtcggcctccacgcagggccaagagccaacggcttttgcagttgctcctgcttcacaaactttcctaccagtgcagttgcagtcggcctccaaaccggaccatgagccaaccccttttgccgttgctcctgttccacatactttccaaccagtgcagtcggcctccagtcaagaccacgagccaacactttttgctgatgcccctgttccacatactttacaatcagttcagtcggcctccatgcaggaccaagagccaatggtttttgccgttccttctgctccacatactactttcctaccggttcagtcggcctcaaaaggaattccggatcactctgttcgttcgcccaacagttttgacggtgagacggcattttgggtggatagataacatacatgaaaaaagagagggcgggggggggggggtcagaaacttgcctttaggaaatacccccctcctgtctacctatgatagataagcagcctttagataggcccgtatagaaacatttgaaaccaatagttcggcagtgcggacatgctcctcctgagaaattttgttggatcttttgttgagaaaatttctccaaatttttacaaattgtcagattgagagtaacccccccccctcccaaccgccctggtaataagccgtttggctttttttctcacaaccaattttttgttatttaagatcactatgaatataagcaccgcccttcgaggagtccgtccccgtcctccgctgccattttgacacattcttccaatgtctcttctaatcataaatttgtggaagattccaaaaagagcgaaagtggtggtggtggcggaaaaggatttcttcgcggctttctctcgaagattaaagcgcctatggagtctaaagaaatgaaactgccgaaggacaataacccgaaggtattattgaatcggtcgatttgaccaacctttccgaaattggtaaaatgcttttgctttgactgctatttcggtgttcagattgtgtgggactcgcagttgggccgttacgtcgaccaggaacaagaacagcaaccacaagaggagctcgcgccccctcctatcatgccgacatatcagccgcaacagtggcaacaaataacccaaccagcggagcagcagcaaccgccaacagcgccgtctgttggccgtgctttccaaggagtaaaagtcggtcgaacgccaaccaaatttatttgttattttagaagtcgagatatgccaatgcatggaattcgtaaaacgcataagaataaagcagttgttgtgattaattgactttctcttagtttctaacggatttacagtcattgtgaataaataagaatcaaaactttttcgctacaatgtgatttttaattcatgggaagatgataaatttctggcataattattgcatttttttatctcgaatagacatttactcatcttggctgaaatgcacgaccgtaacatttttaaactttgcccgcctaattatgaactccttgcaaggaaataccacgatttcagagtcaaatgttttattggggcgggtggaaaggtaactatcgaaaatgtcctcatttttgctctgcatattttggtgtctttttaggtttgtgtgaatttcgcagatgctgagtccgtgcgtttgttgtcccaaattttgctgattgaatacttccaattgaatgtccaacttccaattggtcatctcgtgccgcgcgtccctcagcgattaaattacattttattagtggaggatttgatttgcaaaaataacttcgatacttccaacgtttgggggtttgacattggtactaatctctctctgactcggataacttaataatttctgggacgggtgcttcgtgcatatttccgcttttgggggcacgtctcaatggatggaattttgtggcgacagaagtggacgcgaattcattcgcttacgcagcacagaacgtcgaccgaaacaatttgaaaggacggattttagtggagcaaacggagggaaattcgcttctgaaagttattgtgtgtcttattttagtgatcgggtaattcggttcaggaagtgatgtcgaagggaccgcacaaagacaaaaagtttactttttctatgtgtaacccgccattttttgaccccgacgaagccacgcaagttagtcataattggtataatccaattgcccacttaatcaagaaatttaccgtcaattccgctgggaatacaatgacaaatttgttagttagcgatcacaacaaccccccaggcaaatgcccgccccattctgccaccactgcaacgcgcacagaactttcttatgtggtactttttcgttcgctaaaaaggaagtgcttacattattagggaggtgaaagtgcttttatcatcaaaatgttagaagaaagcgtcgatttgagcaaatctttttggtatgatttgcattcattgggctgacaattacactaatctttttctttttttgttagtttttttacaacgatggttgggaaaatggcgagcttaaaactgcttaaggaggagctaaacagaagagaaattcggtggtctgtccactcattgtgccaagggaaaaccacgagatgggtaaacatggaaaaggcggagaaagaaactattcgattgttttttgtttaggttttgacgtggacatttttggatgacttcaaaattgaataaaataataataatttacctttcttatggcacaaaaattgatcatttttataatactattttaattgttgttttatttc

SEQ ID NO: 45602 - DNA, 5352 bp, Heterodera glycines; identical to SEQ ID NO: 3663
  unsure (1)..(5352): unsure at all n locations

SEQ ID NO: 45603 - DNA, 1184 bp, Heterodera glycines
gaaaatcaaaacacatccgagtcactggcattgtccgcgttcgtacagtcatcgtcatgttctgcgaatgaccaagataacaatttggatggtaggaacagcctgcatgaaaattacgacaactacgactctccatcagttggagcacctggaaatcgaatactaagcgaagtaacttgagacatccaatattcttctgttgtatatataacttttactccagaccaatctgtacattagaggactcgatgaggaatgcacggatgagagactgcggcagatgtgttcaagatttgggaaggtaaagatttacttaatgttgtctaactttccaaaaaccagaattttttctgggtctatcaaaaactccgggtttacttcctgacaaacgattcctgttttctttctttttacagattgtgtctacaaaagcaattctcgacaaagccaccaaaaaatgcaaaggctatggcttcgtcgattttgagtcttcagcttcggcacgagacgccatcgaagggctcgagaaagagggaatcagcgcacaaatggccaaggtggcgtacacacatctttcctgaacttatatacattttagcaacaagagcaagacccaaccaatttatatattgccaatttaccacctgaatataatgaagacaagcttactgatttgttgaaagaattcggcatggtgatcagttcacgggttctcaggtcacaaaatttaaaaaaaaattttacttaaatcaaatgttttagacacccagacgggtccagcaggggggtcggcttttgtcggatgggctgtaccgactcatgtgattctataattgcggtcagtttcttccgtgggagcctttagtaaaaagaaaagttttaccttaagaaatacaacggtcggaaattgcctaatgcacaagctcatttgatcgtcaaatttgcggacagcagcagtcggaaatttaagcggtctacgccctctttgaggtccgtctactcggagtcgtgctataaacccaaagggggtgttcctccgctgttgacaacaccgttcattgaaccggtaaacccacaaattcgaattttatatgttaactccgtttttagacctttaaccagactgggtaccaattcggtggaactctgccgaacccttctgctcactatggaccttcgtttta

SEQ ID NO: 45604 - DNA, 732 bp, Heterodera glycines
atgactgtagacgaaacgagcaaaaagaaaaaagaaagcattgtcgatttatcgcgttttattgacaaaaaagtgagagtcaaatttcaaggaggacgagaaggtgaatttagttttacattaaacaacacaaactatctattttttaaaattatttttgtacatacaaccaaatatttttagctgccggaattttgaagggttacgaccaattgctaaatttggtgcttgacaatgccacagaatttttacgcgatccagaggacccactacgaataactgacgaaactcgtaaccttggacttattgttgcccgcggtaagaatattaaagaataaatggtacttatatgttatctgtgtacatatattcaaaaatattttgttttggctataacttatttctttggcatccaaatccaacattgttggtatcattcgaaagcttaacatgtttcgaagctatttctaaggtatcgcttcgcgagtagactattaccaaaaaagttatacatgaaagttgcgaaaaagccgaaattttgaagttttttcttagtaaaattttgtccaggctagaaaatttttaggttttttgaaaggctaatagagcatctgaagagctttcgaatgataccaacaatcttggatttggatgcaaaaggaaaaagttatagacaaaaacataaaatatttttgaaaatctgtacacagataacatataagtacgaataaa

SEQ ID NO: 45605 - DNA, 1081 bp, Heterodera glycines
atggccgcgacttctcttcaacaacagctcaagaggcttaaatcggcacccaccggggctttggcggttgagcgtgattattcttcgcttcttttcaccaaaaaagcggcggctgctttagaccgagacgagttttacaaaattggtgattttctattaagacattgttagaggcgtgggtggggatttgttctctgcaatgattattgcgagttgcgttttttaggacttgctgggctctctggcatgaaaaaaattgacaatgcattcgacacttatgcgccagaattgttttggaaggacaagaaacggttcaatagagcgatgctccagaaggatgaggcggagcagttcgaccggcggattgagacatttttgctccgtctcgccgcccatttccatcaccagtgctgtcggcaggtgctcgaatggctcatccataactatcaggttctcgacgttagaatactaacggaagatcccctttaggaatcgtaatcgatcaattagaaaagtcgctttctgtctctgcctgtcacgactaactttctaggcgtttccccatgtatattggtttgatccttccattttcagattcacacatacaatgccgaggcgcttctgctcgcttttctgccttatcacagcgtcaattccttcggtcggctcctccacattctcaaattcaactccactgcttgggattggctgacggaatatcaaagggacgcagcacctattccgatgaatattttatgtatatttacgaactcgcttccgttttatttcaaattaaatttctaaaaagttttcaaatttaataattgaaaggaaaagtcactgttaaggcagagcatgtcaagtcggtcgttcctatggactcgtttccacactgtcgaacttcgtccaaatggcaattgagcagcttgggtccacatatgccaatgacaaaatgcaaaattattttacttttttggtgtctttgttcggcattttgattgaaaactcgacagctgacggaactgttgatgaccaactccttgccagattgatgccgtttttaagcgttgcattgaagtga

SEQ ID NO: 45606 - DNA, 2236 bp, Heterodera glycines
atgaaaaatcgcgaaatagaaaaacaaatttctaaggaggttaatttaaattgaaaataataatttttaaatatttgtatttttagattcaaaattttgtttctcccaaaattaatccgattaaaaaagaagcaataaatcatttaaaactaaatatcaaaacatcagtagagaagtggacagctcaatttacagcaattagtaataattattaattaaaattagctaattgatatttcaatttattatttgttttagaacctcgattgcttgttggtggctcacttttaatgaatggttttgtggatggatcagatatggatttgctctgtgttttaccagacgaaattgaatttgaccaattatttggtgaagaagataaatgtttatacaaatttcttaaaaaagtaaatttaaaaaaatattataaaaaacactacagaaataaattaatttaaatttttaaatatattggctaaaaataatttgaaaattatatttaaataaatttattcttcaatcttttgaaaaaaatatattgagtgatttacttttgttttccacacaaattaccactaattaagtttgaaaaaataataaataattattttttagaatttaaatgacgtcatcagcgttaattggctgcagggcaaagtgaacattttgcgaattgatcaccaacaaattgaagttgattttttgccggttattgtgcctggaaaatatttattagaaaaagacattcatattgaggatgatcaactaattaagcaaatgaccgaagaaacaagcatttaccctttggcaggtaaaaaacgacaaaatattaaacaaaaaaacatataaataagatttgtgaaataaatttaaaaataataaatgaaaaaatgggccaccatcaattaaaaattaattttgataatagaaaaattaattttaaaactattaaaataagataaatttattccataaacaaaatccattaatagttaatttaataaaaaaaaatgctacttaattcatatagttaaaaaaatttattgcaaataacacaaaatatcaatgtaaacaattaaattgattttatttcaataaatcaagtttaggctacagatcatcaaaataccaattatcgcttatcccaaatcataaagaattctctgcacttttaaaggcagtcaaattgtgggcaaaaagtaataaacaaaattttaattttaatcttttgaattttaagataaacaaatatattcgggaatttttggctacttaaatggtgccactttgtcagtgatggcgtctaaaatttgcattttgttccccgacgcaccgttgacctttttattatatcaatttttctcacattttgccaattggtacgaatttattttgttatagaattatttttatataattttataaattttttttattattacaattgaaggacaataataaacaattttaaaatttaattaatttaatttcaaaaggaatttgcgtttgaataagttatttttaattatttatttattgaaatattatgaattattaattatcgcgatcccttagatagttaattaatttgatcacattcttaggtcagagtgaattttctaattcaaaagtatttaaataaaataataattattttttattttagggattggtctcaagcagtgcttttaaagaaattgacacccgttacaatgaacaaaattgtgcgaaaatggccacccctttttggcatttcgccaatgactgttataacgccaaagtttcctgaacaaaattcaacattcaatgtgaacacttacacaattgaaacaataattgacgaattaaaaatgggttaataattttttttattattaatttaattaaatttgcacttcgtttagcaaacgaaattctgacggaagacattaaaaaatggaaaaacattttccaaaaaaggaaaatgaaacaaagttttgatcattttgcgatcattttatgctcgggaaatgaatttgatgaatttttgaaattttgtgcttatcaaaggagcaaaatccgtgaaaatttgcttggctgggcaaatcaacaaaatgtggcggaaattattgaacaatttcatctgatccctcaatcggaacaaaaattcgcatgcaaattgaaaaagtaagaatatattatcaattcaattaaaatagactaattagtattaaatttcgaaagattttttaataaa

SEQ ID NO: 45607 - DNA, 1770 bp, Heterodera glycines
  unsure (1)..(1770): unsure at all n locations
ttgatgcatgccaatttgccagctgctgtaattgattgtggcaccgggtaattaagaattactgctttttgcgttttttatttttcttttaaggtacacaaagcttggctatgcaggaaattcggagccacagtttatcattccgtcggctatcgctgtcaaagatgcgaatattttgaaaagtgtncggcggaaaaatcccggacttggactttttcatcggtgacgaggcgttgtctcctttggctgcgaattattttgttaaggttctgtttttctcattttattgtctattcccaaagtatattatgcttttctcagtatccaattcgacatggaattgtcgacgattgggacctaatggaacgtttttgggagcattgcattttcaaatatttgcgagccgagcctgaagaccattactttctgttggttcgtccgtattcccatccatcatttcctctttaattgctaaaatttcagacagaaccaccgctgaatacgccggagaaccgcgaattcactgccgagataatgttcgagtcgttcaatgtgcccggcctttacatcgctgtccaggctctgctcgccttggccgcttcttggcaaacccgcgagttcaaccaccgttctctgactggccttgtgaatccccccccccctgaaatttgttaatttgtttttgaggtggtggacagtggagacggcgtcacccattgcatcccggtgtgtgatggctatgtcatcggttcctgcattaagcacattcccatcgccggacgcgacattacgtactttttgcagcaggtattcgactcgtgttcatatgcaatctggtcagaatgtttaatttaagatgctgagggatcgtgaagtgaatgttcccagtgagcagtcgtacgaagttgcaaaggcaattaaggtaattgcgatttgtattcattatttattcgttcaaatgctgggcgtcatgtgcaagagatgtaccaaggcgtgtgactttttttgcttgtggtatctgatttgtaggccacacttttaaaaaaaaaatggcaaaaagcatatggcatttctgatagatgtttcctggaaaattgaaattttgcaagtatttttagagattttgtgcaaaaatagtctatttttgtgaaagataacatggaataattattcgaattataataatattaaatataataattttgctttttccattaggaacaattttgttacgtttgtccggacattcacaaggaatttgtcaaatacgactcggagccggagaaatggctgaacaaagcatataacggagtgaacaatatcaccaaaaagccttttgcggtcgatgtcggttacgagcgatttatgggcccggaaatattcttccatcccgaggtttggtttttgcacgaattatcaccgcggaataggacggacgataaacagaattcatcttcagttcgtcagctctgactacaaaatgtccatttcggaagtggttgaccaggtgatccaacagtgtccgatcgatgtgcgcagagggctttacgagaacattgtgagcagtggacaactgttacacatgcaaatgttaaagccatacacttactatcgttttttaggttctttccggtggctcgacaatgttcaaagtgagcaaagaaaggaaacgaccgaccaatgaccattacatataaattaattactttccaaggatttcccgagacgccatcagagggacgtgaagagactttcggatcaaagatgaca

SEQ ID NO: 45608 - DNA, 1016 bp, Heterodera glycines
gcaacgcgttaatcattttccacggagttggatactgaccagaaaagaccaactttacgagagcattgagcgtgcctccgttctgtacggttccgattggttcaatttcgtatgtttcgaacaaaatcatttgaaaaagcattcatttttcagattcccgaatttttttgtactccgatgagcagcgctgcgcgacattccatgggccaaaaatttcaaggggctaatttaggatcggatgccaagtttattgtgaagccggccgacggcagtttggggaggggcatttacttcttggacaatggcaatttggttggagagcaatgcgagtgcccgtttagcagtgctttttcagaacgaaactctcgagactgacaagaaattggtggtgtcccgttacatcgaccgtccttttctaatcaacggattgaagtgggatttgcgcgtttatgtgctcgtcacttcgttctatccgctgattgcctacatttacaggcaaatattctattcttttgattctgtgaattaattaccaactcaaaaaatgaatcgcatttttaagcgacggattggcgagatttgcggtgcataagtacgacgaaaaagatgaaattgacaaggtggaaggaggagtggacatgaacaagcatctgacaaattattcactcaacaaaatgtctgccgaatttattcgaaacaccgactgtagggaggagaatatgggtaaaacgcgattttggaatttccattttttctttctttaaaatatatttaaaagcattgtttatcgtcttcgtttcgaatttattttaaaatttccacaaaaattcttctcgatgcatattttcaggccacaaatggactctaagcgcacttctgagggaattggagaagcgtggcgaggacgtgggtcttctgatggttcgaattgaggacattgtcatcaaatcgctgctttccgtccaaaattccattgctgcgatgtgccgaaagtgtaaacattctgttggagaaga

SEQ ID NO: 45609 - DNA, 1068 bp, Heterodera glycines
atggccgaaacaactgttcttattaataaaacatcaaagttaccttacaaattaggtaggtaggtacctattctacaattgttagaatttctactttttaaataaaaaaaaaacttgtgaaccgccaattacaaaacgccaaagttgaaacaattgaaattttgccgaccgacacacggcagtaccagctgaaaactttttttttttacttattctaaaaaatttacaaaaaaagaagaatacaacccattaagataaaatatacataactttctttatttaaagccttttaatgggtaaaaaacgaaagatccgaactggtgccggtgatgttgtccccgttcctgggcctcttcttaaacaaattgaaaaagacaaatttgcaaaaccaaaatcacatcttcaccttggcaacaatcagaaaaaggaggacgaacagggaaaggtggttttataaattaatcattttgtgcattaaaatcagtttttagttcattgatgctgcgctgagtaccaaaattttacgcgaagcgtccaaacaatggaaagcggaggagaaaaaaagcggagaagaaaaggcattggaaattgaagaaaaatcggacgacgaagaagacatttgcaagcaagcgcaggaattggcagaacaaattgcagtgagttttctttaatggaatttaattgaacaataatttgcaatggaataaactgaaagatcaactcggaagaagaagccgatatttgcggatttaccagtgaagctgacaatgagcgacgtaatattagcagaacaaagaaaagggagaaagaggcgaaagcggagggcagcacaatcactccaccgattgaggcaattgtcaaatcgcatttttatttgtaaatttaattttgtattgtcagattgacggagttaatccggctgtggttgccctctttactgaagttggagctgtgatggcgaagtaccgcagtggaaaagtgacaaaagccttcaaaatgattccggcaatggcaaattgggagcaaatactcgagtgagtcacttgttttgtattggccagtgaaaaa

SEQ ID NO: 45610 - DNA, 928 bp, Heterodera glycines
ccccccccccccccccggttgagtgatatgctgctgatcttaacattttgggaacggacaattgattaagataattaattatttttgtcccagcactgtctgtagagtttttgaacgaattttgagtagcaaaattttagaatttctgaacaatataagattttttgataaagaacaatttgggtttctgaaaaataggtcgactacaacccaaatattaaaaacgatggacgatatatataattctatacaaatgaatcagcaaattgacatcatctatattgattttgtcaaggtttttaaaaaatcggagttttaacgttaaaattggcgaagaattgtcagacagtttcagaatattttcaggagtgccccagggaagtgtcttagggccattactctttttaatttttataaatgatctgccgtcctttattgcaaatgaagcggcatcagttggcataaaaatgtatgccgatgatgttaaattatattatgcacatgaaaacgatgaccattcaaatcagttggataaagcaattgaggctttggaaaaatggtcaaaaattaatgggttagaaatttcaactgaaaaatgttttgttttatatttagggaaaaataatatgaaaaaagaatattttattaactcaaaaaagatttctgagtcggataatgttcgtgacttgggcattataattgactcgaaacttaatttttcagaacacataagcaaaattgtacgaaacgcatatcttagaagctttcagattttgagtgttgaaaagcagggaaataaagactctaacagcagattataagacttttgtacgacctcaattagaatattctaccgaagtttggaaccctaatttaaaaaaaagatatagacaaaattgagcgggtacaaaaatttttcacaagaaaa

SEQ ID NO: 45611 - DNA, 1761 bp, Heterodera glycines
tgtccccattttggccagctttaacaatttttgccagctttttccctgttttttttttgccaatttgtcactttgtccgcattttggagcaagttgacattttgtccccattttgaccaagtcggcattttcccattttggccagtttaaatgtgtttccaactttgcccctgtttttgcccattcacagttggaattttgtcgccattttactgcccaattaattaggcactttgtcccatttaatcacttttttttgggccaagtggcattttgtccccatttttgccaactttattatttctttttccccctcagattgccctgttcaaccgtttgcgttcccaaacagtgtccacccgttatctgcatgttgatgagaaaatcagcaccaaccaaaagatgcatgaaccgcctgcgtttgtggccagctcaacaaaatggggcgcatttcacatcaatgttggtcagtgattgattgattgatcagcgaaaatgaggctatttggggcctaatgggtgggtgtaattaattggtttcctgaaattttttgcggaagccatccatagcgaatttttaaaaaattgaaaaaccgttattccgttgcctgaaatttgtgacaaaaatcaaaacagcgccaggcgataccggcagggaaaaaatgacactgtttctaacaaattttcagcaaaaatttaccaatttttgagtcaaattttgaaaatttagggcaattagggggggtttccgtgtcggtgccttttggcgccgtcttggaaaaattttaaatttttaataaatttttaaggaaattaattacccatctctattttttgtataaatttctttaaaattgtatgtgttttttttccgttcagttgaccagcccgaatttggtggccaacagtcccagcagcagcagcagcagcacacggtcacctacgggtcggtcattcagttggtggacagccaaacggaaatgcgacttccgttgatggtcagtcagtcagtcatcagtttcaagcagtccaacacaccgattttgatctgatcagatcttgcttgtgaaaggcttggtctgtaatctgctgattgatccaaaattgatcaaaaaatatccacccaaaaactcaacccgccgatcagagccttccttgatcatggagctgaatcagatcaaacacaaaatgcctaaatttcctgtgaaaatgtgtgccaaaatctgttttctttgggtttctcggttctcaaaaaacatgaaggagatttaggaaaggaataacgggaaggatccttgtgaaaaaaagtcgggtttttcgctggtcaaacattttgcaagacccctgtattttaaaacaaaaaaaaaatgagtcaaaatttatgaatacctgctgaaatcgaatattttttcttgcatcccgtaattctatgctaaagagtgtgagcatttttaatccaaacattttatttttaatgcaaatttcagcgaattcgcaaggtggacaaacagcacgtgttgttggaccctgctggacaggtaggaccaaaaaaacaaaaaaaaaaatttattttttgacgaaaattttagctaaaattatgaaaaattttcccctcaagggcgagccggtcagtcagctgcacaaatgcgccttccaaatggttgacgtggccagcaacggggcggagctgttctacctgtgtttgagccaggacaaaatcatccaattccaggcacagacttttcaatgggaaagaaggaa

SEQ ID NO: 45612 - DNA, 850 bp, Heterodera glycines
atgtcactaatgctattacgtcttcttcttgttttgctaatgtttgctgttgaagcaggtaaaatttcaaaaaaaaaaaatatgcaaaatttcaaaaaaaaattatgaaaattttcttaaaaatcaaaaaaatttcagcccatcaacaacaactcggtacaccagtaatcggcggcatatgtaagctggacacaccagacgtgcacataggcggcaagcaaacacaattctttctacgctgtgagccgaacacggattcggcacagggcgaaggcgtttgggtggtgaagagtcggcatgccggttcaacagctgccaagtaagttttttatgtatgatcagcagcagggataggacttacacatataccatatttcctaaaatgcaacccctctaaattagagccccccccccccctctgaaatatagccacccttttgagggggatttgaaaataaaccccatggggcttaatttttagatatatttttacatataaatattttcacctcaaattaaaacgactttttagcacataaaaaaataaaaatcttattttatctttttaatttaaaaaaattatccactttttagcaaatattttggcatgtattttttggatttttagcatttgtgcactaccgtggcttaaaaatgatagaaaactgtgattagctttctgagtatcagcaattggttaagaattttgcgacgttatagaatacctgccgctgctgttgtcagccaacaagaaattgagcaaggcgaacaaaattcacaaaaaattgcagcaacaaaacaaatttcaagctatgtgtgcggtccgtttaaattaaaaattattttataa

SEQ ID NO: 45613 - DNA, 658 bp, Heterodera glycines
catgttggcagctgctcaattttcactggagcacgtgggacgactttccacgtacggattgacattgccaacccgtcggtgagtgccaacaattgcccagggcactttggttgcgcaaatgttgcggcgtgtcaccaaaaatctcgaccttggcgccgaatacatttaccatagggacgaacggtttcctggttggttgaaaaaactggaaacgaatttgttaaaacattaaatggcaggcaaacagtcgaacactctcagctacgccttgcgctacattcagcccacttggatattttcgggaactcttgcgccaaccgaactccatttgtgttactaccacaaacagagtgaacacttgcagttcggcgttgaatttgaggcgaatttcaagcttcaggtccttttccaaccaaatttttactttttttaagaaggcatatattttcatgaatttcaggaggtgaacacgaccttcgcctatcaaattgaagtgcccgactctctgactctgagggcctgctgcgacacaaattggaaggtcggtgctgtgctggagaagaagctgtccaagcagttgcccttctcgctggcgatcagtggcgtgctcgatcacgtcaaagcgcagggaaagttcggcatcggactgctcattggc

SEQ ID NO: 45614 - DNA, 3232 bp, Heterodera glycines
atgaccattgttgtactgtcagggctgaccgtggaagaggtggtgttcgggaaggaaccggggctagaggggcgacctacgggcgaggggtttgtcagattcagcactgccgacgaggcagaacgcgctttgcaacaaaacaaccaacacatggggaacaggtacggtgtttgccgactgtttgtcggtgatttcatcgttcacaaaatttaaaattttcaaaaaatatataaaaatttattaacccgaaaattccgccaaccattcattctctgttgttgatgatgtgacgtgaaccccccaaacgcgacccatcccaattgatgagatgagatgtccattgatggaggagtgtgtgtgtctctttggttgaccaccccactcactcgcacatgacgaggaggttggaataggaggtggtggtggtggcaaagaatggatggggggttgcaaatggtgcaaaattggtggtggacgcattggacaaacggaatgcgggagggtcgggatggaaagagaggatggacaggaggaaatggcggagggttgggcggtggaaaaaaacgacaactgaaaacccccaacaaatttacaaattccacaaataaaattttatacgaattcatctttaaaaggatgctatttgaattaatgctttccctttttctacagatatttggagttgttcaagagcgacggtgccgcctttgaagcgttcaaagcgcgtgccaccaacaacattgttccgctgaaggcgttagcccaggcgaccggcgacccgtacgcctcttatggatatggtccggctgcatatgggcaagtttccatttattttaacacaattccattaaactacaaattttctactatttgtcaggactggttatgaacagcgtgccgctggcgggcgtccgatgggacgaggcggttatggaggtttgtgttgaatcaactcaccaaacagcatcatctcattaatccattcagctgggggtggtggtccggcctctcaccgatactcgccttacccgagctatcccaactacgggtacggcactccgcgacagcccggcggcgccggtggtgcgggaggaggcggttacggtgctggacgtggcggtggtgctgctgctgctgctgcagccatgggtggcggtggttacgatgacggatacggcggctatggaggtggatacaatgcaaatcccaacgctggaccgaccaaagtaaaaaaggaactatttaccggtttttaattcattctagtgctgcgtctatatattttaatttcaaatattaattttagctttacatgcgcggaattcctttccgtctgacagccaatgacattgaacgtttcttttctccgctcgtttgcgtggatattcaggtagtgattgtgtgaatgtcgaatttttgctttaatttcaatttataggtcggcacaatgccggacggtcgttcaagcggagacggaattgtcgaattccaaacaccggcagatgcgcgccaggcaatgagcaaagaccgggaatgcatcggaaaccggtaaagagacatgtgcatttacgcccaccaattaaatgttaaaaagagagtgggggtcgaccctacagttcgcaagacgagatttttcaaaaaattaatttagtgaataggcaagtcttcgtccagtttattgataaaaatttcgtcaattcgttaaaaatttgatgaaattgagtcacatttcgatttttataaaattatgacttcaacgttcttttatatgatttcattttttacctatattatatgtctttcaccttggattcgttcaattcagttacgtggagcttttcccgtcactgtcagcgaagattccaccccatgtcacttacgaaagcatcggtggtaagggcggcggtggcggagggcgtggcggtgccgcagttgggccggtgatgccatccgcagcgcaacaatacgcgcaggtctgttacgtttgccgtgtcaaatattttttgttcaataaataactcgcatatttcatttttttctttttggactaatatccaattttgttttctctcatattgaaaatccattccgacaataaattagtcacttaattctttgtctgttctttgtttttacatttgccatcattattccatgctcattcgtttatttatctgctccattttttctcttttcacagcactctgactattcaactgactatagcccctaccaccaggcaagctttggacattgggaagaaagatgagagatggaggaagggaaggcgtaaaatgaacgtccaaccgcctcctttcctttttttgtttgttgatgggttgggagaagttctaccacgaattaggaagatacaaaaaaggagtcatttgtgttatgtttttgactcggataccgatgtccttatcccatttcgatcaacttcgtttggccattccccataccatctttttgtttatttctggtcaggcccacttatcatgcacactcacgcttgtgtccccccttccctccgtttgtaggccgtccaacaacaggtggcagcattcgcgagtggcaactatccgccgagtggtgcgtctgcaggcggaatgtcgggcggcgttggtgcgatggccgccgccggacaacaccaccaatatggacagtacccgggcgactattcgaccgcttattatggtgcgtacggaggcggcgacgttggggctggcgcacagccgaaaacggattacaactggttagtttagtggttgggttgctgattgccaaatatgaaattgtttttaaggcctgcacctcaattctgagcagcgggatggactcaaccaaagcagcaacgcggacggatacctgcaacgaaacgatctgttctcttctatttttcgatttgtttttcttttttcacacaaattgtgtcctcctcttttttgtcgtccgcactgttgttgtctcaatattttttgtatgattttaccatcgttccattttatgttatgttaaacttttaaaatccacaaaatgcgtcgtcatggacatcatttattagcccagggccaattaaaacggaattcatggggctcttttattgggggagtaatggatctcatcacatgggttgctcccattttcctgcttcctctccccctcatcagttatactaattatctttggcccgaatcaaaattttgtttttcacatttattttcgtaataaa

SEQ ID NO: 45615 - DNA, 1226 bp, Heterodera glycines; identical to SEQ ID NO: 20968

SEQ ID NO: 45616 - DNA, 1368 bp, Heterodera glycines
atgagcgtaattaaaaagattgacaaagacagtgttgagggtctggaaggaagtctttcattattctctttgccgccaacaaatgtggccataaataagacaaacgtccgtgaattgttgcctctgtctgcacttaatcagacaggtccttatttgtttcgcctattctcggacagccaattttgtgacttgagcaaaacctatatgtacctgctcagctcaattgaacggaagaatgacgcgggagaatgggtagcactcagtgacacggacccaaacgataaacatgttggcgtcattcaaaactttgctagcagctttgttcgctcgctgaaggtcaatatttcaggcattgaggtgtttgacagttcaatttattatcactaccgcgactacataatgaaggagttgggctattcacaggaaattcgcaaggctttccatgaggcatcgtgctactatgccgacgatgatgaccagaacagcgcaacaaacccaggttttaccgcacgtgcggcacggttttcaggcggcagacaatgtgagacaatggtaaaactgaattttgatttggcacgtcaaagtgcattgatgttgaacaatcaggatgtaatattcactattcaccgcaacaatgattcattcctcctgcttacgcccccatacaaaaaaccagatggtacacagcaggaaaataagaaagagtaccgcatccgtgtgcatgacatgcgtctctatgtgcgcactgtggacgtaacgccaagccttaaccttgccattagccggcaattagagtccacttcagcaaaatatccgctgcgtaaaattgagatgaggtctattttccttggcacaggtcggaccgagctggcacacaatgtgttcacttctacgttacctcgtcgtttaatttgcactttcgtttcaaccgatgcatattccggtaaccgaaaaatgtcaccctacaagtttgagcacgccaatgtacgttcgattagtgtcgaggcgaacggacagacttttcccagcacaccgtatttgctgtccttcgatggtgtacagccccgctttgtccgtgcttttgtcgacatgtacgcaggcctgggtttggatgactccgacaccaaaacggtctcgattgggatgcagcgttttcttaacggttgggcctttttcgtcattccgctgacttccactctggaggacacacctggttttgagctgatcaggcaaggcacatgcacgataaaggtgcaatttgagcagcctataaaagcggatggatatgagatgcttgtccttggtgaattcgattctgtgttgtccattaacgcagaccgggttctgagtacagacggaagtgtgtaa

SEQ ID NO: 45617 - DNA, 1629 bp, Heterodera glycines
atgtctgcgaaattagaaacaaccagtccagatggggctaaagtcagcatcaacatccatgacagaaatgaagaaaaagccttgatcaactccaaggctgtccatgtgaggctgtttttttggaaaattttgaaaaatcaaagaatctgacgcttaaacggattgctattgatatttatatggtctcatattgtaaattttaaaattatacatcgggtcccgatctttttgaaaaaaaaatttgtgaaaatttgtccccgtaatccgtgttttctcaaaaatccataaaaatctgattttaggttattgaccctgccgaggcggccaattcacttggcactttcaaggagcaagaaccggccgcccagcgaattgctttacggttaaaacaccataaattttccaattttattttttttcgaaaaatttttgaatttttcaggacataccctcgtcgttgggctgtgcttgctgtggtggcattgttgaactgcttcaacacaatgatttggattgccttttcaccgatttccaaccatgtttccaatttttatggcgaggtttgtattttttttttccaatttaaagttttggctcacaaataatgtcataattaggtattgttcaaactgtgctatcaattcaaatgatagtaagtaacaagaacggccaagattttctatggaatacggtcccatttatttacaaaaaacaaaaatggttggaattttaggccaattaaaacactggatcgatcccgtctcgttaccaaaaatgaaaatccctaacctaaatttggacaaaatcgaaattctaaaaatttgaatttttccgatcacggcctacgctcttgcaaaaaaaaaactgaaattttttatttttagaaagattccgccacttatttctctggaattttcatttttgtgaccataccagtgggccttgttgcgatgtggtcgggcggacggtttggtgagctgaaaaattttttttataaaaaattaactcaaaaaatatgttttaggcctcagatcatccattttggttgcagcatgggctaatgggattggagctgcaattcgtttggccaggtcagccgtctggggttcgaattaacccatgaaaaatgtcagtcgtcaaaattcaaaagatatcgtattttcgaagctgatgggcaccccctataaaatttaggtacgccattcggtagatttttggctcaaaaacgactaatttggtgcttttttgtcaattttttcaattcaccctcccctctctgaaatttttgaaaatttatttttttcaaattaaaaaaaaattcggtgcgtgatttgtctttcgtaaaagattttaaacagtaccgattgcaatgaagaaaaatgagttttccattttccctcccaatttttcagttcatttttgcccgattcgatgatccatctccgttttccggttggcatcactggccaaggcgtggccgcgttggcctacccgttcatcatgtttttgcccaccaaagttgctgctgtttggttcccggacacggagcgcacattggcaacaacaattggggtaaaaatgggtaaaataaataggaaaaaagcaagactaatagaactcactttttaa

SEQ ID NO: 45618 - DNA, 1520 bp, Heterodera glycines
ccagtcgaggtgagattgacatcaaagtgcttgtccatcagtctcacgctggtgctattattggccgaaatggaagcaaaatcaaagagtttcgcgagcaaacgcaatgccgctttaaggttttccaagaatgttgtccagtttctagcgaccgagtttgccgttagttttttcgtgttttttcttcgtttaattttttcctcagtgatcactggcgatccgtcaaaattgccctgcgccgtcaaacaactcgtcgattttgtcaaagaaattcccttcaaaggaccgcaccagccttacgacccacacaattacaacccacacatgtgccacgcttatggtggttttgaaggacaatcgatgggtgagtgccttcattgatgctttattattgccaatggaaggtggaccacctccaccaatgcctcctcctcatttcgactacccaccgcaccacggaccaccaaatgcgcctcatcaacctggtgttgggtatgccggtttcggaccgggcggaccgcctcctcaccatcatgggggaccgccaccgatgggttatccagggccaggtggagagcaaatgaccacaacacaggtatgtttttcaatccagagttttttccaaaacgtgttaataaagtattttaaggtgaccattccgagcaaattgagtgggacaatcattggaaaacgcggcgagtgtattaatcgaattcgaaacgagtccggcgcacgcattgaaattgacacgcagtcggatgtcttcggaacggatgagcgtatcatcacaatcaccggatcgccacatcaaatccaattggctcagtttttgctacaacaaaggtggtttggtagcataaggtccaatttttgactgtgtttttaagtgtccgtcagtctgaggcggggcgccgttatttggccgagagacaatgaaagacggcgcatcagaggagtcagccctgtggaatgacaaaagttgtatgtccgcaagttttccatttccattgaaacactttcgaccataccttctgattgagttgtccccatcaatcatttccctctcttcaaatcatttggtatttttccatttttaactcgtatcaaacggctgaatatttccacttcttacttcatgtctgtacctcaaaagtgttcgatacgagttcgtccatattcgtaccaatatattatgccctatcatcctctttgttcccttggtcgacttgctccttcatctcttttcttatactattgttcatggttccaactttgtttagccaggggtgttttgttattcggttcgcatcgcatatttggaggtataaaaagagcattcagatttgtatatttgtcgacctgttcctattaactaaattatactgcttaatctgtgtgctcaaagaaaattcgattttgaaaatttatttttaaactagcaaagaatgtttttctttggtctataaaaatgatgagcgaagggaccaaagaacgaaggggagagaaacggaggagacacc

SEQ ID NO: 45619 - DNA, 1659 bp, Heterodera glycines
tgtcatgcaaaagcgcccattatcgacgatgtccaacacgagcagagttggcagcgcattcaagagattgaggcgcccaaagagccgttgccggagcccgagccggcaccaaaagtggcgcccaaattcacttcgccagtgcttacgccgggcgaagtgaacgagggacagccgacacattttgagacgacggtggagccaattgacgacaacgaactgaaaatccaatggtgggagagcaaatatgaaatttaaagaaaatttattattcaaatttaaataaatttatttgccagattaatttaaaaaaattagatttatttctcgggtaattagggcctatccctccgccgatttctttcaaatgatcaaacgattttcttactgaattgctcccatgttttgaccaggttcgtgaatggagcacctgtgccggactcgtctcgtctgaagcaaattgccgactttggctgggtgattctgaacatcaacgacaccgaactgcgcgacgcgggcgactgggagtgcgtggcgaccaattcggtgggcgaagcgcgtgccagcgccaaactgaacgtgctgccacgggaccgactgctgttggagccgatcaaccagtcaagtctggcacaaattgaacagttggaggcaccgcgagcgggcccggcagagccggaggcaccggtgtacgaagcgccgacattcaccgcgcagctacaggcaccggacggactcgcggagggtgacagcgcgcacttggaggcgcactacacaccggtggccgacccgaagacgcgcgttgaatggtaaacgaagcggagaatttgaattaagggcaattaaatacaattaaaattaattaattattttttaaatttaaattctataagcaaaattcattttcccatggacaggtacaaagatgggcagcccatttaccactcgaacagacaacgaatggtcaacgactttggttttggcattttggacattctctatctgctggcacatgactcaggcgaataccaaattaaggtgctttatccgttttagaaatgcttatctcaaaaacggatttaattaaagggcaattaagcagaatttaatttttcaaatttacaattattttaattggtgctcatttgtcaggtgatcaacgaccaaggcgaggcttcgtcctccgtccaacttgaagtggcgcccaccgagtcgctgctgcttcagccgcaatcggagcagaaggcgaaggcggtcggcgacttggaggagcggttggccttccgtccgaccaaagaagaggtggcacgtgagggacgaatgccggtgttcgtcgcgccgttgagcgcgcccagcgaaagtgagcagggcgaccgggcgcatttcaccgctcgctacgaaccgatggacgacaatcagctgaagatacaatggttattaagctgtgccatgccatggcctttgttgactgatcggcatttccccgcaaattgcaggttcctcaacaacaaaccgttgctgaccgggtcccgcgtgaaaactatcgacgagttcggcgtggtcgtgttggagatttacccggtatacccggaggattccggcgactacgtgtgcaaggcgaccaacgcgcagggagaggcggtgacgagcacttcactgaaa

SEQ ID NO: 45620 - DNA, 1368 bp, Heterodera glycines
atgatgggagggaagcgaaagaaaaaggggaaaaaagcggaactgagcgaagaggtgagggaaagaacgatgggacggcgacagaaattttggcgtcgaaaaaacccataaattcaacaaaacaaaaaaaaaagcgattacccaagtgccatttgaattcgattaaaaacggccattctctgctggcaaagattggtttttgtgtgcaggaaaaggaagcggttattgcgaattgggagccgagtccgttggtgccgctttactcggaaagggaacaaaacgacccgaattatcggccccgttcaattgaagggttcgattttcatttgaattgtttggaccggtatcacggatacaaaccaaatacaggcgaatgggcaaatttgttgtcatcgatgacaaacgatgcgtcaatttggcgtcgactgattttttcggctttatcggaaaccagaaaattgaagtttgttgttcatacatggcttatttaaaaatatttttgttttgctttccatttcataggaagtagccaaaaatgccattttcaaatacggcgtgggctcatgcgggcccaggaatttctacggaacggtggacgtacatttggacttggaaagggaattggctgaggtagggacaaagcaaaaatttgcagatagttcgttttggcggcactttcacactgtattgtcataccgtaattgtcattcaaattgacagttcatgggctgtgaagaggccattctgtacagctacggattccccaccatcgcaagtgccatcccagcttattcaaggaggggcgatgtcatttttgcggacaaaggtccccgggagtcgcccaatcatttgttggccatggaaaataaaagccatgtttttaggtgttaatttcgccatacaatccggactgatggcgtcgagaagtgacattttatggtttgaacacaatgacatggcggacttggagcgcaaaatggtcgagttggaggagaaagacaaaatggtggggagaacgggaaaggggaaacaaaagaattgccgagggaatgcattccgcgcgacggccctccccaattgagccgcaccaaaattcggattattatatcggattagattgtttagcaaacccatttaaattttttatacttgtaagaatttgttctgtagaattcagcaaaaagccattttcgcagaatccgaaaaggaaagcgtccattcgccgtttgatcgttgtcgaaggaatttacacaaattcgggcgacatttgcccactgcccaaactgatcgagctgaaatggcgacacaaagtgcgcattttcatcgacgagtccttctctttcggagtgttgggaaagcacggaaaag

SEQ ID NO: 45621 - DNA, 1640 bp, Heterodera glycines
atgatggcgaagaaaaaggaggaggaggaactgatcggtcagctgaaaaggacattccggggagagaggcgggagggttagaccaaaagccgaaatttggggtttaaatttgtcagaatttaatttaggaaagcagctatagagaaggaaggccggctttttcaaatccaatttatccggtacccatttttctgttcccgcttatcccttccccaccgtttgacatgaaaagccccggcagtccaaaagtgtaaataaaaaataaaatgccatttgaaattaaggaggtgataaataaacaataatataaaataaaataataatttgattttaattccatttcagcttttactttttctcactctctttcttttctctctctctctctctctctctcttctcacactctcttttttcgcctttttctttttctttcgcactctttcctcgtctctctgtcttttccactctagctcttttccagtgttctctctcctcatccatttgcccttaagttccgacgaagaggttgaggaggaaagtattgccgcggatgaagtgagcgtgcaggaaccggcaccgcccaaagaagaggagccggcgccggaagccgaagcggaggcaccgccggcggaagaaaaggaagaggaggaggaagaagagccggggtcacccggaggggcaggcgatgcgccgaaagagtaagtggggaaggaagggaaaagttagtaatgtgggaggaagaggaaaagggggagggacgaagagggaaggaggaagggaaaaagggggaggggaaagagaggaagtgactctcgagactcggttcgagaaattaagggcggacaggcgagagtcaaagaccgagaccaattgaaagccatacttgggcatttcagagaatttcgtcgcaccagtgttacggagtccgtcgcgccgacggcgcaacttcgccgcgcgccgccccctcagccgaagccggcagaagaatcgatgacggaggcggaagcggcgatgctggcggtgaagaagcgccacgaggaggaggaggaagccaaaatgcgcgacaatgacgagcgacgccgccaggaactcgctgcagttgaggacgaactgcgcgttttgaaagaacgccaagcggagaggcgagcggagcgcgagaaggaggaggccgaattcgccgaacgacggcgccaagacgaggaccgacggcggaaggatgaggtgaagcattggcgaaaaggcactgattgactcattagcaaataatgagagatcggcgagtgaatgttggcacagtcagactgatccatgggccaggcattaacattgcgtgccaaaataagttttaagtgtgcattagcaagttgatgagaatgaagtgatataataagccgacacgcgttcaggaggaacgaaaggcacgactcgaagcggagaaagcgaagcgcgacgaggagaagcggaagcgccacctgatgatggccggcggatttggcggatttgtggcggcggacgcggaaggagcaggcaaaaactttgtggttcccgagaaaagcgagaagggcgcacagcagggaatgccgggacagacgagcaaaccgcgaggactgagcaaagagcagcatgaggaggccaaa

SEQ ID NO: 45622 - DNA, 1930 bp, Heterodera glycines
atgccaaaaatgctatttgtaagacaccaaaacccatttgactgtcttgaatcccgtcggggtttttctccaattctgtttgtcttgttcagctacacgcccgacttcctgctgaccagcaacgaggccacgctgcagctgtacatgcacatgaacggcacgccgtggacattcaacctagtggccactattccgccccaactattgtccgtttgtcacgccgcactgccccgtccgcccttcgagagcatgatgtactacacgtgtgtgcttgctttaacgtacgtttcacaacttcatacactcaccccttaagtgatgatttttcatcattttatggctttttaggtgtaaatagcgttctgttttttgaggatttaatgacttttgctatttttggaaaaaattacatttatggtgacacaaaattaaaaaaaaaaaatttaaaattccctggcggtgcttgtcggcatctcatttattatatttctctttcctctcgcacccctctttactctcttcttctgtctaaggttctgcttcatttgtgtggtctcttgcgcttatttggagggcgatcgtgtgatcagctgtgcttatcgccaacaatttgctcctccaatttctgtggattgccagccacaggatgacaaagtgtccgcttcatcgtcattagcatcggaaaagaacggtgtgctgtcgacggcaaaagcactggtggaagacgacggcgacaacgacgatgcagctgaattgttggcaccctcccggcggacccaatttttgcaggcggccaaagatgcgggaccattcaacaagtgcgtccaattactaaaattttaatcgcaaatgacgctcgagagtctcggcattttttttaattcactcagttttctcacattttttatttgtttgatttgctttcaggttattctggcgaacgctgaatttcattttgttcctgttttcctacatttggcctttggtgcgtggagggaacaaagcgccgccaatggcgacgattgggcggcgaaaggcggcacgggcgacgatggcacggaaggcccaacagcagcaacaacagaaaattgtgttggcaaagactcaattggttgatggaggacaacaacatgacgacaaagatggacaaaaacaactccaaccacaaaaaggagatgatcgcctctctgtcggggacaaaaatgccaaggaaaccgccgccgccaaaattggcactggacgagtggcggagaaagtgccaacagagagaagaacaacggcacccatcgttacggcgctgaaatacgatgaaaatgatgatgaagatgccgatgatgatgatgaggaggaggaggaagaggacgatgatgacgaagataatgatgatgaggatgatgatgttgtgcaacatccaaaagatcctgaacacatgtccaacaatacaacagaggatgccatcaagaaccaaaatgttgcggaccgccatgccactgcaactgcagttgttcatgaaaacgatggccatggtccggaccaggacggtgttgatgctgatttgttggacctgtctgacccatatctctacatgaaattgtgtgtttggaatgcaaaaaatattatgaaaaaacggccaatttttattgcattttttggtaattaggagggagaagcttctggaaacaaaaattcacattataaaaaaacgaatgtttcttgccagtaaaaactgttttaccgtaacccgtaattacaaacttctttaaaatccgtaattcgttttcagccgttcttttttggatgcggagaaaaagaaaagcgccgcactgttggccaaggaaagtccggcggcggcgagtggcggaaaaaagcagcagcagagacagcaccacatttcgatcagcaacagcagtacgacgaggacgaacagtag

SEQ ID NO: 45623 - DNA, 1177 bp, Heterodera glycines
atgacccgcgtgaagacccatgaacttcgggccaagaagaaggaggagttgatgaaaatgttggaagaacagaaaacggagctggccagtctgcaggtttacggattttgaaattttcacttgcgattcctagtggatcaggattaggattaccaagtgctaatgtgctaaaaccatattttgttagggttttttgtcgtaggctagaatgggtggacgacttggcaaatacgggtgttctaggttttcatttacggtccaaaactgactggaaaagacgaatttttttttttttgcgaatggcgactgactaaactagagctcggcctggacctggatccaggtccgggtcattttttgacagcctgggtttttcctggagtccaggaaatccaggtccaccttttttcaaaataccgagctcatgggtaaacaaacatttctttaacaatactgcacaacatccgtttgttcattttcatgtttcaatttcccgctgtgttttcaggtgtccaaggtgacgaacggggcggtgtccaaactgtccaacatccacgtggtgcgcaagaacattgcccgcattctcaccgtgatcaaccaggcgcagaagatgaacttgctcaagttctacaaggtttttctaatttatgtttgactgactgtcgtcaattgttccgacccctcggggattggggtccgtaaatccgggatcgccgtatattgtgttgccagcttaaatctctgaattcattcacgcgaactggttcggttggcatacactctaaattggcttgatagatcttgttcatccgttccgtacaagggatggttggtactcagtttcaattttttttttttgaccggaatgccgttttaaatttttgaggctctcgaaacactagcttttgtgcgagtttgaatttaaacgtactttagcaaatcatttgttttaatttcaaatggtatgccaaccataacaaaaataggacaacatatgagacggcctaaaacatctatcctcaattttttttttttttcaaaatttccaatcaatcattttttaattctttttttacagggcaagaagtatcgtccgattgaccttcgcttcaagaaaacgcgtgccatgcgcagagagttgaccaagcatgagctttcattgaagacacacaaacag

SEQ ID NO: 45624 - DNA, 2148 bp, Heterodera glycines
ttaaaaatagacgaaatattgttgtattctaaatcgaaatgtatcatacaagtacgatgaatgtggacgacacaccggccatccgttgcactgatcggcgcgtcgaattcagcatcaacacgcgcaatccgttccggtaggctgcctagtcaattaaggtattttcgcctaattgctaggctcgggttttgaaagttcccgaatttcggaatcaatatttactgaatttgaacaccttggggatttatttttcaacctcctcgaaggggggttttatttcagagggtgaggtgtcaaatttagggaggggggaattcagtaaatacgacttctcggtttcattctttattgtcaaaattaaatttgttgattacgggttttagttcggttccgagtcttgacccaaagttgaaaactctctctatcctattgttagacccattcccatacttttaatcaattttaatttacatggcaattccgtcccgagttttaactcggcatgccatttccgagcagttccgagttccgttacctaatcaagttcaaattctcaaatctcatttaaataattgctggccaggcaccacattatttcgtctggtacgcctcccccccccccccctcattaaagaattttagaattttttgaaaatcttttttatccatcggcgagttttagttttcttttccagtggcaacctctacgtgcagggcgagttcggcttgacggagtgccgtcgcgagttctacaacaacgaggcaccgtttgcctcgcttgaggtgcggctgggcgactgtggcatgatccgcgagaagagaccgcatgggatgagtgagtgccgggaatttgattacatactaatcaatacaacgcccgacggtgaccagaaccaacattttaccatatgaaattaataagggggagggtatttagataccactaatcaattttaatagcaattgataatgatgacatgccatttttgtataggctattctctgatcctgatcaccaactttcatccccgcttcgtcacccgggttgaccgtgcctacaaaatcttttgtgcttatcagcaagcggaacgcccggttggtgtcgatcttgaagttgggtgagttgttagaaaatcttcaggattatgtaatcatttcaaaacattcggatattgataaggatacgattaaaaactaacgcgccgaatagcatttatcttgatcacttttgcattttttcgcgattgatcactcactgatcataatcaaaaactggttgatccgttatccgttctcccatccgtttgttaggtctgtcccggaagagtcggtgagttcggatgcgcttatggtgcccgaatgtgagtacacaatgcgtatcggtgatctgaatgggccactggcgacaggaacaggtgaatcctgatcactcaaattgtcgagactcaaaagtctcgacgaattaccgctctcgacacatgtttccagacttttgggactcaagagactcgggattttcttaatgaattttcctagacttaagattctcgaaagttaagggagaccaaagttgatatcccaagattgttgacaacattctaaggctctctaaaattattaccagaacacccactacttttatgtaggaaatcttggcatcatagttttattgacttttgaaaaaatagtgaaaaaaattttcaaaattttttttcatgaaattttcttctataattctgtggtttaaaatttttaaaaaacgggggggacgaactgcttccatgtcagagatcacattccgagacccatgaccatttaatgaaattgttattttaaacacaaatactttaaaattccgagaatgtcttaaataatttttttggcttttttttgcagtgaaagttggcgatctgatctatcaccgatgggagtgccaacggtcggatgcgcatggaatgttggtgaaaaactgtcgggtgtttgacgggggcaacgacaatgtgacactgctggacgaacgggggttgggattaagcgaaaaatgaattcataaaacaaattcagaggccataaaaaggtctaaaaattaagtacataaaattagagatcaagtctttcaaaatttaaatttaatttacaaatgacaaa

SEQ ID NO: 45625 - DNA, 2670 bp, Heterodera glycines
gtgttcgaggaaattcgtcgtctttacccccgccatttgaatggcatggaaatttacagcaccgcgctgtggcaactgcacgactccaaaaagttgtccgccctggcgtcaaaaatggccgaaattgcgcgcaaccaaccgcaaacgtggtgcatcgcggccaactgcttcaggtgggcacacgcaaaacaacaaattaaatgaaaattaattcggcatttgcccttccccaatttcagtgtcgagaaacagcacgagacagcaattggttggttgttttgcagacattacccgccatatttcgatagacccctttccaatggggacattttccactttaatttaattcccaatcccgaaaaaatgtttggcctacgaaatgggttccagtgttttaaactcggaatcggtacaatccatttaaaaggtccgggattacgtagaagtgattaggtactatttttgaattattttttaaaattgttgatggcggcagtcgttaaactttccctccaaaaatgcacattttgcctttttgtaaaaattccgccgttaaaagagtgtctggagcgatcaatccgtcttgaccaccgttttgcctatgcctactctctgctgggccacgagctcatcgacatgaacgactttggccgtgcggcgcaagcatttcgaaaggcggtccaattctcgcccaacgactacagggcttggtacggactcggcctggtcaatttcaaggtgaatcagaaaaaaagttacgaattttagtatcttttccgcttgattcccaaattttatttaaaattttacaatttctgaggagaatgagtgaactgcttccccccccccaccgtcgcccctgggaggggtttaaaaaaatttcctttgttttcctccattttttctgggtttcttactgtgtattagcagcagtactacaaatactgtatgttcataccaaatgccaccactttttgacaattaaatgtttaggaagaacagttgcaaatggctcggatgaatttgttacgtgcggtgggcatcaacccgaacaacaacgtgctgctgtgccaattggccgtcattgaacaggcgctgcacaacacggacgcggtcccgaacaaaatttgaaaaacttaattgacaccataaccatttgatttttcaggccatgcaatatctcgagagtgcgctcaaacattcgcccaacaatgtgccgtgccgctttcacaaagtgcgttcccaattcgtggccacaaccatttgttgtctctcagaatccgggaaaactggcacatttgtagtcattttcgctaaaaatggctttggccattttggggtcaatggaaaaaatttcgtaactttttttttatgtataccatttatgtcttttgtcgcggaccgggtcgattgggccccgccagttgggccccatggggcagtcacttttttggtcggcttttgatttactttcactaaagaaaaattatttttaaaaataaaacgtggtttttaatcgttaactttggttacacattaattaaaatgtatttattttcatgttgggttcgaacccgggcctccaaaatatgaatttaaccaattgagctacaaaaaaaaaatactgaacgaactgtcattgtaagaattaccattaatccccaccgctgaatgtaagaagtatttaggtgcagaccaaaaaattttgaagctgctgactcagagtgaattttttcatatgtaatgaaaaatttatcatccccaaaaatttattcataaaattctaagcatgcatatggtaatttcgagaaacaccagtcaaaaattcctaatgttcagtgggttaaaattccgtgtcagtctcaaaattctctcgtctgcagtgcagacgtttggacttttttcactattttggcatttttactcactattttagttaactgtttcgggatttttcgtcactaaaagttgcttccctagtaattagtaatacatcaaaaataaatataatgaattaaacaaaattaaatgcaatgtgcctgttgtataaatctaaaaaatttgataatataaatggaaataatttgtatgggattggcgcccagttgggctggcgcccagtcggcgtcgcccagttggcgtcgcctagtcggcggcgcccagtcgacccccaccggtttaacattatgaattttatcgatgttctcgaaattatcagataaataggttgaatttaatacttaataaattaggaacaatttcaattttttaaacactggaacgaagaaaaggtgactgcccatggggcccaactggcgggcccaatcgtaccggggcccaaccggcggggcccaatcgacccccaccgcttttgtcgtgccagtttcaattcttttttaaatgccttcacattaggccaggctactctttgacattggcaagtacgaggcggccagggccgagttggaggagctccgcgttttgtcgcccgacgaggcgcacgtgttcttcctgctgggccgggtcaaccgcaaattgggcaacacgcacatggcactgctgaatttcaggcacggttttacacccaaaattttggggacaaaatcaatttactccactaacaaaaattaaaaaatagcgtttacaaagaaatttcaagtgaaaaaatga

SEQ ID NO: 45626 - DNA, 824 bp, Heterodera glycines
  unsure (1)..(824): unsure at all n locations
atttatgccggtcaactcgccgttcttccgaaaacccatcgtctcgttccgataattgaacaaatgcgacgcgaagaaagacatcatttggacgagatggagcgattgatagtcaaatacggagtgaggtcgactgcgttggctccgatttgttcggtggccggttttatgttgggtgagtggggacggagcaaaagaaatggatttataggaccacaatttaacaaataattggcttatttttccttttttcttaaggtgttggcaccgctttgcttggcgaaaggcagcgatggcatgcacaattgccgtggaggaagtcattggccaagtgggcacttttactgaagcgggagggagggtgcttaatctgtcaatcatntaattgtcattgtctcttaccatttcccgtcctttcattgattttattattcctaaaattaaatttggccgcactttggacttttaatagtgaaaaaaggttttgtccatttctttgtccgagggggaaggaggttaaaatatccatcaaaatagatataatttcattaataaaaataaaagtgaaatttaattcattataaagtttctttttttaagcattacaatgaccagatcaaagaattgatggcggatgatgccaatgccaaccgcgaattaatggagaaattggcccagtttcgggacgaggaattggaacaccacgacacgggagtgcagcaccagggcctggaggcacccttctacgatggtagtgggcacaattacgcaccaaatgccattgctcccaaattttcagctctgaaaacgatcattcagacggg

SEQ ID NO: 45627 - DNA, 1802 bp, Heterodera glycines
cgcccggggaacggaggagcgcccacgaaaacttgtcaattcaaggtttaaaacatttttaatccatttgttgacccattttgaatgcttataaatattggcattaattgtatattttgtcacccccaaaattttgggattttccattgaatttgcgctactaaattaagatgaagagcagggggttttattgcagttcaggaccataaaataattctgtaatgcgctataatatttctataatgattttcgtttcaaattgtaaatatttcccctcccccgcctattttcaaattttgactgttttccccctcaagttggttctgctgggcgaaagtgcggttggcaaatcgtcgctggtgttgcggttcgtcaagggtcagttccacgagtaccaagaatccaccatcggcgccgcctttctcacccaaacaatttgcctggacgacgcgacggtcaaattcgaaatttgggacaccgcgggccaagagcgctaccactcgttggcaccgatgtactaccgcggggcccaggcggccatcgtcgtctacgacatcaccaaccaggcttgttttaaacccagtggtggacttgggctcttgcaaaaacccgtccaaatctaacatttgcggtcccaaatttcagttggttagtgatcataaaaattaataggcatggatttgtggcccatatttcactactacccaaaaaagacctttctcagtgaatttcgttacggttacgtctattaattacttggaccttattcgtcatttaaccgacatacaaaatgtagagaaaagccagttttttcgtgccgtacttgcatctgaacctggattttatcccatattggaccttgattttctggacaggatccaggcctgaattcatattatgctctataaatatgtttatatttttttataaattaatttcctttttttttgcttccataaaacgctctctgtcccttccttcgtcaggaatcgtttgcgaaggcgaggaattgggtgcgcgagttgcagcggcaggccagcccgaacattgtgattgcgttggccggcaacaaggcggacttggccgccaaacgcatggtggagtacgaggaggcacaagcgtatgcggaggacaacggactgttgttcatggagaccagtgccaagtcgtcgatgaatgtcaacgacattttccttgccattggtccgttgtttttttttgtttcagtgcttttcgtcttccctatcccacccgaaatttatcattaaatgtcaaactaaaatcccagactttgtttttcaatcgacagcaccccatttcgatttctccgtttcgatgcttatttattgaagtttgaatgccatttcaaattgatcatttccaatactgttccggcaacaagaaccgctaggcgccgacgggaaaatttttgagaaattgttaaaagaataaaaaaagcccattttcaataaagattttttacaacatgaatgtggttatatacaaataatttgccatcacgagttgtcaataagcaaaattagcactgaaatattctgaacttgacagttcgttctgatttagtttaatcatcatctgtcgatcatatagaaaaataaaagtttcagcattttcaaatttaaattcatttttttattttttttcaattttgtcccctttcagccaaaaaactgccaaagacggagggcggcggcggtccgtcgggccacggacgcagcggcgtggacatctccgcggcggaggcggcggcacagcagcggcgcggcacgtgctgttccaag

SEQ ID NO: 45628 - DNA, 1342 bp, Heterodera glycines
atgtcggattggtcttttgtcgggttggttttttgtcgttttttattggcgttggtgttttgtcgtttttgggtgagttggtgttttgtcgggttggtgttttgtcggttggtgttttgtcgggttggtgttttgtccgcgcgccttccttccttctcttcccattcccaacacctccctttcctcccctcccattcgtcgattaacgattaacccactttttgctttctctcctttccacatgtgctagacatcgctgcatctctgccttaacatttattcagcgcttattctcctctgagtttcatttctaattttctcggtctttccaatttcatcactttttctttcccaatgtaactgtaatgtcatcatttttatagtggccttaatacataacatttgaattatcttttagcgatcgaattcaacaccctttcaatttggctatcatgcaaatcttcgtcaaaactctcaccgggaagaccatcacccttgaggtcgaggcgagcgacaccatcgagaacgtgaaagcgaagatccaggacaaggagggcatcccgccggaccagcagcgcctcatcttcgctggtacatcgacttttgatatgccgaaacaatcatttttatacccaacccttattttcagggaaacagctcgaggacggacgcaccttggccgactacaacatccagaaggagtcgacgcttcacctcgtcttgcgtcttcgcggagggatgcagatcttcgtcaagacgctcaccgggaaaaccatcaccctcgaagtcgaggcgagcgacaccatcgagaacgtgaaagcgaagatccaggacaaggagggcatcccgccggaccagcagcgccttatcttcgctggtacaatttgatgtgccgcaacttttaatcataaacccttgttttcagggaaacagctcgaggacggacgcaccttggccgactacaacatccagaaggagtcgacgcttcatctcgtcctgcgccttcgtggtggaaagaactagaacgacgaacggaggagatgattgatccgtatcgatccatattttatgtaacttgagaccgtcctgtattgtgttccgttttattcatcatcatgaaatgtatttcaatgatcacggaacgataaatccatcaaaactctgtcttatcttctcccgtcggaaaattaaggttttgtctatgaaaaatttgggcttagaatttacaaagtaattggtagaagtaaacatacgtaccacaattcgttggtacacacccaacttgtactttgagatgagttccagctttaaagtttacttacactcaaaatggggtggagca

SEQ ID NO: 45629 - DNA, 1261 bp, Heterodera glycines
  unsure (1)..(1261): unsure at all n locations
atgggccaatttatttttnacgatcttcttttgttgttaatggaaagtcccttttccgattgtccaagaggcgttggagaaggccagcgagggaaggacttgcgttgtaattgcccaccgtttggccaccgttcaatcggccgatttaattgttgtgatgcgcgatgggcgcctggtggaaatgggcacgcatcagcaactgctccaacggcgaggcctttacttcggactgatccaaaaacaaacgacacccggggcgatgggaagcaaagcaacgaccgattgaccaaacctagcgaaccgacctcatttcaaaaaccttatcaatcagttttaaaaagcaaatttccatttggcaataaaaattcctcaaaaatcagcatttctcttaaaacaccaaaaaaatgcaagccaatatttaatttaacagacatgttttccgtttaacaattaaaagcatgaatttcttgtcataagaagaattaaatagaaacaatgttccttgaaaaaaagttattaaaaaatatggcattattttcatcactatttaatttagttaactatatacagtcaggtgcataagtatgtatcaggggtgggacgcgactgcgattcgcggcttttttttttgcgcgaccgcggaaatttgaatccgcgactggggtatttttttgggacaaaattttataaagaaaattttttgaagtgattgtcttttttgaatttgaaaactgacagatgaactgcagaagtcgagtcgaatgaagagaggccgaatttgtgatgtttgaaaatgattcacgcattaaaatgcagccccttttatacgctcaaaaataaattcggtaaaattccctttttcagcaaaggaaggtgattctcctgaaaggggtcagccggcagaaatgggagctcgcacattcgaccatcacgcagggcgctgaactgggcaagggcgcgttcggcgttgtcaagcgtggcgtcttccgcgacccaaccatcgggcagccagtgcagatggccatcaaggaggtgtcacagacgagcacaaaggcacaggtagaatgggcgggcaaaaaattgaatttcagccttttaatcgattcccctccccactttttcagatcaaggagttcatgaacgaagcgaggatcatgcgccatttggaacacaaaaatgtcatcaaattctacggcgttgctgttgggcgcgaaccgctgatggtcctcatggagctggcgtccaacggctcgctcgacac

SEQ ID NO: 45630 - DNA, 1329 bp, Heterodera glycines
atggcattccataaaattgacaacgatagtgctaactcaataactaatgccttagacttttttcgaattccacccaccaatgtgagcgtctcttcagcaaaagtgtttgagctgctgcctagtaatccactgacggacactccctaccacttcaagcttcattccagccaaaactttattgatttatccaaatgctacttacaaagtgaattccgaattcgcaaagaaaatgagcatggtcagctgattgacctcgcagctgacgaggttgcaccgatccagatgattggtcagactttcattcgaaacatcaaaatgagcataaatggacgcgaagttttcaattccaattctctaatggcctacaaaacttacttttcacacgaactatcctattccaatacagcaaaggactcgcatttgaatgcagcgggctattaccgtgacaccggcggcacgcttgagacaggggatggatgcattgcgcgacgcaacctgtttgcgggaagtagaacagcgcaattcatggccaaaattgacgccgatttgttcaaccaacctctttacttgatcaacttctgtgagctagacattgaaattttaccaaatgataacgactttgtcctaatcactacgcccagtgttgcccagggtgttgcagccgctcctcgttaccgcttcgaggttgtcagtttgaaaatgtatgtgaaaaaagtctcattgatggatggactggcgttggacgttgcgcgaaaacttgaagtgaaaccggcacgatatgctgtgaggaaaacgctgatgaaatcaatgttcatcagtcatggacgtttcgagtttacagccaatttgttcatggaccaaatcccccgccgtatcacaatgggattggtggctaatgctgattatattggaacaatttcgcgcagtccgttcaattttcaaccgtttaatgtgcgcgagatctcaattattgctaatggacgctcctttccccaagcgccatacgacttagacttccctaactggaaatatgttcgccctttcaatgacatgaacgaagcagtggggttcgccaactcattggaaagcaatggaattagctatgaacagttcggaaaaacccactgcatttatgtgttcaatttgaccaacagcggcgatgatcaagctgcgctgtttgatcttataaaaaatgggacaacagcggtgagcatcaaattcaaccaggcagtgcccgccggagggataatgctggtggtgatgggtgaatgcgactctctggtgatgttggacaagaaccgatcaataagcaccgatatcactatttaa

SEQ ID NO: 45631 - DNA, 568 bp, Heterodera glycines
gtgcatttccgcgaaattccctcccacgtgctgcagaaggtgtgccattactttgcgtacaaggcgcgctacacgaacagcgcgacggaaatccccgaatttttcgtggcacccgaagtggcgctggaactgctgatggcggccaacttcctcgactgttgaccaaacaaacaaacaaaatttgatgcaaaaatggtagcaacgacagacagacgaaccgatggccagacaaaacactgactgattgtgattggcaccgatttggaatttttgtgccaaagataaagccaattattaatttgtgaacgacccacacaaaattgttttttgcggattcgtttttttatatttatgtaggagtgcagacagtgagaagttagacaacgaagccgcgaaaaaagagttggttttttactgttttaaattgacttttcattcatttgcccttcgccgctcacagttgagacagtataaaaagcacacgccaatgctttatgttttggcacttttacagtgcaacgactttagcatctcttttttggtttttgataaaatcgtggaaaaataa

SEQ ID NO: 45632 - DNA, 2170 bp, Heterodera glycines
agtacggtcatcagcagcactttggctcctggtggtggaacgacgtttgtggctatgtgtgcggcaatttgatgcagggcttttcgctcggcggatggaaagtgtgtcggaaggagaagcatttttctgactttttgatttattggcactcggaaaataaaatttcctggggcaatctaagtgtcacactctttcttgtccaggaacagcacaatgtgcaccacgcggcgcccaacgtggacggaagggacggcgacttggacttgttgccgttgtgggcgaccatcggcacacaactcaaagtggcgggggaggggtggaaattagggcgctaattggggatggcatcggtgccaaaactgacatatttcgaatttgatttccaaattccttccagcgcattgacagtgcttctccgctcgcccatctgttgcccttccagcatttgtattggtccttcgcgttgccgttgctccgtttctcgtggctgctccaatccgtccaatttgtgtgccaaatgcggcacagtttttacgatgtgaattcccatttttggcattttccattttcggcatttttttgctcagatccatcgccagagggcacttgttgagcagtgttcgttggcattgcattggtcgttggtgctcgttcagctgtactttttgccggacaatttggtgaaatttgagacacacttttttattactactctattctatgcttttgtaattgtaaatttaattcatttccccgccctctaaaaaatgaaaattcggcaaattctccggcagattttcgggatcgttgaccaacatcaatttcgactaattccgaatccctaatccgaattcgaacaattcaatatacttttcggtcccccccttttcaggcccgtctccaatatttcctcgtctccaatctgttcgccggtttcctcatcgcacacgtggtcacctacaaccactactccaccgacaaattcgcatgtgcgtgaaaacggcactcactgatttttgggccaaattttcgcgcgagaagagaggagggggtgtcttgggtctcggaacttgaaaaaatttgggtcgcgagtctcggcatttttctcgttccgtttcaaatttatacccgaaggttttgggccatcccttcccttacctaatacctgtttttttcgattttgggccaatttttaagaaaattaagtttttcggatccgacggtgtcgataggcacagccgggagaaaaattgaaaattttgaccacattttagcagattttcatcaaaaaaaatactaatttagtgggttttcggagaaatttaacgaacttttttggataattaggggtgaggtaggccttggagggggtgccaacaaagaaaacgaaaattttcaggaaaaatactattttttccttaaaaatttcggctgcgaggctgggaccgtccgtccctttacgcaatttgggaaatctttcggcttccatgcttaattccgtggtgtttgaattccgcctaatcccgccagatgacgacccaatcctggagaactttgcctgtctgcagctgtacaccacgcgtaacatgcggcccggcccgttcatcgattggctttggggtggtctgaactatcaaattgagcaccatttgttcccgacaatgccgcggcacaacctgaagaaggcaggcaaaaagagtgcccgttagcgttgaagcagaaattgccagcccttttaatttgctggcatgtatgtttaatgtttagcccatcccccttgtcaggtgatgccgttggtgaaggaattctgtgccgaaaatgacatcccttacatggtacgtatgtacgacatggcacggcaccgtgccaaaaataatttaaatcgttaaattgtttttttcttgagaaaaagatttctaaatcttttagggtgcaaaagtgcacccaattagcgggtctcgtcacatttgccttttatccaacttggtcagatcaccccttgattgtgatcgggacacccaaaaacacactgaaaatctagaaattttcggaaaaaaaacatttttttattaatttttcggtggacgattatttcacgggctttcgcctggtcatcgaacatttgcgccgagtggcggaagcggccacagaaacgctggtcagccatcac

SEQ ID NO: 45633 - DNA, 2663 bp, Heterodera glycines; identical to SEQ ID NO: 21256

SEQ ID NO: 45634 - DNA, 751 bp, Heterodera glycines
atggcacccgcaagaaaagtgccacggttgcacgacaaagcagtgcttgtcaaaagtggcaccaaatttgtggacggtcggaagcaggagttcgttgtgggcaaagagattggacagggcggattcggacggatatacgagggcgttcaggtgaggtcgttattcaattcgattccatggaaaggattatcattctactttttgtacctattattggcaaaagaaaaatgttcccattaatggcactgaaattcatagattttttcaaatatatttgtctcaattttctgtaaattcagagcggttctcgtcatgccgtggccatcaaaatggagccgccgtccaatgggccgttgttcaccgaaatgcacgtgtacatgcgcgtgctgaagcctgaacacttggacaaatggaagaaggacaaaggtggggttggccacagatttttgaggaaaattaaggtatttttagatttgtggaattttttgaaatttttaaaaattttccagcaaataatggaaatttttttcgaattccccccccccaaacgaaaattaaaaagtttaataggcaaatttcgtaacaagtagcactcaaatttccaaaaaaatttttccggcggcgcctatcggcaccgccggacctacattttccactatttttacaagtttttttccttaaaacggccaaaatttggtcatttttagtgaaaaaaaagtgcagttgttacccagcagtggaaaaaaagtaa

SEQ ID NO: 45635 - DNA, 2255 bp, Heterodera glycines
atggcgaaaatttcaaaaaaaaaaactcattcccttcaggcactgatcccggacttggacgataatggtgtggaaattcttcgtcccgggctgctcaacgacacgttgccaagcccctacaaaaacaacaaagctgccgcggcggcgaacagtggcgcattgccacccgatttgtcactgattatgtgggcccgggaaggggccgaggactacgtgttccatctgttgaccgggtttgtttgttgttgtcagcatttttaaaaaagcgtagtgtacagtgacggaggtcccaagattctttagacccaccaaaaatcaaaaaaattaaaaaaaaatttccaacccaggactggaagagcagcgaaaaagttagtcgtacggtgaaaaatagagtagagcgggaccgggaccaaaacacggacaactgagtaccgaagtcccggttttgaccgggaccgggactagtcccggttttttcccggttttcccagccaaaaattcccgggttttcaacccgaaaagtcccggtcccggttttgcccaaaattcccggtcccgacctactctagtgaaaaatacgcgagatttttgaaaaaatttcaaacgaattttttagttttatgaagaattactgtttattgaataggtaaattttccaaaaattcgaccatttttttaaatttttgttttttgtacacctgtcagtgaatcaagaaatcaagatgcttacaatactcagattgtgatcagactcttgatgatttcattgtcagagagaatctacccccccccccccctcatttgttgaattgtttcttttcaaaatcctgtaaaattctcgcatttaaatagcatttgcggtgtttgtcggatacggacgaaatggggaagttggactttgatttccaataaaaatttaattcctcgttttttcaattccccaaaatttcccattgttgcattttgtttggttcagctatggctttgatgcaccggcgggcattgacgtggaggagggcaaggcgttcaacccgtacttccccaacggctgtgtgttggccatgccgcaacaactgtttgacgaaggcattgactatgaggatggcacaccggcaacaatgtcgcaacaggccaaggacatttgcaccttcttgcgctgggccggcgaacaatggcacgacacgcgcaaacgctgggcatggaaggtcagccaatttgccgttgtcatttgcggtggttggcacttaccccagagttatagtttcgtagacctctaggccccccaaataaaaaaaaaaacggaatctgcaattccgggggaacaacaagtccggaattcgtaccccggggggagggcaaagatgggatgctctgtttattggactgctctacatccacctaaattcccgagactcgagaaacgtttcaaactgaacaaaacgttgccgccgtagcgtcgccggcactcaaaaatttgttttgaaattttttgaaaacaaaaattcatggaacaaacttgttttttatttctttgaaattttctttccgaattaggcttggcaataaaaaaaaatgtttttcgcgaagttttgtcccgccacatttcagcggagccgtttcaggggtacaccgagtgcacccgttcaacggtgccggttagcactgccggaggatttttttttttgcaaaattgccaataaattgatagatttcaaaaagtgttatcccccatttttcttttttattgcctcgaaaatcggcaaatttataaccctacaaatccaaaaaaaaaaaaaaaattttttttcatcggcaccagatccttttgatggcttcgctggtgccttaccagccgggaaaatttcattttttcaaaaattttcacatatacacacacactcagttgatcacgctgttgccactgctcacgtttgtgctactgtacgccaagcgcaatgtgtgggcactgatgaagacggagaaggtgatcttccggcgactgcccggccgcgggtggacgcccgagtcgtcggcgccaaagccgcccaaggacgagccggagctgaaggtgatcgagccgccgcagaagccggtcgtctgatcggtccattcattttgatcagcgacggatgaggagggatgctttgatcaccaccacaaatatgcacacacattttgtgtacaatgaaatggaaatggtgttgctgctgctattgtgttgtttgttatttgattgagtatttaggttgaataaa

SEQ ID NO: 45636 - DNA, 360 bp, Heterodera glycines
atggcaaatgacgcaaatatctttgtcgccgcaagtgccaccaaatgtgtgatgcttttcgccaaaggatttggcgccaaatttactcctcaccattcgtttgttgtcccggtgatcttcgacaagttcaaagtggagaaacggttgctcagagatgctctcgtcgagtgcatcgatgtcatcgcagcattccgttctcttcgggccaaagacgttcccaagggtttgctgaaggatttggtggccattctgagcaaagtatgcattggggaaagggacttgcgctgtttcatttcgctcgaattggccaaagatgcgaacaaaatggccaagattgctgaaaaacgtgtcactgcttag

SEQ ID NO: 45637 - DNA, 3255 bp, Heterodera glycines
atggcaaaattaatcgctgttaactctgcaaaaggacagttttgtgacgggtattgttatcacaaacacaaaatgacaaaaaataaaacttggtggaagtgtgaactttaccaacaaggatgcaaaggttggggttttgagagtaatggtgagtttttcggaactcgaatgcataatcatcctccagaccaaattctacttcaaatcgagagagaacagtagatttgaagatgtcaaacatagaaatcagatttcaccttggaatttcaaaatatcacacgaactttatttttcctctcagctgcgtgattttgggtaacccaaaacttggaaaaaaggttaggtttcggttggcacacacccctcctataggctagggattgttggagtgagcaaggtttaatgaggaaaacgagatactcaagccttttaatccatgaaaatgtataatcttattaggtgtaatctaataaaatcattacattaaaatgaatttttggacaaaatttgcgattttaagctttttgtttttactaaaatattaattggggtttttacatgagtaatcaatatcttaatatcgtcccgatctttttcaatgccttaagcttggagattttaaaaggtctaagttgggaagtgttttcaattatctagacatattcaaaagctgtataccatcttatgtcacaaaaaaagcattttcaagggaagaaaaataatattataatttaaacattcaaaaatgtagaacggttaaaatatatacggccatggagaagtggcagacgcagaccaattgagcgaacctgaacaggaggaggaacatcaacaacaacaacaaagtatgggcaagtgaaaggaattcttggcctttctattcataaaagtgccaacaaatgaggaagggtcctggggatttgcataaaaaaaattcaaaaaaaaaatcgaaccatgattaactattaaaggaaattcacgggaaatttttgatcagaaacagagggcgagcgtcgcctggtaagattttatgacgtaaatggacaactcttgtataaaaaaaataataataatacctttacaatatatatatatttttgttttttacatggcttgccaattcctcaattaaggcctgaccgacaggttttctcatgccccatttgaatcacatttgttttagaattttaattcgccacttttcagatgatcaggttcaacagcagcgcgttcacttggacgacgagggacaaaatggcacattggaattggacgccgaccaatttgcgcattcttcgtcgaccaacactgacacggacagtgatgaaattgtcaatgtggcacgcaaaaagccgacagtgttcgaatacttttgtatggaagtgtcaaggtacgtgtgccattcaggtctgtaaccagaaaaatcggatttcatggcgggtcagaccccacgaatttttttgctgattttttttttttttgcctatttgtcaaccgattttggatcaaattaaacatcttggggaaattatattttgaaatcttggagccgaattttaagaaactcgctggtatcgttcaaagtttgccagtttttctcttaaaaactttttcaaattcgggcgctggaacatccacccaaatttttctaactaaaaaaaaaaatttcatttcggttacgggcctggtcccattctcatttttttgtaataaattccaatctttggcttatccccccatttttaaggcgctactcacttcagaatgagaaggaacaatatgcggagaagcggcgcaaagtctatgcatttcttcgaattccagtggaactggaaaagttcatttattacgggttccgtcagtgtttggacgccttttgccacacatttaccattctgccaatacgcgtattggtgagttattgggtcagggccaatttttcaaacactggaacattatccctgaaaccaggtaggtacctaaccgaaaaaaaagcatttcgtcgagaaatcccgaaaattttgtgctttcggcacctaaaattttttccatggttaattttttaaattatagggctctattaacgaaaaatagcgtttgtataagaaataactaattgtgcattttttgtcaaattttgaaattttcaagtgcatttattggccggcagtgccaatgggtaccgccttgattttttttttttttttttgcaacttttactcaatttgttgagaaatcttaaacaaatattcaaaaaaatttctgacctttatttaacttttttatgcggtgttctcatattagaatcaaaattccgttggatagatttctccccgaatttttaaatttcttggcaggcaacctgcctccgaagccttcagcagaatgggtactttttcaatacaaaatttctgattttttaaatattttttttggatgaatccctctgcagaatatatagctaatgtgttaattaattgccactgttttttcagttcaatttgtttgcttgctcagttcgattgaagcggtggtcggccgccgacacctgtgacattctcaaactaatcatcattttttgcgcttcttggttcatgcaatttgttgacacttccgtggtctatcacattgtccgtggtcagggcatcatcaaattgtacattttttacaacatggtgcgttaatgttttatcaaggaatggacggaaaaaattttattaaaaatccaaaaagagggggaaaaaaattttttttttgtcaaaagtcgtgacaatttgttcctggcttttttgagaccgctcgctgattatgagtttgaccattccttctggtaaattccgatacttaactcgaacaaaagatcgaaaaattcaaatttctcgaactatccgaattttgtttctcgaattcggttagacatttttcagaatttgttaaatgttaaatttgcgacccagaaaaactctggaggacgattttttaggactaaccaaaaaaaatttacaagccaaaagctccccccaatcctttcgaaaaatattacctttttcactatttaaatttagcttgaagttgccgacaaattgttcagcagttttggacaggtgcgtgcgtgttaaccgctgtttgcttataatataacgaaaatttttttcaaaatttaagagaaaaaaaattttgtgttttttaatttgtttaattctccgtaggatattttcgacgcgctcctttgaactgcctccgaacggggcacaa

SEQ ID NO: 45638 - DNA, 918 bp, Heterodera glycines
atggcgcaggcagttgctgctgttgctcccgcaccaaatgctaacgcagcctcggctcaaacaacccaaccgcaggttatggcaccatcttatccgttggcttctctctatgtcggcgatcttcatccggatgtgagaaatcaaattaaaaatttttttttcaaacaccgattaatttttttggtattgccaggtcactgaggccatgctctttgagcggttcagcaatgctggtcctgtgctctccattcgtgtttgtcgtgatgcaattactcgtcgttcgcttggctatgcctatgtgaattttcaacaaccggcggatggtaagttaacacatttggactgcttttttttttaataattttttttgcttccatcataagccccttattctgttaagctgaacgtgctttggacaccatgaactttgacatgatcctgaacaagccaattcgcattatgtggtcgcaacgtgatccaagcattcgtcgctcgggtgctgggaacattttcatcaaaaacttgggcaaggaaatcgacacgaaggccatctacgacactttttccatgtttggaagcattctgagctgcaaggtgtgtttgcttaacttcaaacaatttcgtctttattgtccacaacaacttttgtagattgccactgacattgagggaggaagcaaagggtatgggttcatccattttgagactgaggaagcggcgaacagtgcaattgcgaaagtgaacgggatgcttttggatgggaagaaagtgtaaggatgatccccacttaaaattgtttttgtgctattaaatttatcccatcttttttgctttaggtttgttggaaaatttgtgccacgcactgctcgtgagaagcaaattggtgacccgtccaggaagtcaccaatgtttatgtga

SEQ ID NO: 45639 - DNA, 138 bp, Heterodera glycines
ggcggtggtcaattggcacacacaattctcggtgttgattataatgtgcggcttggcgattgccaatttttggttttggatccgcattacacgggaacagaaaatttatcggaaatactgaacggaggctggtgtgct

SEQ ID NO: 45640 - DNA, 650 bp, Heterodera glycines
atgcgcgaatcgtttcccaatttaaagtgcacaaaactgcgcaaggccgagtggcgtgaaattcgccgtttgatcggcaagccgcgccgctgttctcaaacatttttggacgaagagtgcgaagcgctggaggcaaaacggtttgtttccacttgaaaattttagaaattagtaagcccaatttgttaaggcaaaagattcgtgccatttacaatggcacttgcacttcgttggacgaagagttcatcgatttgcccactcatttgccgcgtccgccaattgtcggtcaaaaaatttacgcgagggtaatcctttacaattgtcttttgagagtatttatttattttttgtcaggtacgaaccccgagggacggaatttactccgcgactgttgatgcgatcaccgaagatggttaccgagttgtattcgatagagttaattgccgatgattctccataaattttcgagttttcattttcaggaagacattctccccgccgcttacattaaggtgcaattgtgatgagaaggacagaaactgaataaactcgaatgtttcttatttcaggattacgaagtgatgttcgaccagccttccgaattgctttccgtcaattactttcttgaacaaaaccgtgccaatggtgcg

SEQ ID NO: 45641 - DNA, 784 bp, Heterodera glycines
atgggcatttccgacaacgatgtccaaaagcagcttcgccatatgatggcatttattgagcaggaagctaacgaaaaagcagaagaaatcgacgcaaaagcggaggaggagtttaacattgagaaggttcattaaattgcaaattatttaaattaattagttaataaaaggcaattaattaggggaaattggtgcaacagcaaaggcagaaaatcatggaatattacgagaagaaagagaagcaagtggagctgcagcgcaagattcagaggtcgaatatgcaaaatcagagtcggttgaaatgtttgaaggcgagggacgaccatttgaaaaatgtgttggaggaggcacgcgccaatctcagcaaaatttcggcggacagagagcgctatccggccattctcaaaggacttttgcttcaggttttcggccccatgcggcaaaaaaggcactttttgtccattggcagggccttttccaattgctcgaaagcaaagttgtgttgcgatgccgcaagaaagacgaggaaatggtggcgaggattttgcccgaatgtttggaggaatttcagcggacgtggggcaatcgaagcgaagtaattattgtggaaagggtccgccgaatacaaccttttcaggtgaaaattgacaatgagtactttttgtccccggaaagtgcgggcggcgtcgaattgttggccaaagacggcaaaatccgcgtctcgtccactttggaagcgcgtctcgacctcattgccgacaaagtcagtggaaaattggcgtaa

SEQ ID NO: 45642 - DNA, 1139 bp, Heterodera glycines
atgtacaccgtggacctcaactccgacaagggtttccgaacaatcgaacgattcgtcgaccactaccttcgcaccggaacatcagtcaccagcgtaagtcaaaaatttaaattataaatttagtcatttccctttgttttcaggagcgattcgtcactctcaggaaggccgtgcaccgggcgaattgggagctgtcgcactcatccatcaccgtcagcgcagagttggggagaggggcattcggcgtggtcaaaaaagcagtgctcaccgaacgcaatgggaacaactcgcaggtcgccgtcaaggaggtgtctcagacgagcaccaaggagcaggtaaaggcggagtttgaagcattgagatcgcaaattacacatttttccttttcagatcaaagagttcatgaacgaggcgcgcatcatgcggcagctggaccatcccaacgtcatccgcttccatggcgtcgccgtcggacaggagcccctgatgatcgtcatcgaactcgcatctgacggcagcctcaccgactacttgaagactcaacggagaagtgcgcgcaccagactcttcatgtgcgtcggagcagctgccggactgacccacatccactccaagggcatcatccattgcgacatcgccgccagaaattgtctctactcgaacggcgtggtgagtcaaaactttgttgttttagtaactaatttcgctctgttcccacaggtaaaaatctcggacttcggcatggcgcacagaggaccagtgaagaaaatggagcccaacgcgcgcgtccccgtcaaatggctgtcaccggaagcactcgccgagcgctgcttcaccgcgaagagcgacacgtgggcctacggagtgatgtgctgggagatcttcaccaacggagaagtgccgtactcacaaatggtgggaagcgacgtggcggtatcggtgggtgaacacaactttttttttttgctttttttcaacttttccttccttttcagctgatcaacggacagaggctcgacttcccaagagatgcaccgtcaaaatttgtcgagttcatcttgcagcacatttgggatgcggagacgagcggcagatactcaatggcagcggtccacgactggctgaagcgacacacgtaa

SEQ ID NO: 45643 - DNA, 1495 bp, Heterodera glycines
gatttgcgcacgatccctctaggtcaaagttgcatcgctgccgatttgaccgccaacccttccaagaacagattcactaacattttaccgtacgaccactcgcgcgtgaagctaaagcccatcgacgatgacgacgggtccgattatgtcaatgcctcgtatattccggtacaactcgaaaaggaataattcctttttatctttttcatcttagggattcaattcacgtcgagaattcatcgctgcccaagggcctttgccgtcaagtaaatttattcataaatcattctaagtaatttgataatccttttgcagctcgcgatcacttctggcgcctcatttgggaacatcaagtgccggcagttgtcgcgttgacaaaatgtattgaaaagggacgagacaaatgccaccaatattggcccgacaataatgtacgttttctggcaaatccaaataaatatcagaaataggaaaaattgcagagtcgcagtgttctctacgccgacattgaggtgggcatcagcagaagtgaccacagttcgaatgtatcccatatatgcaggtgacactactgaccgaatccatcgaatatgacgaattcaccatccgcgaactgcggctgaccaacatggccgagccaaaccaaccggcccgaacggtgcagcacttgcactaccaggttgatcaacagccatatagtgatcctctgtttcctttacgcaggcatggcccgattttggcgtgcccgaccatccagccggcatcgttcacctcgcgcgactgttccgcaacaaattgcccccctcgtcttccaacaaaccgaccatagtgcactgttcagcaggtgtaggccgatctggcacgttcatcgcattggatcgactcgtgcaacacattgaatccggacgacccatcgatgtgttcggcactgtttacgaaatgcggctcgagcggtgccatatggtacaaaatgaagtaagggcgagaaaagttcggtgtgaaatagtacaatgctttctctgttcagcaacagtacatcttcattcaccactgtctgcagtatttgctggagaatttctacccctttctgttgtgtccctcctcccaacaactgcagcagcaacagcaacacacagtcggccaccgaccgctgtcctcgccaaatccacacgccccgttcggctcgtccatctcttctcccatctgtgccgactatttcggctgcggttcgtcgtcgtccgttttgtccaacgcaagcagaggggacggcggtggctggtcatcgaaggtgccgatgacttcgagcagtaacaacagcggagccggcatcaattgttattggccgcccacctccgctcaaaataagtcgacggactcttgcgacggaattgtcacgacaataaagcactcaccaccgaagattgaggtgcatcaccctcaaaggaatgacgggtttctggaggacgacgaaggcatcgccgaatctggcctctga

SEQ ID NO: 45644 - DNA, 603 bp, Heterodera glycines
gaatgatgccttcgaggagcaggacctcattaacgccttggagccatttttgatggcggaacgcgacagatcgtaagtgtgttgcaggcaattatcgcaccttcacttcaagaatcccggacgcggaggcgttgcacccaatcggattttgagagggcccatttgcccacaatttttagtaaaatggcggggatgtggcggcaatctgaaatggtcaacctccgttcccgcccctgaaaattttgaaaaaaaccccggctctgtcgaaaaagattaccccttcgccccgtcttttccatgctgtttttgggtgcttccgggttggtgaaactcatccccgaaattttttgaaaaatttttttttatgggtaaacatgcgttagcgtaaaacaaattggttaaataaattgatgtttcatttgtcggtgcctaaaaatgtattcctaattcggatgtttcttaagggtgttgcgcatcatgaaacgcaatcgggagctggagaacgaggtgatgaaggatgtgccgggatggaagaccggcacttggtacggcgagccggtctatttcacgttgggcgacaaatggattgaaccgaatgcaatg

SEQ ID NO: 45645 - DNA, 959 bp, Heterodera glycines
atgtatgcggacgatgttaaattgtatattttccatcaaaatgattcaaatacaaatgatctatctgaagctataaaaattcttgaaaaatggtccaaatctaacggccttgaaatatcggtcgaaaagagtcaaacattgtatattggcaaaaataattcaaaaaaagagtattttctcaatggaaaaattattccaagcttagaaaaagtcaaagatttaggagtaataattgactctaaattatcttttgctgatcatataaataaaataataaaaaatgcttacttaaaggcataccatattttgagaataatgaagactagagagctaaaaactattataagaatgtataagacttatgtcagacctcaattagaatatgctgttgaaatttggaaccctaacttaaaaaaagatatagaaagaatagaaaaagtccagaaatttttcacgagaaaagcctttaaaaaatgcggacttttacatagatcatattcagaaagacttgaaatttgtcagcttatagaattagccaagcgaagaaatattgctgacttaactaccgcttttaaaattatgaagggttttacgagtcttgatgctagtaaactttttactttttctgatcgacccactcgtaggccattacttttgagaatgcggcgcacaaccacaaaaagtaagaataatttttttaaccgtatagccaagaattggaacaaattaccaattgttccaattcaggcagataaggcaaatcaattcagggcattgctaaaagctatgtatgagttctaagggatttcattgacatttgcattgacattatttattcattatttcattttattttattttactttacatttcatattgttgtatttttttttgacattatttattttgattttttttatgcgccacataagagcactaatgtgcctgtggtttgctca

SEQ ID NO: 45646 - DNA, 651 bp, Heterodera glycines
aaaattgtttatatatatatttattgagcaaaccacaggcacattagtgctcttatgtggcgcataaaaaaaatcaaaataaataatgtcaaaaaaaaatacaacaatatgaaatgtaaagtaaaataaaataaaatgaaataatgaataaataatgtcaatgcaaatgtcaatgaaatcccttagaactcatacatagcttttagcaatgccctgaattgatttgccttatctgcctgaattggaacaattggtaatttgttccaattcttggctatacggttaaaaaaattattcttactttttgtggttgtgcgccgcattctcaaaagtaatggcctacgagtgggtcgatcagaaaaagtaaaaagtttactagcatcaagactcgtaaaacccttcataattttaaaagcggtagttaagtcagcaatatttcttcgcttggctaattctataagctgacaaatttcaagtctttctgaatatgatctatgtaaaagtccgcattttttaaaggcttttctcgtgaaaaatttctggactttttctattctttctatatctttttttaagttagggttccaaatttcaacagcatattctaattgaggtctgacataagtcttatacattcttataatagttttt

SEQ ID NO: 45647 - DNA, 2031 bp, Heterodera glycines
  unsure (1)..(2031): unsure at all n locations
atgcttatgccacaaggtgatcggaagaaaatttacgagcatttgtttgaggatggagtttgcatcgcgaagaaggactactgcttgaagtcgcatcccgaaattaagggagtgaagaacctttacgtcatcaaggcattgaaggttttttcttcactaattatttaatatgcatcttgaaatccgaggcttaatttacattcaatgactcatttcactgtttctcgcttaagagtcttgcatctcgtggacttgtcaaggagcagtatgcctggcaccactattatttctaccttcaacccgaagggattgtccatttgcgtgcttaccttggacttcctgacgatgtgttgccgaacacgcacaagcaaaggaccgacgctattcaaaaggcttttgcagacaaaggaggccgaggttataagcaatttaaaaaaaattaatcacaatgtcctttatttattttgcgaaatagagttttgagtattaaactatattgaatcttcggtatttaattgaatcaatgtttttctagacacaaatttgaatgtttttttaaattctctagccttttatcaggtccgattcgcgccgacaccgatcgtgggggttatcgcgctgccgcagataaacaagcggaggctgggcctggtgctgctccgattagtcatcgtcagggcttcggacgtggaggaggtgcccctgctccccaataagaacttcgggaatgcttgatctttgatttctggagattttttttgttgattttttggttataaagagttgatcagttgacatgaaatttttggtgcgatatgtggaccatttgaaattgcttatgtgtacacaaatctaaggctgcgaacaatgtgcgaatttttgagaaaacaattcaatacgttgccctcaattattttcaagcatcctatatgttaaaatcccaccgattcgtatcccataccatctccccgagtactactaagaattgcaaaaaactgcatatgggttttcggtaacttaaggacatcatattttcgaataggtgttgaaaaaatggttctcaattttgtttacgggttttattccatcatttacatgtgtacatagcatatgcgttacaacatcaaatataattattgataaggactccgaaaaacgtgcccaaagtgcaaagaccacatgccgatgcaaatcagagagaactcgtatcacgtaacaaacaacaaccaatgatttgacggatgataattgttttccccattttagctatccatcctaattacgggacgcttgtcaatttggacacggagattttcgcgaaggaacaacaggcgaaaggtgtggcagtggtgggcagaaaaaaggggaatggcgcaactttctgtgggccaactttttccccattttcagatgccaagcgaatgcctccaccagctccaccaaagccatctcctccacaaactgttgctgctgctcctggtgggcctcgtttcgtttcgagtgagtgtgttggacatgacatcattaacactgcaacaaaaatgattcccctgatcattttttagcgcaggatcccaattacgcaactcttggccaattggacccgaacatttttgagaaaaatgcgccaacaaaaccgccacaacaaaaacagcagcagacaaaggaaggacagatgatattcgtttcgagtaaaaccattttttgatcagagaatgttcaattcaaatgctttatctctttttcagcgcgcaatcccaattatccgacgctggccaagcttgacccggacatttntgtgaagaataatgcaccaacaaaaacagcgccaatcaaacagcaggcgaaaggagggggacggggttatgcgacaagtaaaaaatgatggataaattcgttggatttatntaataattctttttcttttcagcaactgatcctaattatgcgacgcctggccaagtggattcgaaaatctttgacaagaataatgagaagactggtaccgacgacgacagcgaaagcagctag

SEQ ID NO: 45648 - DNA, 2758 bp, Heterodera glycines
ttggcgtagttgcggagacagtttcgtcctcacaaattcgactttcatgggctgacccaaatgagaatgcatttaaccaaatgtacaccatcaaatacggaataaggtacggctaattgcattttttattattattaatttggtgtttttttagcaattcagatgagtctcaacataagcagctgaacatcacagaaactgagcatatcttcgatggactgaggccggacactttgtacgaatttgctgtccgactggtccaatcttctcattggagtttgaacgcgctcaaccgaacccatccggcaccgccctcctcgccaccacgtgatttaaccgtcattggtccccagttcaacaaccaacacgagaatgctgatcccggcacgataacgcttacatggcaaccgccaaaatatgcaaatggagaaattcaaggtcctttattgtttgtgctgtttttgcaacattcaaatttttaatctttttagttttattacgtaatgattttgttagtgattttccttataataaattcctcttttaaactgtatttgaaatggcttaaaagccttaaatccggaaacataacatttgtacaaatttttattgcttttcagaatacattatgctcttttcggatcggccacatttgcctgacagggattggagtatggaaagtgtgaagggcgatcgactttcgattgaactgcgcaatcttcggccccgcctcacctaccatttcaagctgcaagcccgcaatgtgaagggttacggtccgtttacgcctgtgaccagcgtcaccaccgcggacactttcacttccaatccgacatcgaatggaccgagaaattccgtcaatgccggaagcaattcggaagcatttgagattttaatgggccaatttttaagtggattgaggtggtcaagcattgctcaaatgcatacaatttctcatttgcgctgcttacacaggtccaacttggtcttcgtgctcattggcattgttgttgccgtcgttgtgctgctgttattcattgctctgtgctcactttgtttctatcataacaaaaatagcgcttcttccaccgctgcagcggccaatcgaccgcagcagagaagcaaaaaagagcagcgtaacaaacggtccaaacaccaccaacaggcttacatccccggccgcaaaatgtccgtctccactccgtccgccgttgccgagttggacgacgatctttggctggtccatcagcagcgaaattcggcagcaaaccctggcggcgcacgttttgccaccattgtcaatgcgtccaatgttgacgtgagtatatttttttgccaaattttttggtccattagcttcatttttctaaacattttaaagggctatggatcgtccgttgatgatgagacgggcattcttctaattgacggacaacagagggccttctttgcgccggcaaatgcagctggtgggcctaactttcagtctgcccaaatggaatgtacgacgccaaaacactaccagcaaaatgcgtaccatgcggcgacgcaacgccatggtagtttagggtcatgacttattcattaattattttgaagtaatcatttcgtcttttctcttctaatgagtatctttttctttgtcctcgaattgttgacatgttgccccttggtgaagtatttaatcattacaaatattctgggaaatcgattaaaattggctgtttgtgatattataattgcatatcagggaggactgaagacagagagaaaggcatctctgtcggaggaggtgaattttatgggggcggctccctaatggagtcattccattcgatgacgaccgtcggcgactcgccaaaaagtagcaacaaaagtcgcaaattgcaccgcaattccttgccgccacacatttgtccgtccaattcgaccacgatgtcgccaccatttgccaccaacaacaaaagtccacaaccgaatcaacattggcaacacaattgccatgcttttggcaagcatgaccattttggtattaggggaggaacgcaaaatattgccgaaacgaaatttggacggcgaagtgactctccgtatggcactcgttttccatgccagcaaggagtggccggtattcgaacacattgttgtggacaccttagctcgttgaacgcattggatttgagcatttctcctcgtcttggccatacacttcggcaaacaaatgggcctaattctattgagcgaactgcggcccttttgaacgaacttgacgaaaaacacgaaaccgttctgccactgcaacgtttccgtgttggcattggccttccatcgatgccgttacaagtcaaacaagcaaagcggaaaacaaccgctcattatgaagcaacaacagcggtgacacgaaagcaagcagcacccacgaaaagcgtaaattttgcttccaaattggtcattgtctcgtcggacgatgacgacaacggcggctacaacaaatggagcaaaaaaacaaaacgccaatggaacggaagtaaagacgacaaagggatttcgttcattgacaattcgctggtcgatgacgttgatgaagattataaatatgccaatgcggacacggagaatcggcagcagaaggaaacggagattgaaaatgctaacacaacaatgaaaaagcagcagagaaatgccgccgatgaaaagctgaacggatgcgacgatggatcaaaaaatgtgccaccgccatcagtcgttgatttggcta

SEQ ID NO: 45649 - DNA, 1124 bp, Heterodera glycines
tcaaatcgaacaattgcatcgctttttcttcaccactgccaatcgcttcgtacaaacgttggaaatgttcatcaacggtgactttcgcttctccgcccttttcggccaacttttcggccttggccctgcgccggagggaatgttaagcgacggacgattggagagggactgcttcaacatgcgcaaagtgatcgttgtcagcactcttccaggtcgtttttcttacaatccttcgaccatatgaaagtggtttgtcttaaggcactctcttcggcatttccaatgagaatggccacttgctttggtcgttgtatttgggcaatgactttgcgccttatcacaacgaacgccattctgttgaggcagcaagggaagggaaagtgccgttgctcatccaacggggcacggcattttaccaatggccgagtcaggcggccgccgtattcaatgcaaaggttggtttgaaatcgcagcgaataaaatcaattttttttgttttttaggattcggctgattctgttgttttgtttttcaacccaatcaccggcactcaaattgaacgggttcgggttagtatttttaccttttttctgatcataagaaattggaattgtattatttttattttcactgttatttctgaatttctcttttttcagatccctggcgggctttttcggattgaactttggccttttcccaactcagaacaactccatcccctgctgattttcaagaattctgacccaacagttgtggaatttttgccaaaatctatgccaaattccgagcctcttaaacagacttatttgttcaatgttgggcacgaaaagggcaccttggttggatttaattatatacaatacttttctctagccacgcaaatcccgttttcataaaatgtattaataaatattcagcctattttacttttatttacactttttaaaaacgctgaatcatttttttgtgttttttagctcggccataaggttgaattttctgccgatggaaatgctcgattatccgaacaatggatgacgcaattgccatggagtgactccgagtccatttatgccattgtgggaaagtctgctaatggtgaaccaaagtctacacattag

SEQ ID NO: 45650 - DNA, 1342 bp, Heterodera glycines
atgaatttggcactttttgtcgcaatttgtcaattcctgcttctgttttttggcacttttcctcccacaaatggcactatttctacggcattttcacaatttctacgaaattacttcaatgatgaggtggagaagaacattgcacgcagagatttgggcactgacggaagttttggcggtggaaaagggcgaattaaggcaaagtatgtaaattataaattaattaattttttttcaaaattaaattcaataattagcctattgaagccaatttcaaatttttaagaaaacgtcctgtaatttttgtgcacggcttaacaaatttagcgggagagttggactacgttcggcgactgttccgcgaaaaaggcggctaccgtgacagcgaattgtactcgaccacttacggttacggtatgaagggatggaaatggctacgtgatgcaatgaaatgtgatcatgtgaaaatggttggtgtctgtctaaatacgcattaaaatagttaaattaatgacagtttaattttaaaataaaaatatattaatttaaataataaaaattaattttagagttgagcggtaatcggtaattgcaaaaaaaccggtaccggtactgatcggtactgcaaaaaccggtaccggtaccggtaccaactttttcaaccggtaccggtaccggtaccggtaaaaaccggtaattttagaacataaaaatttttggacaaaattttccaaatacaaaatttttattcagttttcgcgcgagtacctgttttttagcattagaattgttcagaagtatatgtatattcaggttgaccaagtttttttttttcaaattcaggacatagaacactaaaattcagatgtagacctcaaaattcagattattgcaaaacaaggggtcagcagccaattttccaattttgcgaaggggtctccggccatgtaaattaatgtaaatcaatgaccttttttttgctttcaacaccgctttttacgcggcacgttttttccaagacttttgggggacaaggagggccggcggtgccgataggcgccgccgggaaaaaatttgtgatttttaatgcgatttgttaacagaatttgtaaaaaaaatgaccaattgattaagttttgggtttttaggatgcttaacatgaaagaaaaaagttggaatattttttaaaattaaaattttaattaaaataatggtaaagaaaatgtgaggaatattctatccaagtggggaattgaacccaggcgaaaaattatgaaaggtagaaagtttaaccactacaccacatgtgcatgtgtgtactcccatgactaaatgaaataaa

SEQ ID NO: 45651 - DNA, 822 bp, Heterodera glycines
tacactactggatgtatgcttttatccttttcagagttcaaagaggctttctcgctgttcgataaggacggggatggcacaattaccaccaaggaattgggcacggtcatgcggtcgctgggtcaaaaccccacggaggcggagttgcaggacatgatcaacgaagtggatgcagacggtcctaaaaggctttgaataagcgtaatgtatcggcaaacattcaggaaacgggaccattgactttcccgaattcctcacaatgatggcacgcaaaatgaaggacacggacagcgaagaagagattcgggaggcattcagagtaacacaaaatgtaaaatgaaattagatattgattataaatttcgaggtgttcgacaaagacggcaatggcttcatctctgcggccgaactgcgtcacgtgatgacaaatttaggagagaaactgacagacgaagaagtggacgaaatgtaagcgaatggaagggcggaaaggggaggactgagtttgaatggttgtttaggatcagggaagcggacattgacggggatgggcaagtcaactacgaaggtcagtgtttatggtagcattatcatgggctagttgtgtaaggtggttgtattggggtcttcctcctccttttatataaaatttttctctctttttagctacaccctgggagattggaattaaaaaagggcaataagaaaataagaacaaatggtctttagcaaaccgtactaatgaaatatcgtatcctttgtgattacaaacgaattgtgaagttgcccttttaagaattcgtaacgatgatgacgacgaaa

SEQ ID NO: 45652 - DNA, 1652 bp, Heterodera glycines
atggcatttgggcagcacaaacaagttctcatcgatggcgacctgcatacattacgttttggcgcaccttctcgcgagctgtttatgggcaattttccgttcaaaggcgccttcggaggtccgccaatcattgcaacgatcaatcaacgaaggcacgaaattcgcctttgtggaccgccgcccgaagtgcgcattgacccggagccgagctacgaactgatgcggtacatgccggcagtgcgacaacaacagccgacgatggtgcaaccgacgaagactgatgggacagagggcgaccgcaagaggaagagaggtagagacaggaggctaacaaaacaggaattattgtttcagaatcgccgcccatcgacgtttcacgattgttaaagcgtctgaaggagaccggactgcttacacaaccgcccaacgaagcagagcggaaccaacgtaaaaaacaagtggagatagaggcgaatgcggcaccaattccttccaaccatcgcctagacaatatcgagcgcagggcaacgccgatgtccggcctggagcagttcagcatgagatcactgatcatgtcggtgtttggggtgtggtcagtcctttaaccaaggggtatctgttttgtgcgacatttgtggaccagtcacaattcagttttcaatatttaaggatattttattcatataaaatgacaagcagcctatttaacaaataacacaatgttaattattccaatcttacgattatgagacgaaggaaagaggaatattaattagcatgtttagaattaataattttgctccactctgatttttccggttacttttggcattgattgaatgttcatccccgatttcagtcgctacgattccgtaatcgacgccattcatcgtccacgcgttgtgtgtcagtattgtggaattgcgttccaaaaattatataatgaggcgtatcaacggcacgcggattggcacctgcaaaaaacaattcggatcgaggaccaaaaacttaacaaaggaccaaaagtggtgaagggtacaagctcacagccatggtatatggtggaggtcgggaatgcaactcgaaaatggcgataaacgacaaaatattattggaatttaggattggtttgatttttcggagacggaactggtcaacagaacgcagggaatgggtgagcaaagggggaaatggcaaataacgccaagaatcatttaaattatgccaaggtggtgctgacaaatctgccgtcgaagacgaaaagggcaccgccgcagtttcgcatcaacatacggcggggaccaatcgggacgcgccttcggaattgtcgaatcgaaggtaggccagaagcgcatttgccaatttgatgctaacattgcattctcatttcacaggaatgccaagtttgccatgaacaattcgaggagtattgggacgaggaggaggacgtgtggcgccttccgcactgcttactttcggatgggaaggtgtgccaaagagggaaagaatagatgtcattttgttgttttaggcatttcatattttttgcaaagaggacgtcatccaagaggaagctgacatggacttacgttgttgatttattttgctatgatctctcccccaccgcttttgtccaaattcattgaaggcga

SEQ ID NO: 45653 - DNA, 1471 bp, Heterodera glycines
aattatatgctgatgatgttaaattgtatatatgctataaagcaagagcagatacagaaattatgcataaagcattgcataatttattcgaatgggcaaataaatggcaaataagagtttcagttcaaaaaacttttgtattatatttgggttcaaaaaacccaaaagaaacatataaatttgatggaaatacaataaatgctgtggatacaattagggatttaggagtaaacattgataataaattacaattttccgatcatgtaaacaaaataacaaggaatgcgtatttacgtatgcgttccttgtttcgaataattaaatccaaatcatctaagatttggattacgttatataaaacttatattaggcctttattggaatacgctccggaggtttggaatccgtctcttcaaaaaaatattaaaaaaatagaaaagtgtcaaaaatatttcaccaaacgggtattttttaaatgcagccttccaccaattccataccaaaatcgattagaatacctgcaactgccgacacttgagaataggcgaaagctatttgatctgttcatggcgcataaaattgtttatggccgaacagatctgaaactattttcaatttttaatccatcgacacgctttaacatccccttttacagatttaacacaaaatataaaataggcaaaaaattcattccctttgccgggagggtaacaaaattatggaatcaacttgataaagaactaataaaaacaaattctttaaatcaatttaaaacaaaacttaaaaattcattagggtaataaccggaaaagcaaaaacagaattaattttttaagtgatttgacatttgtgttatcgatctcaattgactttgacctcattttattcatatattttgattttattttttgatcatccatatatattatatcacttactctacgacatactatctgaacagtcgtcagagtaagtggtttttgcccttctgatgactttttattcacgaataaataaaagactaaaaaaaagactaactaaccattcataattaaattaagcaattataataaaaataagaaaattgttgaataataatatttaataattattttaacaaaaaaatgtgaaataaaatagaagaatatcacttaagagcattttcatagatcattcatatccccatggttaacacttcacataggttattgtagcatctaaaatgattaagatgaaaattaatgccaattttgtttttgctttttcacttttcgccactcccaccgatccgccgcccggctccaaccaattgaacgcctcctccgacaaatccacgtggtctttcgcgcactcggaacatttgttgttgatcggaacagtcaaactaattaagccaaattgagttaattgaacaattaattaaaccccaaatttcaatgtttacgtgttccctttgtattcgattttgacg

SEQ ID NO: 45654 - DNA, 2259 bp, Heterodera glycines
atgaacagaggcggtggcttccatattacgattcaagcaccagtgaacatcgcactgatcaaatattggggcaagaggaatgaggtaaacgttttgtttaaaaaattttaattttaaaatgccattagttgcttaatttacctttgtgatttgggccgttgggtttcatatctgttttttcctgttacaccgggcttaatcggttaggttaatcaaccacaaaaaaaaagttacaacaagaaaacaacaaaaaattcatattttcttttttatattggcgaaggaaaaagtgggatttgcttttattcacgggaccgtctctgtgactgacttcccaaaaatttggtcaatgttaataaatttttaaccctaaatctcggagacaaatgagcgtttattgtttgtctatttaaaacaaaataaaataaacattttaagacgagccacacctaaaatcttttttaaaaccacctaataatttgcctaattttgtccattgcccaggaactcgtccttccgctcaacgattccattgctatcacaattgatgagctgagcgccaccacacacatcacaattgggcccgatgtgagcacggactcggtgacattgaacggagtcggcattgacatcgccggcagttcgcggtttcgaaacgtttttcaggtttttatttttttttggggggggggtaccttttcaaatttacagaaatataaaaccatttagtatatgggtttattaccgctaactaattttataaaaacctaaaaatttcaaataattgatgaaagccatgacaaaaatcaatgggttttgctaaatctgctctcggattcgtgttagcgcattttaccctaaatatgtgcaaagaaaatttgttttttttttcttgttgggacaccaagtccgttggattaccaagtttacttgctgttgctgtttgtaacaaaaaaacaaaacaacagaagtgcctttcctatttttcatattttttcatccattttttaaaattattatttataactccttccccaattttaagcaaattcgtgaatactcaaacagaaagcgaaaactgaagggcgagcatgcttcaaagggttggcacaccaaggtgagagagagagagaaaaaaatggggagagaaagagtgaaatttgcaaattaaaaaaattaggcatttatatagagttaggagtcgtcgacaaaatcaaaataaaggtctagaaattaaaattttttgttgcaaaaaccagggaagggaggcaccaaaaatttaaaaaaattgcgaatcaaaagggtccacctttggtttcgcaaaatttttttttaatttttcgattcctactctgattttttgtcgacccccttcttaatagaagtgccaaaaatataatcgaattttccaaaataacggcaccatccttctataattcttcgttacagattgagtcgagcacaaattttccgacctcggcaggactcgcttcatccgtaagcgcttctcttcttttcccagcaaaaatttgttgcttttcaagctcaaaaagataatgttatcccaaaattaaaatgttttttttgatacctcttcctttggctacgattttttgggacaaaaaattggttagagccaatgctgtcgaaagcgacggtcaagagggaatttttgttaaatttttgagatttttgtttattaaagcatttcccttcactttgcttttcgtaaattccaacacaatttaccaacaaaaaaaaaaaaaagtaaaattttcctttttttcaggccgccggttttgccgccattgcgtttgggcttggcaaaattttccgcttgccggagcgagacattgtcagaatggcccgaatgggtacgtctcttacaattagcatctacactaaagcacatttttttcaagtgggataatttggtaaattttggtgtagaggacaaaacgacgtcggacgaatttttagccataacttttctaacaataaaccaaattaagcattttggcattgttcaaaagcactttacaaactttattaaccagaaaaatttaaatattttatttatgtaaaaaatgggacaaaaatttctttgaaaagttatatttctgagttcttctgcagcaaagtctttgtaatttgctctttttcccaggctcgggctccgcttgtcgcagcattcagggcggttttgttcactggaaggcgggcactcatcagcaaaacgactcggactgtctttgcgag

SEQ ID NO: 45655 - DNA, 2228 bp, Heterodera glycines
atggcatttcacaaaattgacactgactccgtgaactcaatcaccaatgctttggactttttccgcattcccccgaccaatgtgagcgtctcttcgtccaaagtgtttgagcttttgcctagcaaccctctgaccgacacaccataccacttcaaactccactcatgccaaaactacattgatctttccaaatgctatttgctcaccgagtttcgaatccagaaggaaaatgctaatggacaacttgttaacctaaccattgatgatataaacattgcaccaatccaaatgattggccaaactttcatccgtaacataaaaatgagcatcaatgggcgcgaaattttcaatgccaatgcactgatggcttacaaaacatatttttcacatgagctttcctattcaacaacggcaaaggactcccatctgaatgccgcggggtactaccgagacacgggcgactcactggaaatgggagacggatgcacagcgcgacgtgatttgtttgcgaatagtaatgtagcccaattcattgccaaaattgacaccgacctgttcaatcagccgctgtatctgatcaacttttgtgagctggacattgaaatattgcccaacgacaacgaatttgtgttaatcgcgccgaccggtggtcggtaccgtttcgaggttgtgggactgaaattatatgtgaaaaaggtgtctctgatggacgggttggcattggacattgcacgaaagttggaggtgaagcctgcccgttatgcagtgaggaagacaatgatgaagtctgtgttcatcagtccgggcaggtatgagttcacagccaatctgttcatggaccaaattccccgtcgtgttacaatggggctggtggcgaatactgactatgtcggctcaattaggcgcagcccattcaactttcaaccatttaatgtgcgcgagatttccattgttgccaatggtcgatcttacccacaagcaccctatgacttagactacccgaacggaaagtatgttcgtccattcaatgatatgaacgaagcggtgggattcgcaaattcatctgagagcaatggcataacttttgcccaatacggtaaaacccattgcatttacgtgttcaatttgaccaacagcggggatgatcaagcggcactgtttgatttgataaagaatgggaccacagcggtgagcgtcaaatttaaccatccagtgcccgagggaggaataatgttggtggtgatgggcgaatgtgactctcttgtgatgttggacaaaaatcgatcgataagcaccgataccactatttaaacgcgcatcacattgtcccatttcatttgcataaaatgtattcaaaaaaattgggtatcattttgttcttgctccgcgtttctattcctgttgtttcaacattccatgaacaaccgcaaaagccaccgccagagaatacatattctgcttatttgaaaaatttgactttgtctcggcaacaacaccacccagaatattcctacactgaatatctgagaagattgtctttgtcaaagattgctacgacaacaacatttaaacccaacataacgaccaccccgaaaagcgacaagttaattgatgagcatttctctgctgttcttccaccgcttatccaactgtgtaaggatctaccagcggaaagcaactttgcgcagaaagccatttgcggggcattgttcgccctttatttaatgctcatcctcagtctgattcttcatcaactttgttcaattttttggctaaagaatggacgcctccaaattataaagatattgagcgaaaatcggcagaccgagccagtgtttcggggctgcttcgccagtgaccaattgccgcctcccttcacactacagtaccccgcagcgctcgtcgtgaacagggacgcccaccacaaggagggctctcattggtgcgccatttatgcgaagggaatggatacgccaggctctactatgacagtcttgctcaacccatccctccctccatcacatcatcatttttgtgccaattccccaagggattaacgaagaattcacacccatatcagtccccccttgtctccacttatgccgcccactgcattgtttttatttaccatttgtccctcggagacacatttaatcaatttctcaaccgacttgagtcttgttcaaacccagatttatatgccacggttgtactccataaaattttaa

SEQ ID NO: 45656 - DNA, 2177 bp, Heterodera glycines; identical to SEQ ID NO: 21499

SEQ ID NO: 45657 - DNA, 1148 bp, Heterodera glycines
cctgtgtttgtcccacaggtcagccaggactccaatttttcccaccaccatgacaatgacttcgacttggagcagcgcaatcgcgaggccatcaaaagcaacgcggagcggcaggcggcgcaacagttggaaaatgccaaagtcagcgaagggggggggggcacggcacggagaagcaaaacccgacactctttaaaagggattttaattaactactctcaatcttgggccatttaatccgggttctcgattttgaggcattgaaaaatctcgatgggtagcactcccgacccgattctcgatattctccccaggcaaaaataacttattcattttccttaaacattgctcggggtaaaattttcgctcggtaatcgatcgttgtaattgatccataccaattaattatgcttgttgattgattgaactgactaattgtgccaattatccccgtccagtacaacccggtgctattcgccgtgcagaccaacgtcgactttgacggcaccattgacgacgacgcgccggtgcacggctgtgccgtgtcattcaaggcaaaggagtttctgcacattaaggcgagcaaaacaattaaaaccgaaattttaatcgggtgatttgttgcaggagaagtacaacaacgactggtggatcggcagattggtcaaggagagctgtgaactcggctttatcccgtcgcccgccaagttggaggcggtccgccaggcgcagcagggcggaaaaggcgccaaattgtgagcattttttaaaccccgcgacgggacaatggaaacacacaattatttccaaattcattcatatttgtgtagccagatggcctaataattatttgatttagctttgtgtttaatttggttatttttctgatcagagatttgcgtgacttttagttgatcagccagatgattaaaatctcgaacgaatttgggtatttctgatggtgattttagctatcggatctgctacttattgatccagctcttgctttgtcctttctgctgatcactaattagaaattctcaaaaattttacccacgactgataaaatgattagattcgatcaaatcaaccatggtttgaaaaattataattagtttatgctaacaaataaatgcactaattagtgc

SEQ ID NO: 45658 - DNA, 1174 bp, Heterodera glycines
atgcattttcgtcagggcaattcacccggcattgaactgctccaactccgtgcgtcggacggcgacttgggtaaaaatgggcgcgtcgagtttcgacttgcggttgagacggaccttctctcggtggaccccgattcgggactggtccgggcggagcgcacttttgaccgggaggagttgggcgaccgcgtcactgtgccggtgatggcattggaccggggaacgccctcccgcgcgacatttgccaatctgaccattcttctgacggaccaaaacgatgaagcgccccaatgcggcaaggaaacgcatcgcttttccgttgcggaagacgcgcctaatgggcaattagtgggcactttcaacaattttttggtcaattacattcccaaggtcggctgtttggatgcatatgattcggatgagtttggcacttcgaacagccaaatccgtttcgaattggcacaatccgatgccaacgggccgttccgagttcatgccgagactggctgcctctttttggacctccccggccttccacttgactttgagcagcgttcgacgtacaatttgagtgtccggctaaaagacatgggaaaaccgccgcttgaagccgttaagccttgccaagttcgtttttctactcccatttcgatttaattaaggtttaaggtccaaattctgctcgaagatgtggaagagaatgcgtttccgcctcaattcaacgccatggcacttgaggcgagcgtggaagagaacgcgccggcgcacaccgaagtgatccgagtgcatgccgaggaccccgaaggggccgctgttcggtaccgactggtcgccggcaacggactttgctgctttcaaatcgaccccaaatcgggagtgatcagcacgaaaaagggtgagtaacagacaaacccgagagagagtgatagcaaacaatatttgcagaacttgatcacgaactgcaacagcactattggctgactgtccgtgccgaagacactccgttcagtgccatcggccgaatgcttcgcgcccatcttcagctgtttatccgcgtgctgaaccaaaatgaccgactgccactgttttctcagccaatttatcggattggaattgcggagaattcggaggaaaataaggcaaaaacggcattaatgcagagatgccagatcat

SEQ ID NO: 45659 - DNA, 1092 bp, Heterodera glycines
atgaagaatctgcttgcagcagatgatgtcagctgttgccagttgatcggacatactctatggaagaactgtcgcatgtcaatcaacggcactcaagtgttcgagggaaacgatttgatggcatacaagagcgtgatggactatgagctgacctaccctgacactgtgaagcgctcctatctgaacgttgccggttactacgcagacgatgaaaatagccagttggcaggcgacggctacactgcccggcgtcaactgttggcgttgagccgcaccgctcagttcatggctcgactggacgttgacccctgcaatcagccgcgctatatcgttaatcaatgcgaagtggacatcgaacttctgcccaactcctctcaatttgttctactggcaccgaatgctccacaagcgccaccggaccaggttcgtcgttatcatctggaggtaatcagctgtaagctgtatgtgaagaaggccgaggtgatggacagcctggcgcttgacatcagcaagcgtttggagctccgtccagcacgctatcctctgcgaaagacgtctttgaaggcgctgttcatcagtgaaaaccgtacagagttcactgccaacctttggtcagatcaggttcccaagcgtgtggtgctcggacttgtatccaatgaaagctacgtgggcaccattggcacctctccgttcaacttccaacccttcgatgtgcgcgacatcagcatttgcgcaaacggacggaactacccccaagcgccctattcattggactttcccaatggacgatttgctcgcgcctatcacgacatgcatgaggctatcggatatgctggtacggtggaaagcaatggaatttcggtgaagcgttacgctgaggggggccaatgctttttcgtattcaatctaacaccatcggcggagagttccgctgatacgttcgaccttatccgaaaaggcacaaccgcgatacgaatttctttcaacacaccagtgcctgcacgaggaatagtgctaatagcaatggcagaaatcgattcacttattatgctgtacaagaatcgttcggtcgctacagatgttcaagtataa

SEQ ID NO: 45660 - DNA, 1178 bp, Heterodera glycines
  unsure (1)..(1178): unsure at all n locations
atgactttggtaggacgnccgttggacaaacttcttcgagaggctggcgaccgtttcagtccgggaactacaattggcatatcgatccagatgctgaacgccatcaagaccctgcacaaagtcgggtttctccatcgcgatgtcaaaccgggaaactcagccattggattggtggagtcaaatgaacaacggctgctctatctcatcgacttcggaatggcgcgtagctacattcgatctgatgtgagagggcggcgggggacatcttggcgattcagaaataacccatccccattttccagggtcaacagcgacgtccacgagccacttcgcagttccgagggacgccaatttatgcaccaatttctgcgcacacaagacgcgactacagccgaaaggatgacgtcgaatcgtggttctacgtcatggtcaaattcttcaaaggaactttgccgtggaaacatattgcgggcggaagggacgaggtaagtaaaaagtgatttgatggaaatgcataatgttcactatttgatttagatcggagagatgaaatgtcgtcgcttggaagggcaaccaaccgaagttcgagaaaaggccatcaacgatctgctgggaggatgtccgcctgaattcaacctgatacttgagcacattgtgcgttgtttcggatgatttctacttcaaacaaattgtaattttttcaggatgccctgcagctggaggaccggccctgctatgagatgatcgagctgctgctgcgtggatatcttgcccaaaacaacatcgaggagcatccatatgactgggagatcggaagacgcaactcggatcgagaaaagacgcaaattgagaaaccagcagagaaacagtgaggaggatgagcgaagaatcacccgcgagatgatgaacaaacggagacacatattcgcgagcctagcatctgtctaatcacatttgctcataattgtatattattgtgatcggtatcaagtcgtctttcattgtatacttggcattgacgacacacggaatgtatgatcacatttgctcattattgtacactgtgatcggtattatcattcattatatacttgccatatgtacatatatatatgtataaaaaactgggtcgcaacaagaaaaaacttcgtttttgggtatttcttgaaaattcaata

SEQ ID NO: 45661 - DNA, 1036 bp, Heterodera glycines
atgaaggaggtgcggatcatgcgacagctccaacaccccaatgtcgtccagttcatcggtgtggcggttggccaggagcccctgatgatcgtcatggagttggcgacggaccttcgacgctacttggacatgtcgaggcggcaccggctgaacatgcgcgccaaactcttcatgtgcctcggagcagccgccggactggaccacatccactcgaaggacatcatccattgcgacatcgctgcaaagaactgcctctacgcggaccgcatggtgggtgagaacatgatggacgagggaggggtcagaaaaattgggtaccaaaatttaaggaaattggaaaaacaaaaattttgatttttttttggcaaatgctcatttacgctgtttttcctctccaactactgcagattttgcttctcatttgctttgtccaattcattgagtatgtttaaccaaatgtcttcgttgtagacctttccccacccattttttcagaatttcttcttaaaacatagtcgtcctcgcctatgtgtccttcgccttgatgctgttcttcacactgaaaatgttccggcacaacaattccttgcttcagcaaggagccgtcttggagagagtgatcaatttggttcatcatgagtcatcgtctgaaaacgacaaccaacaaatcgcggcgcctttttcggcgtcctcgtcatcgtcaggcactgaaaatgctccgcaaaatgatcaattgttgctaattacgggaggagaaatgccaagccatggcagtgacagtggaagtgccacagcgggacaagtgccaagccatgtcagtgaaagtgccatcgctgagtagaaacaaaatgggatcgggggtctacgggaatacgaagtatatggatattgtgggggattgatgttgagccaagtatggtgtgttgtccaaatgttgtcaaatgttgggacaaatatttattaagaagtaaattgggaaattggcggaagaaaatggagaaacgatataaaattagaagagaactaaaggaggaga

SEQ ID NO: 45662 - DNA, 321 bp, Heterodera glycines
  unsure (1)..(321): unsure at all n locations
atggagaaattcttcaccgatgaaccgcaacgcgttgccgcactgcgcgatgtgttcaccggtctgtggggccttgagaatgacgacgcggtcaccaacgcggttattgaggtattaaatgaaattttttaaatttttaattaaatttttaaacaaatttttaaggatgccatccaaaggcccagggattatgtgctgaaggcgcaaatgggcgctggcaaaggcaatttctttgacgacgaaatggtggaaaagctgaagacaatgtcgctggaggagcgnngcgcgtacattttgatgaagaaaaattggcctgtcgct

SEQ ID NO: 45663 - DNA, 2421 bp, Heterodera glycines
ataaaattcgctgtgctcatttggctcactgttcagaacgccgtccatgcgctattgcttagatattcgagagtaaaaagacaatttactccgactgccgtcccaactttcccttgccgttttaaggttagggatgtgccggccatgtatttctcaacggtggctgtcttttggactgaagtcatcaaattgtctgtttgtcttattatggtgtgccatcattcaaatggtggaattttcgagtgggttttgttgaaaggggtgcactcaatttagcgttttaaaacaatttcatttgaaattcactcgctgagactatcgcaccccaactcccaaatatgcgatttggttggtgattggaattcttttagggcttttggtctgataagacgacaagtctttgaccagccgagggacactctcaaagtgtgtcttccctcgatgctttacatcctccaaaacaaccttttttataccgccgcttctcatcttaacgccgcaactttcatggaaatattcttttttctttcttttattggtacttatgtagtttaggggacagatttcacatacctttttaggcgctactgtaaaagtggtcccttttgaaaatttttttcacttttttcatatattttttttataaatgatttttttcatgcaattttagcaaatggttaaagtttcaagatattccattaatgattccaacaatctgccgctcatcgcttttccaacattggacgatataaatttgagatggcttttttccaaaaactctgaagagattttacaatttttggcacacaacggacttttccaaaacaaattattgtgccaaaaacaccaacaaatgtgaaggattatgggcccagttgaagcagaaaacaaaaagaattcatgacaccagtatgaaattggcagaatcatatatgcatgaacaaattttccgattgaatgctagggctaaaggattgtctgtttttaaggcttttgtcaatttattacatcgtaattataattttttgtgattaataatgctaattgtaataaaaaataataataaaaatatatgaaaaaaagtgaaaaaaattttcaaaagggaccacttttacagtagcgcccttatggccattaatttctaaaacatatttatatgaatctaaaaatgtatgtgaaatctgtcccctaaactacataagtacccttttatttatccctctaatggttcgtttcttcttcagattgtctcccaattgaaaatcttttctgccgccattttctccatccttttgctcaatcgttcgttggctcgtgcccaatgggtttcgctatgcgttctcttcgttggcgtttgttttgtgcaatttcagccggaagagcctcgcaaatcggagaaccgaaaacacttagcaattgagcaggatgtgttgacgggtggggagaaggggcgatggaatggaatgggaggggtcactcacttttttactcaaatttaccaatggcaccggcgggcgactcgccgagaaaccgttgagattcatttggcatttgctgacttgttctggcctaataataacaaagcgaacatttttcagtctctgatttttctattgttcaggtttcattgctgcgtcaatcgcttgtggtctttcggggttttcgggtgtttttttcgaaaaaattttgaagggctctgcgcctgtgtctctttggatgcgtgtaagctttagcaattgatgtcctcggggagggagtcattttggcttctaacaagggaggggggagggtaaagcttttggcaattattagcccccaactcctccctttgtacatcaatcggttggcaccttttcgctcgaatgacccccccattcgttaagaatgtacaaatgtcggtcttcgcaattcctgccagtttctttgctgccattgttcaagtcgcactttctgtcctttggctccctttcattgccactcttttgtaggatggatccaaaattagagagcatggctttatgtacggttgggactccgttgtttggctgacttcgttttggtacgccgtcggtggtctttcggtggccgtttgcataaaatacgcggataatatcgccaagaacttcgctacttctgtggctataattttggccacacttggctctattcagttcttcgggtttcagccaaacctacttttcacacttggtgctttgctcgtcattatggtaattggactgctctcagttttggcttttgaagagcatttgcctttttggctatttttttccatttttaaatttctattgtccctttcctttactttagagcatcttcctctactcatcttcttccatttttcttcgccacttcaacatttacgggtcttcctctgcttcacgtccttcttacttttcgtca

SEQ ID NO: 45664 - DNA, 1333 bp, Heterodera glycines
aaaatgtcaagcgatgatcaatcagacaaggaggtcgtattaattgactttaattgcttttctctacaaagttttttagtgccctctttgcatggaggccttcgacattgatgacatcaacttttacccatgcaattgtcagtatcaaatttgcagattctgttggcacaggatcaggtttcttttttaaaaagttatggaaaaagaaccagacaatgggaggaacgaaacctgttacattttaaagagacatgaaatttgtcagcaaaataattaagggcatcgctccaaatatggtctcaaattcaatttgctcattcttcggtcaattgatcaggaattttgaatatattcggtcacatttttgtcctggttctgtcttatttcacctatctatttaaattgttcggattttttttacgaaaattgcttaaaatataagacgaaattggatgacaaccaacttattgttactcttaaaattccaaccccaaaatctcccccattaaggacaaatgaaaacgggttgtgcccggcttgccgccagtcgtaccccgaggacccggtcaattttcagccgttgtccagcgccgatgtgcggaagatcaaaagtgagaagaagcagaaggtgcagcagcagaagaacaaagtggtggagagcaggaagcacttggccgagtttcgggtgctccaaaagaatttggtgtacgcggtagggctcagccatcggatggcggacccggagctcttgaagaagtacgggtggcactttaagcatttattgtttgtaaagaaatttgccaatgatgtgctttttgcccggttttgcctagaagattcgacatacgtttacaattagactttttgtccaactatggttaggggtgttcgaaatgaaccaaaaatttattccatattgtggtcaggttccaaaattcatttatggtcctttttcggtaatgatattttttggaaaatgcgtgttatcaagttattttcattaaaaattaagttttcttctctaaactttcaaggactttgttatattgtaataatccaagtttcagacccgaattctttggcaagtttggcaaaatcatcaaaattgcggtcggcgctgccccggccatcaacagtgctcagcccgcggtgcacaccgcgtacattacttacacacggagcgaggacgcattgcgcgcaattcacgcggtcaccaacatgatggtggagggccgctttctgaaggcgtcgcttggcaccaccaaatactgctctaatttcttgaagggacaagcgtgccataagccggcaagcttttcaattaagcacattt

SEQ ID NO: 45665 - DNA, 1386 bp, Heterodera glycines
atgacatttcataaaatcgacaatgactccgtgaactcaatcaccaatgcgctggactttttccgcattccgccgacaaatgtcagtgtcttttcatcaaaggtgtttgaactgcttcccagcaaccctctgaccgacaccccctaccatttcaaacttcattcaagtcagaattacattgacctctccaaatgctatttgctcaccgagttccgaatccggaaggaaaatgtgaatggtcaacttatggacctgaccattgacgacgaaaacattgcgccaatccagatgattgggcaaacattcatccgaaacatcaaaatgagcatcaacgggcgtgaagtgttcaacgcaaatgcactgatggcctacaaaacctatttttcacatgaactctcctactcaacaacagcaaaggactcgcacttgaatgctgcaggatattaccgggatatgggcgagacactggagacggggccgggctgcattcaacgcagggatttgtttgccgaaagcaaaacagcccaatttattgccaaaattgataccgacctattcaatcagccgctgtacttgattaacttttgtgaattggatgtcgaaatttggccaaatgacaacgattttgtgctaattgcacccgccatcggcggtgttgttcctcgttaccgtttcgaggtgatgggactcaaaatgtatgtgaagaaggtgtcattaatggacggattagcgctggacattgcgcgaaagcttgagataaagcctgcacgttatgcagtaaggaaaactatgatgaaatcgatgttcatcagtcagggccggttcgagtttaccgccaatctgttcatggaccaaattccccgccgcatcacaatggggcttgtttcaaatgccgactactcgggcacaatcacgcggagcccgttcaattttcaaccgtttaatgtgcgggaaattgcgatcatcgccaacggccgttcctacccccaggccccttacgatttggactacccgcatggtaaatatgtgcgcgctttcaacgatatgaatgaggcggtcgggttcgcaaactcgtcggaaagcaacggaataacctttccccaattcgggaaaacgcattgtatctatgtgttcaacttgacaagcagcggtgacgaccaagccgcgctctttgatctgataaagaacggaacaaccgcggtgagcataaaattcaatcgtgcggtaccagtggggggactgatgctggtcgtaatgggcgaatgcgactcgctggtaatgctggacaagaaccgatcgataagcaccgataccactatataaaaggcgccgatttagtgtatttctctcaacatttgttacattcactgttcacctaaaaataaa

SEQ ID NO: 45666 - DNA, 742 bp, Heterodera glycines
tacagctttgtgacactcggattggctttgttttgtggccatgttcgaaccgaggaccgtgccgaggtggacattcgggtttccggcgcgtgtagtccaagtgagcaattatcttcttttaatgtaaaagcttcatttatgagtttgcaaagcttaggtgctgaaaaggtagtgaagaaaaatctttagcttcaaatttttgatagcaaaataagtctttgaaaaactcggaaaattatttatttaaaaaagccataattattttaattttcttgatcaaatccaaaattttcgtatcttttaacggctcttacttaacaagctctatttgctcactaaaactcagaaaggtttgcaaagatgcaaaacccaaataaaattgtgccttttttacatttttcaagcactaatctagctaaaacagtgatcagatgcttcacctcatcacctcccatcgttcagtttacctctctagaaggggcattgagctgagcaaataccggccgttgatacggtttaatccggagaaaattcgactggtgccaaaaaatccggtgatcccgggctgtgtgaaaatcaaggcggagggcgtcgaaattctgcggcccatccgcaatctgttggccgaagtggaaatgcgcattggcggcactcccgacccgaacaatccgacattgccatgcacaaaaaaaattgacgacaaagtgaaccagtgcccatgcgcaaaggcggaaggaacttg

SEQ ID NO: 45667 - DNA, 1749 bp, Heterodera glycines
atggcttcttccgaaggtgaagccgatcacaatgttgagctctggaaaatcaagcgtcttataaagtcacttgaaatggccaaagggtattacctaataccatttaggccttactaattttattttatcttacagaaatggtacttcgatgatttccctgatcattccgccaagagaccaaattgctcgtatccagaaaatgcttggagacgaatttggaacagcgtccaacataaagtcgcgagtcaacagactctctgttttgggggcaatcacttcagtccaggcgaggttaaagctttatacaagaggtaactttggattaggaagaattctctggattttttttttgttttgtttaacaaattcgttaagtgcccgagaatggattggttgtttattgtggaacgattgtcacagaggacggaaaggaaaagaaagtgaacatcgattttgaacccttcaaagcagtgaacacatcactttatctatgcgacaacaaattccacactgaagcattgaatggcaattcaaattcctcctaaaccaatattaatataaagtttagcactactcgctgacgacaacaaattcgggtttattgtgatggacggaaacggatcactttttgtgactttgcaaggaaatgccagggaggtgctacacaaattctctgtcgaattacctaagaagcatggaaggggagggcaatctgcactgcgatttgcaaggttgcgcatggaaaagcgacacaattacgtcagaaaagtggcggagacggccgttgaaatgttcatcaaaaacgacaaaagtcgcggtggtgggcctcgtcctggccggaagtgctgattttaagaatgaactcgccccagtccgacaatgtttgaccaacgattacaggtaaaatttgggataatttgtttccaatttgtttaattacaggcaaaaataatcaaaactgtcgacatatcatacggtggtgaaaacgggttcaaccaagcgatagatttggcagccgatgctttggcggatgttaaattcatcaaggagaagaaactgatcagcgcctttttcgacgagatttcccaagacactaacaaggcaatttacggggtaaaagaaacactgacagccattggaaatgggcgccatcgaaactctgatttgttgggagaatttggatctgataaggtaggttctgtcaatgagaagtgcaagtagaatagcgtaacaaacccataaacagatacgcattccgaacaaccaatggtgaaaaagtcgttaatctgaagcccgacgagaaggaccggtcgaactttgtggacccggaggtaattcacccatccaaatttatattctcatttagcagaaaaataaaaaacaatctattgttactgttgaatgtcacctgtttcagactggaactgactacgagattgagtccagcacgccattattggaatggctcgctaacaattacaaacgattcggtgcggcacttgaaattgtcaccgacaaatcgcaggaaggagcgcagtttgtacgcggttttggaggacttggaggttagttgaaacttgaaactgcaaattatggccagcaaaaacaacgacgattatcacttaatgaattgaaattatttaaattactcttttctttgtccaaggtgtccttcgttattcggtggacattccgcagttggatgagctcgagaacggagtagacgagatcgacctcagcgagtactga

SEQ ID NO: 45668 - DNA, 1139 bp, Heterodera glycines
atgtacgtggacccaacggcgtatgctgaccccaccgaagtcttggccgaattcaccaatgaaatttgtgcttcgaacatcgaggtaaatgcaaaaacagcggtcattttctttccttccttcctctcattgttttgttatttgaactcaaaggtcactcggacaattggcaccggtgaatttggcgaagtttgctgtggtcggctgacggtggaggaccattacgggcataagcaggtggctctaagggaatgcaggcttttcgtaataaatttcaatttaagcagcaaattgttgcagtcaaaacgcttttgccgggcagtgatccgaaagcaaaagccaattttctcatggaagcatcgataatggggcagtttgagcatgaaaatgtcattcatttaataggcgttgtgacaaagaccgaaccggtacttgtcgctgtcagtttgtcaaattccatcaccactttcaggtgatgatcttgacggagtacatgttgtacgggtccttggaccagttcctgcgttccaacagcaatgggaggctgagcatttgtcagatgaccaaactgctccagggcgttgcctcgggcatgaaatacctcaacgacaaaggctatgtccatcgtgacttggctgctcgcaatgtgctggtcgacgatcggctgacctgcaaaattgcggactttggtctgtcgcgcgggttgcggaaattcgtgtcgggcaacgattgcgatggctgtgcaccattcgagcagcagggcgagtacaccacgcagcagggagggaaaataccaattaggtgagggcgggagggaaacctgacaatgacacttgccaattcaggtggacggcacccgaggcgattatgcagcacaaatacaccaccgcctccgatgtttggtcattcggtgtcgtaatgtgggaagtaagtgacacacgaatagcaaacggtccttggcattcgctgatacgcgcctttcattcccaggtcatgtcctttggcgaacgcccttattgggattggaccaaccacaaagtcatccatgaagtcgttcagaatggattccgactcccgcctcctcaagacacaccaaaaaggctctacgagatgatgctcgcttgttggcaggctgaaag

SEQ ID NO: 45669 - DNA, 2218 bp, Heterodera glycines
ctactgcagaaacatgcactgcttgagtccgacttgaacattgtggcagaccaaattcaattggtcagccgcgaggcggaacacttcacgcgcgaggaagggccggacggaaaaggttggcacggcaaagccatgggtccggcaaaaatgccaagtcaacaacggcaattcccatcagcagggtacaagcctgtggagccagccgtggtgcaggaacgggtccaattcctggatcaacgctaccaggaactgctcgaactcgccgcccgtcgcaaggcgaacctcgaggcgaacaagcgattgtgccagttcaactgggacctgaccgacttggacacgcacttccgggagcaggaacaagtgttggcacagaaggacaaaggacgagacattgtgtcggtgagagaagcaaaggaaatggaaggccgaaacgaatccgccaaaaggtcaaccgactgttggccaagcacaaaaatgcggagaacaacttggccgacctgggcagaggcttggaccaattgcagcagcagggccaacagctggtggacgagcaaatccccgggtcgggaccggtgccgttgcggttggccgagacgaggacgtattacgaccatttgagacgattggcggacgaacggcgcaaggaattggagggggcggtggagtactaccaggtcaaagggatgccgccgaatgacctcggttcaacgacggaccgtttagttcttccacgacgcggacgacgtggaggcgtaccttttggacactctccgcgtggtcagcaccgacgacgtgggccatgacgagtcgtcggtgaatttgctgatcaaaaagcacgacggagtgtcggacgaattggtcagtcaatgagcgaattggtacataactcggactgatcggagtgatttggcaaaatttgaaggaacgatttgaccggcagattcaacagttggagacacaggcagacgcactgccggaagaggcacgagcgcacccggtaaaggaaatgggaggacggcattttttaaatccatccggcaatctttctcaccgctaagaacattgcgtcacggatcaacggcacgcagcagcggaagtccgatttggtggaggtggcgcggctgcgcaagcaaagactgctcgacgcactcagtttttacaaagtgaggacagagggacaaaggtttttcagtcaaatgatcaattaattaattgtgttgttaagctggtggccgacatcgaatcggtggagtcgtggattgatgagaagggcaaactgctgaagacgttgatcccggggccggacttggaggaggtggagataatgaagcatcggttcgagacgttgcagaacgacatgcacaaccaaaaggccaaagtggacacaatcaacacaatggcacgggacatgcagaaggcaatttacactcagcagatgattagtaaaaccatgaacacaattatttagcaggaacatccgaactctgatgacattttggccagacaaaacggtaattcagaaatggaagtgtcgtcgcaatttgtcagtttgacaccccccccccccactaattacccctaacaacctccacccatcactttaaagctttgaacgcccgctgggcacaactgagcgacatggtctcccagaagaaggaggagctgaacaaagctcatcgcatggaaacgttcagaatcgactgccaagaaacgatcacatggattgaggaaaagacgagggttggcattggcacaaaggcaaaaactatcactaattaccataattaggtgttggaagacaccgacgaaatgaccggcgaccttaccggagcgatgaaatagccccgaccactttccatgatggagagggacctcgccgccattcaagccaagcatgccacgtgtttgggactccaaatattttccatatctttgcattctcagactccactcattgcccacccaatcgaatgccattgagcggcaaaagccgcaagaaacggcaccaaatcctcagaacatgacgcgcattccactccctcgctgactgattatgacggaatccgactttgtttctcgcggtcggttagggtgaagatatattgctgaatccactggtgcgcgagcaggagtgtaaactgatctacgcaggcgacttgtcgcgatctctgctccactcgtagcatatcaaagcgaagattcttatgttccgccctta

SEQ ID NO: 45670 - DNA, 1491 bp, Heterodera glycines
atgactttcccctcctccccctccgctgtctttttgctgctgcccgttcatcttctgttgatgctcgtcagcgctgttgtgttcatcatcttcagccaatgctgcggttgctgtaagaaaaaggccagtttttgatgccacacccacacaatcagcagaattagccttttaattaattaccattttcacaaaatgattatcactttttttcagcagaatggggaagcactgccgccgccgccaacgcaatttacaatggtcggaggggtacccgtggcactgtcacctgcacaaactgctgctggggttcaatttgttccgagtgagtgttgcgtggattttgaacatcattaacattgaatacacccgtcatttcccattttcagagaacgattcaaagtatgagacgttggccagtttggatgcgaacatctttgtgaagtccggatcaccacaaccagcgccaaatgatttccagtcaaaggtggccggctccaaattcgcaccgagtaagagcaatcaaaatgttcattgtcagcaaatgttctaaccaaattcatttttcagatccaaatccgcagcaggcaaaggctgggggatcgcaatttgctccgagtaagagcaatgttcagctgcagatggtccaaccaaataattcgtgtcctctgtcccccttcagaacatgatccgaagtatgagacgctggcccgtgtggatccgaacatctttgccaagaatgcaccaccagcagcgccaaaaccgcagcagtcaaaggcaccgcaacaactcggtcagggcaaagagcaatgtttttgtgttccatccaaatgcatttctgtccccattttcagtaaaagattcaaagtatcagacgcttgccggtttggatgcgaacatctttgtgaagaatgcaccaccagcagcagcgccaaaaccgcagcaatcaaaggcaccgcaacaactcggtcagggcaagagaaaccgttcaaattttaaccaaattctcatgtctgtggtcccctctttttcagtaaaagattcaaagtaccagacgcttgccggtttggatgcgaacatctttgtgaagaatgcaccagcaacaccagcgaaagcggcaccacaagccccgggtaagagcaatggttttttgtgtttcaatctccaaatgacatttctatcctccccttttcagtaaaggattcaaagtatcagacgcttgccggcttggaccataacatctttgtgaagaaatagttgccgaagtgcgtatatgatgagaattggatgattgaccgatgttatagatatatatatattatatatgtcttatgatgttattgtctctgttttttgttgtatatttgctgttctacagtaccatgtatatacatatgtgttcctaactcataaatattattttcaagtgtacaatgtgcatttttgtttactaaacacggtaattttctctttttgtttctaaaatagattaaa

SEQ ID NO: 45671 - DNA, 885 bp, Heterodera glycines
atgcttaatcgggttcaggaagcgcggaaacaagccaaggatacgacattggcattggcagccgctaatttagagtccaacgggcgcattcagctgcggaaccgacgaattctcaggggacacatggccaaaatctacgccatgcattgggcgtccgactcgcggaatttagtttcggcttctcaggacggcaaattaattgtgtgggactcgtacaccacgaacaaagtgagccgagttcaagcagtacatgctgatatgtcaattttcttcaggtacatgccattccgctgctgtcttcctgggtgatgacttgcgcgtacgcccccagcggatcgttcgtcgcatgcggcggattggacaacatttgcagcatttactcgctgaagacgcgcgagggaaatgtgcgagtgtcgcgcgagttgcctggtcacaccgggtatttgtcctgctgccgcttcttggacgacaaccaaatcgtcacctcctccggcgacatgacttggtcagtcagtcagcagacggccaattgagtcccctcgggccatttgccaaattgaaaaacgatcattttggcatttcccattgaattcactcaaaaaccaattaattcgtccatttcctttgtcccattttagtgccctttgggacattgaaacgggacagcaagtgaccgcgttcaccggccacaccggtgacgtcatgtctctgtcgctttcgcccgacatgcgcacgttcatctccggcgcgtgcgacgcatccgccaaactgtgggacatccgcgaagggatgtgcaagcagacattccccgggcacgagtcggacataaacgccgtttcggtacggacaattagcaatgaaaatgcagtcgattgggaaacatga

SEQ ID NO: 45672 - DNA, 1379 bp, Heterodera glycines
atgacttgtgcgaagcgcatcagtcagcagagtgcgttagcgttcaacagtgcgctcaacatttttgcggtaccacccaccaacgtgtcggtggcgcgctcattttttcgcgaactccttccattgtcaacgatcagccaggagggaccgtacctattccgcatgtacaatgatagcctgtgggccgacctgtcccgtgtgtacctgtacctcgaactgtccgttgagaaggcaaatgcgcagggcatcatggagccaattgacagtgtggtggacaaggaagtcggcgtatgccagagcatcggtcaaacatttgtacaacaactaaaggtgggtaacagcagaagccctcgcagacgcacacatcagtattcaggttgaagtgcaaaacacggagctgtacgacagcgggacactgtacccgttcaaagcgtacatctccaacgagctgtcatttcccgcaaatgcaaagagccatttcatggcttccaacggctactacgtaagccggacacacgatgacgccaatgatgatgggttcaagaaacggtgtgcacgattttcgggcggttgtaaggcggagtttatctcgcgcctcgactttgacttgggcaaccaagaactgtacctgctcaacaacatggacgtcctgttcaccatctaccgttccaaggacgcattcctggtccacagtctgggcgccggggctgccgccacttcgtacgcactccgagtgcacgacatcaaactgtacgtgaaggtcatcgaggtgcagccgtcgctcaacatctccatctacaagaccctcgaaaaacagccggccacctatgctgtacgacgcacggaggttcaaatcctgctttctgaccgctggtcgcacggaaatggaccacaacatattctcggcagccatcccacgccgactcaccatcgcccttgtggcgaaccgagccttcaacggcgcctacgcccacacaccgttcaacttccgtccatacgacatacgtgcaatcagtgtacatgctggtggaaacacgtatcccgccatccctcaccgtatgaacttcgtcggagctgcctacgtacgcccgtttgtcgacatgtacgaggcgttgggcatggcaaactcggaacgctccatggacatcacgctggagcagttccgagacggatggaccttctttgtcgtaccgatgacctcgacgctggacgacagctgtggctttgaactgctccgctcgggcaccacaagtgtacgccttcagttcaacagagagataccgcaaggcggcgttgaaatgatttgtcttggcgaattcgatcaactaatcatgattgattacaaccgtcatattgtgaccgattcaaaaattgcataa

SEQ ID NO: 45673 - DNA, 1057 bp, Heterodera glycines
atgcaaatggagcacagtgccggggttggctcacccgacgacgagtccattcatttggcggcacttttccacacgcgtcgtccgcaatcggaaaaggcccaccggcaacaattttttaatggggacggactgctcgaagaggatgagctagtggacctacaggaattgggcacactgagtgatggagacttgtgtatgggcagacaattggtggccaattcgatggcattggccaacgaaagggccgaaaacgaagggacaaaaaagtcggaaagtgttgcggaacagcagcgacacctaatcagcgaacaattacaacatcaacaacggtctgaaagagtgccgaatattgcggcggaagattgcctcgggagatttgtgccggtggtgaaggcggaattcctgccgacagaagcggtggaacagttcctacttgggatgaacagcaatggctacggcgaagagggccaagcgatggccgcaggggcggcgagtgcaatgagcgaagaaacgccccagggggaacaaagtgagcagcagccgaaggagaagaagcagaagagggcgagcagttcggaggaaaggtgatcatttgtttgtcggtttggcatttcgtctcttattttttcctcctttccctccccaccgctttagtcgcaccgccgcccgctctccgtcttccgaattttccgcccctccgccgcctccgattatcatctctccgcaggacgtggacaacctcagcatcacgctggagaagaaccaacagtgcgcctgcaaagactgcggaaaactgttcaattcggtgtggtatttgaagcagcacgcggttaagcacagcaacgaccgtccttttaagtgtcgcttttgcatgaaagtgagtgggggcaattagcaaggtcaattaatgagaaatagcagcacctgttaaacaaaaattaattaaatgatttcaatttagacatacaaattccgttccaatctgtaccagcacaaatgcccggagagaagcagactgcttttgaccggggaattcaacatggtcggtcacccgtaa

SEQ ID NO: 45674 - DNA, 2292 bp, Heterodera glycines
atgccttccgctcgaacttttgttcgaaattgtgcctctcatccctgccgaaaatgccacaccgaatgcgctctcgtcctgttggctgctgcacaaacttttgctgccacgtgtcatcaaatggaaagaggtatgccgtgccatattagggccaaggaattgggcttgaaatgcacttttgtaacgtcagtcacccaatttactcattctatgggccctaactctgccagttgatcaaaaggaaagtgcaacaatgtggcactttttgtaagccggtcatactgtcagtaagacaacaagtacagtagtactaagggcaaaaacttattttaagggcgaacatcaaaaataaggatttctaaggtcgaataagggcgtgaaaacgcaaaattttcagacaaaaaatgtgtttttcgtgtatttctcgttgagttaaagccgcagaaaaaataagtaaaaacttagaaatcccatccctagtaattaaacacaaaaaattttggagacaaatttttcatttcttaggagtgcatttttgaaaagtttcggatcgattcttaggggtgtattttttgagaaaatttttgggtcgattctttggggtatattttattttttattgctagggatgcgatttttagttaaatacctaaaatttttgcgcacttgtaacgttgagataagcataaaaaacgagtttttagcttggtttggagcttctacacccacttttataatacctatttttacctatttcgggatttttctacctattacctaggtacctatttttatacctatttcggcattttggttacctattttaaggattttcaaaaaattcttaacaaaaatgcaataaaatcaaaaaatatacccataagaatcgaccaaaaaaattttcaaaaatgcaccctaagaattggaaaaatttctcaaaaatttattttttctattgacaaaatttttaatttaaaatgtcaatattatctaagaaaatattaatatatttaaattttcgtttacaaagagatatgtagaaccaaaattttccctctttgtttgcttttttccactaaaaaatcgttaataaaaatttttatttacctattttggtacctattttggaatttttgtacctatttatttaatacctattttgagatttttttttacctatttaagtacctattctgggatttttcttacctaaaaatcgcggctctactgcattttacgcgtccaatcgacttttacgcgtccaatcaaaagtttacgcgtccaatcaaaagtttacgcgtccaatcaaaattttcctaattcgaacatccttttgacataaggtaccaaccattgcaaaaagaaataataatttaaatattaaaaacgtaacaccaagagaaatagaaaattactaattaatttttaataaaatttaaatccgtcattgatcacttattaccaaagtatcgataggtatatacgcattcaatcaattgttataaaatttaataatagagagactaatgcaatcgttgtcgcagtcgtgacggggttgaaacatcaaatcgtatttctgttcgttttggctcattcttcgacaaatcacacttgtcgatgaatcaagtgctacggcttgcgtatttttgggcggaacatccgacttccacttttggggcaataaaaagagagatgaatatcaacaccgatcataccgtagtggacttttacaattttatgagagatttatgtcagggttgggcagatcgaattcaaactaatgaactgcttgggggggttgggcgtgttgtagaaatagatgaaactaaatattttcgtgctaagtacaacaggggacgaatgctaaaccgtaaccacgactggattttcggcattctcgagagaaatactaacaaagtccgtttgtttcctgtggcaaaacgggatgctaacactttgctcccaatcatttctgcaaatgtagcgccaggaactctgattataagcgacggatgggctgcttatgggggtatacgtaatttgcagcagcaatttgagcatcgttgggttaaccatcgcttgttttttgtcgatcctcaagacccacaagttcacacacagggcattgaggcaacttggcgtgcagtgaaaaatggtcttcgtcatctccacggcactaaccccgagcctttacaatcttatttgtatcagtatatgtttcggagatctaacaataacgaaaaaatttttcagcaaattctcgaagaaatacgtattcaataccctgtctaa

SEQ ID NO: 45675 - DNA, 1082 bp, Heterodera glycines
atgattggggaagagcttacggatgttgacaaggttttgccaagacaaaatttcattaattttccaattccattttcaaatttttaggctcgcattgcgtcagacattctgcttcagtcgccgccgggcgagttcaacgaggtgttcaacgacgtgcgcactttgttgcagaacgacgcacttttggaaaagggcgtctgtctggaggcggtccggcgctacaacaaggcacagtttgtgccggtcaaccccgagccgggcgctgaacacccggcacgttttaggccgaataaaaggggggagggacggccaaaccggtgaaaacacgaaaaaattaatataaaattgaaatttcaatgtttttgccgactatcactttttaaaaatgccaactaatattaataattggttttttttggcagactttgatcaccgaacacaacgaattgccggacggacgtttcgtggacccaaaaacgggccgtgttttcaaatacgaccatttgcgaaaggaggcggccgatgcgcagccgtcggggcccaaggaaattgacgaaaaattggagccatggcgaaaggcactgcaaaaagtttgctttttggtactttctccaatttaggacactttttgacgaattttagtattatttaatgagaaaaaattgcggaaaatccaacgcgaatgatttgtccagttcatccacaatcaatctcaattgtgctttttgaggagttggacgagtacatttacgagcatttccatctgaccggcgtcgccactgttttcacgccgttgcagcaccaaaaagagccgaaactcattctatgcattgagtcccatcagttccagccaaaaaactattggtttgcatcaatgtaaaatatctgttgaattttcaaattgctttaggaacggtcgttggcgttccgaatggcattttcccaactttgacggctcttcaaaaacggcggggactctccaaaaatgcacgggcaaattgcgtttgcaggtgcactattatgaagacggaaatgtgcagctgatttcggagaaagaggcgacggtggaagtgaaaatgacg

SEQ ID NO: 45676 - DNA, 527 bp, Heterodera glycines
atgctgatcctctatcatcatagcttcaattgcccggctggcccgcaaggacaaccgggcccaatcggacggacgggcccaaagggacacccgggagcaaagggacagcccggacacggaggacgggacgggaaccctgggccacccggcgaatcgggtgcccctgggcctgctggccaagtgggacctcccggactgcccggagagaaagggcgtgacacagagcagcaaatcgggcgccaaggacctcgtggtccgcgcgggttgcaaggcgcagaaggaatagccggagagtccgggctaaacgccccgccgggactgcccggacccgcgggggaggcggggacgcaaggagtgccgggagtgcagggagcacaaggaaggcccggcgaggaaggaccgacgggacggccggggccagacgcagagtattgcccgtgcccacagcgatcgggctgagagaaatgggagagaaaggaaaacgaacggacgaacgaacgatcagatcatgtgccaaccaacatcaa

SEQ ID NO: 45677 - DNA, 1218 bp, Heterodera glycines
atgagcgaggaggaacggtcaagactgctcactgaaattgcaatgcaagaatcgcgcgtttccgaaatgcgattcgaagttaaggtgcgttggtgttaattggtcaaatcattaaaatgttaattcaccaaatgttagtccatgatacctatttgcatttcttacaatgagaaaatttaaatattgtataatttggtctgaaactaagcacagtacaactattgtgccaattcttttcgaaaataaatttttcccataaatggacatagaacaaaacggatgagatgaacaaactgaaggcggaggttgaaagtgggaagacaactgcacacatttacaacccgggcaatggtcatttgccgaccgaattcaatgacccggacgatctgacaaacgcccacattggtgggcattttttaaaattaataattgaatttaataaattcgacctggtccttcatctacatctatatttaatattttttgttttttctttaatagaattgagtacattccacgagggagacgtcaacaatgtgatgccacagcgtgaattggatcggaccaacttcactgatcaggacatgtcgttgaagaacaaactcgagggcccgtaattaggggattatactataaaatgatcgctctttcggttacggataggaaggagtcaatttacgaaatttattcattaaattcgaagcatgtgtttatctccgtttgaagcaccgaaaggttcattcgtagaaataaacttagaatctacgaaaacaagaaaaaatttcggaggatgtgataaattaaaaatttcaagaaaaatgggcaaattttttaaaatttggcaccaaattggttgccacaatgatgctaattaaattaattaattatacattattttttaatgttattgtaaaaacacgctcaataaatttcattgttgttttagttgcttacaaaggagttggacaatgcgcgagacgagcgggcgatcactgactttgatgtgctgcacatggaaaacaaggtgttttcctgaacagtgttataatcgctgaattgtttttcatgtgaattttcaaaagtcggtttttcaaattaaaattccaaaaaaattgtagcaaaaattattgattgtttttaaatatggtaataatatatttgttattttgcagaaacaaggccgtgacagatataagactttgcgtcaaattcgcagcg

SEQ ID NO: 45678 - DNA, 372 bp, Heterodera glycines
accattcgtcgtaacccggacacccaatggatcaccaaacccgtgcagaagcatcgcgagcagcgtggactcacctcggccggccgcaaaagccgtggcctcggcaaagggtggggcaatttttacatttgaaaaaattttcagcgattttttttaatttttgaaaaatttctaggttttaaaacctataatattaataggggattgtgcaataattcatggcataattttgattttttggcattccatttttccctaaatgtatttgatttgccccatttttgcagaatgaagcacacgaagaccattggaggctcgcgcaaaaagtgttggaaacgccaaaacaccgtcgaattccatcgcaagcgttga

SEQ ID NO: 45679 - DNA, 2092 bp, Heterodera glycines
caaagtctgcccgttgaccagcacagatctgaattcatctctgctctcgaaaaacacaaatttgtttgtgtgatcgggtcaacaggatgtggaaaatctacacgcatccctgcattttgcgtcaattggctacgaaaccggaacgaaaaacgctacgttgtctgcacaatgccaagaagaattgccgctacaacggtggccagcaggtagacattagtaaatagcagaaaggcatttttaaaattatgttaattttcgggtacagcgggaaacgtcgtcacagaagaaaagtagtcgaatttctcgcttcggaaaaatattggccaaaataaattctcgaccaaagtctttgaaaccatttttataagcttttgtttaagcaacaaaaaagttcaatataataattaggttccggtaaaaaaacttccgtgaacgggaattcataaaaagcggaagggaaacgggaacgatattcccgcctttttcccctacgaaaattccgtcaattttaaatggaattccactgggaaatgggaaaatttttaaaatttgtttttaacataaaagtcatttttgagagacatatttttaatataacgcattttaagggcgcgctaaaaatttaatttattatttaattgattttataaaagtaatcgataaaagacaacatgtggctggtatttccgacactaagtaatttcgacacggagaaagttcgacactgaactatttcacaaacttttactattcactaaaaaaatccaaaaataccctcctaaatatggaaactaaaattaatcaaaataatccactacagtagaacgataaaaatgcaaataccgtttttcacagaaacaactactggtcataaattgtcaaatttgaagggggaagtcttattaaacaatgaattgctttaattttgggattcttatttcacagcgacttattaggggctcattctcataacagtgagaaatatattaagggtgcgccatgaaatcggcatgcagagaactgttgaatttggcaacgcgctcaatgtgggctactccgtccgcttcgattcaaggggcatgaaaaatgcggaattattctactgcaccgacggaattttgctcaatatgatccgggaggattattatttggggaaatttgctgtggtcatcgtggatgagattcacgagcggtcaataaacagtgatctgctcattgctctgcttaaggttcgaaatttcttttttagttccataaaaatttagcaaaaaaaaatacagtgaaattaccaaaataaatgttttctcttgttaaaaagtcaataaattaattttaacagaaatttctttgaactatcaaattgttgtcttttcctctccacttttcctctgattggtagcgtatttttaagaaaattaaggaattttagggtcaggcgcctaaagagtgccgtcagacataaatcgtaaaattctgagcgagtattcttgaatatttttctcaacaaaacctttttttgttgaaaggggtgggtgatcattagagaccggcgcgggacgggatccctcgcgggattttgaggaatcccagttagtaatttcttatcttgggaattaagagtcggattaataaataaagggtattttggaactgcggcggtgacgagaggcgccgccagggaaaattgttgaaactttctgcgcactttgtgaacaaatttagtccaaaaatgacaatattttatgattttaattgctaaaaattgattagattcccttgaaaaaggaataattttgaaagattagaagaaaaaattactcttggaggggtactgatccaactcataaatgaagaacttaaccaagagcacaacccgctacaccatgcacatgactaagggtatgaagcataaagtaaccaaaagtatatttatttctaactttacaaaagccgatcattacgggtgtaaagaatactcggtctcgaaagtctcagagaccgagtccgatactgaaaacccgagactcaataccgataccaaatgaacccgagacttttctcgaggcgagaacgagactctcaagcatcacta

SEQ ID NO: 45680 - DNA, 2627 bp, Heterodera glycines
ggcaccatatacagaattcatttcttctgttttccacgtcgagaagaggtgaagcattgaaggaactgattaaaaaaacacaaaatgaacctttgcataaatcctctgcaaaaacgcgaggagaaattttaaagttgatgttggaacatatgaagttttccagggaggaagaggtaagttttgaaaaacttgtcgccaagcagcaaaaagagtcaaccgctgccgagtttgtgttcaacgatcttgcacaacgatttgttctgataaccggtgcaggcgtcgttcatgtggatgtaagtaagcatcttgcatatgtgctcggctttgacaacactcgtctgtttcatggggaacaggcacgctatatgccagatctgtctggtggtgttaaacaattgtatgtttatgctccaaagcttattgaggagtgtatcataggtgaccgaatggcgcctctgcttagggtggtcaatgtttcggccgcacctgccagtgggggagggacggacgtgcctgaggttatatatactaatgaaatttttcattcacttcaaaacaaacgcatttccgaaatttgcatagaaattcagaacgcttttggacgctacgtcaaatttaattggggaactagcattgtcacactgcattttagacgaaaattattttaataacaacaacaacaacaattgcgcaatatgactcacgtcgcgtttaacccggacaccattaattgggcgcctcttcttgctctacaacaagagggaaggggagaaatgcaatattttgttggtacacggcatcagcgtggtgctggcctattgaaaaatgttgcccggttcctgatgccggtagcttctaacatgctaaaagcgatgtcacgcgagggagtgagtgccgggagccgcataatggaggatctttcgcagggaaaggcacttaaggaatccattcaggcacacacaaagcaggggatggaaaatttggccgaaaaattgaaacagtgtggaaagggtgcgcccgcaaggaagaggaagagaccggtgaaaagggttaagacggcagtgccaatgcatttgctgagaggcaacaaaagacaggcaatagaccaactcacatttgcaccataaattacacggtggcaagcacgcacgcccgttatagtgagcccacacacaaaaatctataaataggtgtcgaaattaattttctgtctacttaccgcacacagttcgcataattttagtccaaacaacactaatgagcgtaatcaaaaaaattgacaaagacagtgttgaaggcgttgagggtagcctttcgttgttttctcttccgccaacgaatgtggcgatcaataagacaaatgtccgcgagttgttgccactgtcagcacttaatcagaccggtccgtacctgttccgtttgttttcggacagtcagtactgcgacttgagcaaaacatacttgtacttgctcagctctattgagcgcaagaatggggcaggtgaatggtttcaatcagtgatgcagagccggaggataagcgcgtgggtgtaatccaaaactttggcagcagttttgtgcgctcgttgaagatcaacatttcgggcattgaggtgttcgacagctccatctattaccattatcgggattacataatgaaggagctgggctactcccatgaaattcgcaaagctttccatgaggcggcgtgttattatacagatgaggatgatggccaagacagtggcaccaatgatggcttcatcgcccgtgcatcgcgcttttccaacggaaaacagtgcgaaacgatggtgaaactgaattttgatcttgcacaccaaaatgcactgatgctgaacaaccaggacgtgatattcactattcatcgtaacaacgattctttcctcctgcttacacctccttggaagaaagcggacggaacattgcaggaaaacagtaaggaataccgtattcgtgtgcacgatttgcgtgtttatgttcgcaccgtggacgttacgcctagccttaacctggcaatcagtcgtcagttggagtccacctcggccaaataccctcttcgtaagattgagatgcgctccattttcctgggcaaaggcaggactgagttggctcacaacgtgttcacttcaaccttgccccgtcgtctgatttgctgctttgtctctacagacgcttattctggcaatcgacggttgtcgccctttaaatttgaacatgcaaacgtgcgatcgatctgtgcggaggcaaacggtcaagcttttccgagcacgccatatttgttgtcgtttgacgatgcgcagcaacgttttgtgcgcgcttttgtcgacatgtacgccggtctcggtctggatgactcagacacaaaaacagtgtccattgggatgcaacgcttcctcagcggatgggctttcttcgtaattccgatgacctccacgctagacgatacgcccgggtttgagttgatccgtcagggcacttgcacgcttaaggtccaactcgaaaagcctataaaagaggatggttacgaaatgttgattcttggtgagttcgattctgtcctttccatcaacgctgaccgagtgttgagcaccgacggaagtgtttaa

SEQ ID NO: 45681 - DNA, 1212 bp, Heterodera glycines
gtatcaggtgttcgtctgccactgaagcggacgcttggttcgaggccatccattcgtgtgccgacactctgctcactcaggcgttggcacaagtcaatttgatcctcggacaaagtccgcaagtgctccgcatgggttggatggcggagcaggtcgtgccaaatggccagtgaatgaatgtgtctgctttatgcttggcttttcctaccgtcttcctttattttaggacgccgccattggttggagggccgtttttgtggcattgactgtcaacgaccttctcctctacgagtccgtccctgcggtcaaacaagtcagcacaaaaacaaattgcacactttatacacattaattgttgtgccaattccaccgctttttaggaatgggccaacccatcgttcactcggccgctcatcgccacgcgagtggtgaaaaccctcccgttctgaactgtttttataccaatttcaggtgcagaccactgcccgcagtttccctgtcatcatgggtctctccgacattatctctttctcgacccgaaccggcacccaagagggcgtacggacgcatttgttccgtttagaaacgcaccgggaattggcctcgtgggtcaaagtaatgccaatgccgttgacacttcgtgtcgaaattacggcgagttaaacgctctgatttaggccatcatccaaaacacttacgtcgcttgcgaagcgattcagcaggtgagtgcgccgtgcgtttggaatgaccagcagtgcgagctgagcatccaactcgaccggggcatcaaactgagcaccaccggcgacggccaaatgctgtggcagtaccctttcgaggccattcgcgcgaccggcgacgatgggcagcaatttttgtggatggattttggggaaccaattggtgaacaggtgagcgaacgaacggaacagcacgagaccctaaccaaaacgaagaaattgaaaattgtttttatggaatgatcatcctcaaaaactattaactaacaaaaaaaaatttttttttttttttgcttttccttggcaattttcgtactgctgaacaattgaaattcaaaataatgagttgaggggaatgaaatgcattcatttaatccttaaggaggtcgatttgctttgttcccccaaggcggtggtgttcatccttcacagttttcttgccacaaaagtctaccaattgtgtctgtacgca

SEQ ID NO: 45682 - DNA, 443 bp, Heterodera glycines
atggactgtctgtatgctaaagtggtgccgtatatttcggactgtgtgctgggcgaattggagaaaatgggacgacggttcaaacttgcgctaaaaatcataaaggacaaccgcttccagcgactccaatgcacccacaagggcatttatgccgacgattgcatcgttcaacgcgtaacacaggtaatcatctgacaatgagtttcattgttttgactgtcgttaaattatactcatatattttcagcacaagtgttacattgtggccacttgcgacaaggatttgcgtcaaaggattcgcaaaatacccggcgttccgataatggtaagtcccaaactatttttgtcccattaaccgggacaaccattttcagtatgttcgtgaccatcggtacacaatagaacgaatgccagatgcatacggagccccgaagttgggttga

SEQ ID NO: 45683 - DNA, 1742 bp, Heterodera glycines; identical to SEQ ID NO: 21909

SEQ ID NO: 45684 - DNA, 873 bp, Heterodera glycines
atgaccatttctgcgaccgctgacgttgacaagctccaggatgcggccaaccgaatgcgcatttcgtccattgagcagacgtgcgccgccaactcgggccacccgaccagcagttgcagcgcagcggaaattgtggccactctgttctttgccgaaatgcgttatgacgtgaaggacccgcgcagcgcatccgccgaccgtttcattctgtccaaggtttgcaaaaagtcgcgggaactcgctgatcgcgcgaaattcggttgtgtccggcacgggtcgtacgactatttttattggaattgggtattccagttagtggatgccattatcggggagtgatttaatattccaattcgttgcttctactatatttccacaattcggactttcctccaatattcccatcccacatcaattggccatacaatttcaatttccagggtcacgcttgcccaattctgtacgccgcttgggaagaggcgggcctgctcagccgtgaccaagtgctctccctgcgcaagattgactccgacattgaaggacatccgaccccgcggctcaacttcatcgacgtggccaccggctcgctgggccagggtctgtcatgcgctgccggcatggcgtacactggcaaatatgtggaccattcgtcctaccgcgtgtactgtttgatgggcgacggagagagtgcggaaggctccgtgtgggaggcagcaggtgaactcaaaatccacggatagaggagacgtagtcaaagcctgggaacctacgggaaaatattttttcatgaccgttagtttctgttgaaactacatttaaaaattaatcataatttgacataagccggaatcgggattgcatggtttaggagaa

SEQ ID NO: 45685 - DNA, 703 bp, Heterodera glycines
atggcaccttacactcaagttctttattttaactcaaacgtaacttataaaaataataataaaatccaagtgattttccactgttttagattatatacgtttgcgcggaagaaaagtccgatttatccgtgttcagaattttttcgttggatggaacaaatgaacatgaacatattattgacgggaaagttcaaagtgtggcgatcagtcagaatggcgacttgtacatgacgaaacagccgacccacgggacggaagagtccgccatttggaggtaattgcgtgggttttgttttcactgttctattactcttaattcagatcacacatcgatcatccaatagtctaagaatttgcaaatattatataataaaaacattggtttttaggcatgggaggaattttgctcgacattcgacgaatgtttccaatcactttgtgtttacggtaagcttattcttctcataataattcacacatttttaacattccttttgtttgctactaattaagaaaatttaattaaatgaataaaattctattaaatttgctttttgttagataatgaaacccttgcagtcgccgttgtttcatcgcctgttaatttatattcaaagtgcatcgaataacttcatccttttttatattaattttccagacagtgcattaaatgggttgctacaaaagactgtcgaatcattgg

SEQ ID NO: 45686 - DNA, 974 bp, Heterodera glycines
atggaaatgtcgacttcatttcttgactctttgcctggattttctgttgtagattttaatggaagtcatgagaaaagaacttgtgttcctggttagtgtaaaaaatttaaaaagttgtgattcgcttttctttaggtgaacaattattttcagtctcaagtggatatcatgcgggaaatggctgttatgaatttcatggttcaatatgtgcttctcttgcaggatttttgcacgtttattcacttagagattcggtactacctattaatgtaaagcatttttccaattattttttcaaagcaagacaccgagacaaacattgtcgaagtgagacgcaacattgacgagagaagcaatgtgctgccgtcacagggaaagatagtcactgcaagggtgaatttgaaattttaatatacatagttctaatttcgattttgtattacttagcatatcgatttaccaacaaaaatatgaggaggggactttagttttttttacaagaaactcactggttctgtggtccgactctgaattctattgaatacatgtcgtaaaaggttgagcgtattacgacaacatttgcaaaatgtgcaattatctgtgtagaagacacacccctcgccaacgaatttaactcgactttgcgcaaggaggacatacgtgataaagagcgcgataaggtattaataccaccccctcggggggcaaaggcacactccaattactctcattatcaggtggaactgcacaaatttgttcaacctggtgacatcattttggctcgtgttttgggctatggcgaggcgcacacttcttatttgctcacaatcgctgaagctgaattgggagtagtgattggccggagccaaaacggcgaacggcttttaccggagaattccgaaataatgaaagtgccgggaagcgaataccgagaaacaagaaaagttgcacagcttcccattgttaacaaataa

SEQ ID NO: 45687 - DNA, 507 bp, Heterodera glycines
gtcattgacacggctggacgagtgcttgagattgctcatttgttggaccaactttggcaaaagtttgttttgttttgtggtactatacagtgacattcgttttggtgttaagcaaagaagcggggctgatgacctacaatttggtcatgatgagtgcagttgcatcgtccgtcattgaatcggccaagtcacaagtcgaatggatgtccgacaaaattttacgcattttcgagactggacgacacaacccttttcagtttaaacatgtcaaattctgccatacattaaccgacctgaatagagttcgctcacctaaggtacataatcagagacatcccttttatctttgatattatccatttcattaaggttgttttggtcagtgggttggacatggagagcggtttttcgagagaactctttttggagtggtgcaccgacaccaaaaacatggtaattgtctcagagtgtggcttacgagaaattttgtggttaattattactttt

SEQ ID NO: 45688 - DNA, 1972 bp, Heterodera glycines
atgcctcgcattttggcaaaagttgaaggcaagggcaacggaataaagactgttattgcgaacatgcccgaaattgcaaaggcactgtcccgtccaccgacctgtatgttaaagaaactggttcccctgtatagtatgagtcgtgttgctttcccttgaccacaatttttctgaccaatttaagcctctcgatctaaaccaataatataggcattacaaacaaacaaaaaaagttcgggtcaaaagcgttagttgaataaactcccaaggagtgaagttaagactatgcatttaatgcgtttagatccgacaaaatattttggctgtgagctgggagcgcagactaactttgacctgaagaatgagcgttatattgtcaatggggaacacgatgccaacaaactccaggatattttagacggatttatcagaaaatttgtgctttgtccgagctgtgacaacccggagactgtgctggtatgtatatttactaggcaaaacatataatttttgtttagaccgtaaagcgtcaagtgatcaatggaaagtgtaaggcttgtggacacgcttttattgtggatccaaaacagaagctgtcgacattcattctgaaaaatccaccgcctcctgacaacatagagagcgaaaaggaagtgaaaagcgacggcggattgccagctgaggagagtaacgatgtaccagtagtcgacaactcgggtggctgtgatgccgggtcgaacggcgaagatgacgaggattgggcgcctgaacccgttgaagacgaggaaaaactttcgggacaaatcggcaaattggtcattgacaaggacttggacaaatctgtggatgagcgccttgacttgttgcatcagttcttcctcaaggcggtcaagaacaacacgattcaggtatagtctaccataattatacaaataaataaaattgtataactttcttaattaactatttaataataaaattcgtttaggacagcaagatgatgttaaacgaagctgaacgtctggaacttaaatcgaaggcaccgctgttgctggccgatgttttgttcgacaccaatgtcatcactcagatcaaacaacatcgcaatctgctgctccgcttttgcttgaaggacgagaaggctagttcttgttcaaaggagcttaattaaaccatttctccaattttaggcgcagcgcatccttttgggaggcattgaacaacttgtgcaaaacaacaaggacattctcatgtcgaagactgcccacatcataaaagcgctttatgacaacgacatttgcgaggaggacgtcattttagcttgggggagcaaggcgagtcttttctttgttgggctatattttttagtaattgttaattgagtgtaaaaatgatcttcgtatttagccgagcaagaaatttgcggataaggaagtggtgaaagagatgatcaaagttgcccagcccgtgcttaaatggctcaaggaggcggaagaagggtcggacgagtcggaggacgacgatttggacgttgcatttgacgatcgaagccgcaacattgggatgacagtggaggtggaaaagggagcaaaggatggggtcacccgtgtacagaacggccaaattgcaaccaatggcaaaatggacgatgggaatgcagacgacattgacattgacaatatctgattgtgagtggcatggcgcggtggacggtaattcagtgatgttgcaagaatttgtgatcgtatgccgaagactttcacccaccccttttgttcattgcgataccaccacatttttgttcgcttttatcgtaaatgtttttttttaatttactcgcatcggattttttcgaaattagatggggttttttcttgatttgatgataatttcatgacaaatatttttgctagtgatttaatttatttactttaatttgctttcataaatttgtttgtgctataagcatcca

SEQ ID NO: 45689 - DNA, 1338 bp, Heterodera glycines
  unsure (1)..(1338): unsure at all n locations
atggataatgaaacttctttgatggatcagcaacaaaaaagatatgacaggcaaattcgcctttggggcgatgatggtcaattgtcaatccaacaagcgcgtgtttgtgtgtttggctccaactcattggctgcagaaacgctcaagagtctcgtccttgctggcatcggttctttccatataattgacaaggcgttggtggaccacgctgattttgggcagaacttttttgttgaagagggttctttgggttcgagccgtgccgaatgtctcgtcaaggctttgaaggtgcttattttttggataaatataatccatttaagtgtttgtttttaaaggaattaaaccattctgtgcacggtcagcatcatccaatttctttcggggaattcaaacgacaggacttccaaatgcttctgcaattttcgctggtgattggcaccagtctaactgctaacgaagcgcgtcagctggaccaatttctttttgagcatgccattccttttgtatatgccaacgtttgtggaatgatgggtcatttgcgactgtcctttcgggaacattacatttttgaaaatcatgcagaaaatgctgcttatgacttgcggtaagcataatgctatggggagtgggaaggtacggttgccccttctcatcgtttacttcgatttttagataaattttctaaagtttggggaggggtattttttgcaactctcgaccactaattattaacataccttcctttcactaggttggacttcccatttcccgaactgcttcaattggccaatgaaactaacctcgaatcgatgacccatgagcagcactcacacactccctttttgcttctttatcttaaagcgattgacatatggcgaaaaaggtcaaaatttcactaaatgttaaaaagttctcccttttttgacaaaaaaaattatatgttttcttgcggtttctgtgtcgctgcttatgcaaatactaaatcgaaaaagcgaaactaccggaaacgaatttcaagacttataaacgaaaaaaattgcaaaaatggagggatgcacaaatttaattatcgcttccaaaaatcctttaattgtaaaaaataatgcattttttgtagccagacaaaagccaatgacaaagctttgtttcctgatattacttcattcaaaactcggaaggaatttgaacagattttaatgaagatgcggcaaccggacgataaggggtcgttggacgagcaaaatttcactgaagcaaagcaaaatttgttgaaaggaatgcggaaatccaacgtaagaatcaatgaaagctatggaaactatcgaaatatgagtn

SEQ ID NO: 45690 - DNA, 617 bp, Heterodera glycines
atgcgcaaattgttctccgacgctgaggaggaatggcgccggtgcgggcccaactcgggactgcacataatcatttttgacgaaattgacgccatctgcaaacagagagggtccatggtaaataatgcagggctattcggttgtaacgttcattcaatgatttttggtgtaaatttcttaggctggatcatcgactggagtccatgatacggtggtcaaccaactgctgaccaaaatggacggggtggagcagctgaacaacatcctcgtcattggaatgaccaatcggaaagacatgatcgacgaagcgttgctgagaccgggacggatggaagtgcaattggaaatatcattgccagatgagtacgggcgcgtccaaattctgaagatacacacggcacggatgaggtgagaagagaaagcatagagaaaacgagagagagaaaaggggagaagttgtagacagagagagagagaggaagggaagagggaaaaagaagagaatgccaacaatccattcccattaaattaagagaatataacaaattggacaccggcgtgaacgttgaggacatcgcaaagaggaccaagaacttctcgggtgccgagttggaagg

SEQ ID NO: 45691 - DNA, 3414 bp, Heterodera glycines
aattggatctgatccgcaaaaatgtgccaaaggccgtgttggaaacaagcggactgatcagccaaagcacgtcgcacgcgaaggatttggccgcgcgagtccaattcgcacttgagagagtgctgcccgaggtgagaaaagtgcccaatgattaattgtgttatttcttattttttgcttaaatagagcaaaaaatgccgagttgttctccttgaacatttcgccaaggaggaagtgctgctaatgcaaattcaatggtttggcatggagccggcggagaaaatgataacgaattcaaagcaacaaaatgacaatgggaacaaaaggccaaaatggcactcgggcaaatgggaaaaggtgagagagtagagtgtagagagggaggcagagaaagagagaaacgaggaggacgagggaaagtgggagagcaagagattagacagatagagagaagagagagagaggagaaaatggaagagcaaaagataagtagacatatggagtgaaaagagatcggtctacgtcagttgggcccccacgtttgggccccagcatatttttccactataactttctataactttttcctttgtcatccaaatcctataaacttggtatcattcaaaagcttaacatgtttagaagctttttctaaggtattgcttcgcggttagacaattaccaaaaaggttatacatgaaaattgcaaataagtcaaaatttttgaaattttttctaataaattttttccaggcttgaaaatcttttcgctttttgtaagctaatagagcatgtgaagggctttcgaatgataccaagattgttggatttggatgccaaagaaaaaaagctatagtggaaaaacatgctggggcccaaacgtatgggggcccaactgacgggttccgagtgaagagatagagacagaggaggagacaaagagtgagagaggaggagagaggagaagtcgaagcgccacagattgacacatagagagaagagagagcgggggcgacaagagagtaggagagagagaggagggggcagaaaagaaattttttagcttaatatgccaactttcttgactctagcaaaaagtcatcgccgtctcattttttcttagttatgtgctccctttgtgcacgagttggagctcacctttcttttggagcgtgccgaccgttaccagctgttgctgtccaccattaagcaaatccgcgtgatcgatttgctcgggggtttgccaccggcggcagctttatcctctgccacttctgcagcgacaacagagaaagcgtccaatttgttcgtccgtttattattggcgcattgggtgcttttctttataccaatttgttcataaaatttattccgcttattgttgtttcatttcacacatttattgctaattaatataatattttatgggctcagctttacaacaaaaaaaataataattccgatttacgacatttttttggttaaaaattcggaaattctcggacatttttttacttgctaatacaaggaatcacatcttaaaatacacttttgcgagctcataactagggcagcaacttttagtgacgaaaaatcccgaaatagttaactaaaatagtgagtaaaaatcccaaaatagtgacaaaaagtccgaaatagtgacgaatagtgacataattttcagccaaaaattgagcaaaaataatttttattcactggttgcagttgcaaatgagctacatttcctttataaaattctcttagcaaatattgacattttttaaatcaaaaattttgtcaagaaaaaaatttttggggagaatttttgaaaaaattttccaattcttagtggtgtatttaaaaaaaatttttggtcgattcttaggggtgtatttttttgaaatttttttagatcgattcttaggggtgtattttttgattttattgcatttttgctaataaaatctctgaaaaatgtcgaaatagttaaaaaatagtgacaaaacgccaaaatagtgaattttcactattttagtgacgaagcgtgaaaatagtgatttctagtgatcgatagtgagatccaaatcgaaaaatttcaacgcagaaatgcgttttttgagctcctttcttcaaaacaatcgagcaaaaaaaatagttaaatcactaaaagttgctgccctactcataactaacaaaaagactaaaaatcacgggtttacacaaattagaagaaagaagaaaaatcaatgatttaacaacagcttttaaaataatcaaagggttcaccagcctcgatgctgggaaaagtttctttttctcagaaaggcccaggaggcctttacttttacgggtaaagcgcccgccacacggccaaaactcaaaataattttttcaatagaatagtaaaaagctggaataatcttccagtggtagcggtgcaaattaataaggcaaaggaattcaggggtttactaaaagcaatgagttctgagtaggattttccatgttgccatatttacactatatttttatcacctgtgaatttttaacatttgattgaattatttttattcatttttagtacggtattcattttgtatttttattttgatcaaatttatttgttgttttcttttttggcaccatataagagcactcatgtgcctttggtttgctcgataaattaaattaaatctatgcttatgaaaaattggaacgcttcaacgacatggtcgacgcagtgaaaaaggtgacaatttgattttggatacattcagcagcttctaatgcttttccttccttttcagttggtcagcatttgctccgaattgtcttataacaaaagagttgctgtgggtggctttcaaaggtgcgatttcgtcagccgtggcgtgccctctgcgccatcgaacaacgcttctattcggatactgaggggcaacggctggtgcgcaacacattttttttagtgttttatcttttcattttcaggggttcaagtcctatcgcgaggagttggaatctgagctgcttgtcaattgccgtggagttttggtccgtttcgtgccttcattttagatatcaatccaaataccatcgcttttcaggagttcctcgactcaactctgattccaaatgcgacgaccaacctggaggccaaggtgttctacctcaagatgaagggcgactacagccgctacatttccgaaattgcgctgggcgaggacagaacgagtagggaatttgttttgatgttgctaacaaataattcgccattttttcatttcagccgccatcgaagaggcgaagcagtcctacaaccaagcggcagaacacgcagcgcagctgaccccgtccgacccgactcgtcttgctgtcgcactcaacatgtccgtgttctaccacagctcctga

SEQ ID NO: 45692 - DNA, 473 bp, Heterodera glycines
atggcgtcttgcaaagcaattggcattgatctgggcacaacatattcatgtgttggcgtttatcagcatggaaaggtggagattattgctaacgatcaggtaaaatatattttattaaatttggaataaataaatggaaataatattatttacatttgttaagcaacgaggtgcagacatagtttttacagtgttaataaaaatgaaaagctgccgacaaaaataaatttaaaagtcaataaaactttgtggaattagtttttaaatatgtaattaaaaattaggatttttagggcaataaaaccactccgtcggtggtcgccttcacggacaccgagcgactgatcggcgacccggccaaggaccaaatggcccggaacccgaccaacacaatttttgaggccaaaagactgatcggacggccctgggacgacccgatggtgcagcgcgacattcgccagtggcccttcaaa

SEQ ID NO: 45693 - DNA, 770 bp, Heterodera glycines
atggccaaaggtgtgaagttcgatcacgacaacgcgttcgtgcgattctgccgctactatctatggcattactgttggagtgggcgtcagtacggtgggtggactcaacaattgccgaggctgttaacttcaaagcattgagtcaatccgttcacaggtcttcaattctacgaccaggcattcgaaccgcatcccgtagtccaagaggcactgcgccggctccgtcttaaggacccctaccaggtggggatagagaacccaattttatttggtaattcaattcagtacgaccttcgtctgcagcgtattcttttggccagtcaattgggctcaaagaatgagcgactgccgaagaacatgtggacaaaatgggacgacgagacattctatctgaacccgtattttaacgaaattgaggaggaaaagctggagcgtgaagccagcacgggcatgaagccgggataccaactcaaagagcagatttaggggacaggttgcgttttacacatttttaagtgtaatcgttcgtgcaattttgtgtgatgtgaaaagggctgcctttaatactccgaaatttttccgcggggctttttctcatttactaatcgaattaaaattgtatatatttttagacattgtgttgtgaacgattaggcgcggaggaaaagcacattgcgtttgttggtactgtggccggagagaaattgattgatgagtgattgttcacaacttttaggacgacatgtgttatgttcatttaacgtgaagta

SEQ ID NO: 45694 - DNA, 1092 bp, Heterodera glycines
cagtcggcgtggcgaagttttgccgaaacggcgatgacaaatggaaacatcgaactcggtcagtgagtccattggttaaatgcatttccaattgcaattggaactgtgcccaaaaagctgtgcgaatatttcggcacctcggtgacgtggcgatggtttgggcacttgagcaacttctgaacatcgaagaccaacaaacgctcagtggccatgtggccgcactgctcggcaacttcgacgaggccgacgattttttctccaattcgtcccaaccaaaacttgccctggaggtgctggggcactcgtcaacaattatttcaaattactttcaaattttccaatgattggtcttttgattctgatcagtctattaatttttgctccataattacttatgatttttcggctttatttgctgttagatgcgccgcgacgttcaacattgggaaagggcgttggaattggcgcgacaaacggcgcccgacgaattgccgggcatcgccaaggaatacgcggtacagctcgaatttgcggggcaacacgcggaagcatttcgctattacgaagaggcattgatcacttcatccagcggaaacgcatcgaaaatgagcgaagaacagagggaggaacacaattgggtgtgctcggcggggtgagcaatgggaaaatggacggagacggggcgggggggacactgaatgggatatatcgtaaaggatttacggcgatcagcaaagatggaaagctgatcggaatgcatctggatgactatggggaggactaattggatggaattcactgtttagactagccagaatggcacttcatatgggcgatctgaagaggtaagtttaagaaaactaaaatgattaattaacccagcaattgtccctctcccccaaaaggggcgtggaaatcgctttaaaattgccgagtcgattggccaagagagattgtggcattgtgcttgaacagcttagagtaattttgtgattgctattctaaatttagcttttcatttgttagcaattcgacgaggcgggaagtgtttacgaagcgggtcaattttatgatcgtgccgcggtttgacta

SEQ ID NO: 45695 - DNA, 1232 bp, Heterodera glycines; identical to SEQ ID NO: 22128

SEQ ID NO: 45696 - DNA, 464 bp, Heterodera glycines
atggctacttacaatcccaactatgaatccattgggcaggcctttgtccaacacttttacaccaaatttgatgtgcccgatggtccgactcgcaccgtcggccttcatgatttgtatgatgctgaacactcttttatgacttttgaggggaaccaagtgaaaggtcgacaggccattttggacaaatatggagtaagtgtttgttttttgctttatgtttacttaatcgttaattttttttatatttaggcgctacctttccgaacgattcaacatgggattacaaaggttttctccaaattagtcttttgcctttcattcttttcggtttggaaatttattaaccaataaaacttcagactgacagtcagccgcttccggatgggtcaattttggtgacggtgattggtcagcttaaggtgtcctttacagtggtttatttattcaactgttctttgctttag

SEQ ID NO: 45697 - DNA, 1616 bp, Heterodera glycines
  unsure (1)..(1616): unsure at all n locations
cggttggcacaacgacggacggccgcgtgttcctcgacgcttctttggactatgtgctgggcgaaggccttgaccatggactgccggacggagtggacaagtgggggaggagggcaagagaaaacgccaaatttggaaatttctaacactcccagttttgactgtccacatattccgattctccggtgcgaatttgtgcctttttcgattcgggattgatttgaaacggggacattcaagccaagagcatatacaccccaaatcgtcgccggaaaaaaaaattcaaattttttaaaaaatgaggggcactcaactcccggccatttccatgacccacttttaaatttcttattttatttattagccgaattttaaatttctcattcatccggcagggcgttgaaacggatggaccgcggtgaaaagagtcgtgtgacgctgaagggcaaattcggctacggcaaatgtccgcccgcggaactcggcctgggcatttacgaagagattgtgttcatgctgcacctcaaggattatgaaaaggtgagcataaacaaaggccttttttccgctccaggccttactaatttattttaaagaaaaacgccagcgggcaaaagcatgcaaaaaatccccagttttgccaacggagagctaacctgggatttttcgttataattttgttaaaagtaccaaattcctccatctttaatcgaaaaacgagttcattctctgctttttccaaaacgggggaatttccctgacaaattttcccgtgcgaacacaattaataattagctaaaattgcactaattaatttgtatttatttgtacaattatgttatttttgggggttttcacactttcaggtcaaggccacttgggaattgactgacgaggaaaagttggaccgtgtgaaggcatacaaagaccgtggcaccgactttttgcaccagggcaaattcgcattggcactggccaaatacgacacagtgatttatatgatggaatttgcaaagccaaccaaagcgccacaggaaggtcaaatttgatgggtgcactaaattttaaaaaattaaaaaacgttttctttaaatttcaaaaaaaaaattccaaaacatttttttgaattttttataaaaaacccaagattttaaaatttgtcaagtactactgtaatcggtggaaatatggttggtggtaaccgctcttcctttccaaatttaggcggagatgaaattgcggcaaaatttgaacagatgttcattgcggcacaggtctgctttttgtttggcattaaataaattaaatcttgacggtgtcagacacaaaagtacagtatgatatcgggcacttttttaatatttacaaataaaaaaattctacaaaatttccgcatgcatattgtcacagttgaacagtgcgttggcccacttgcgaatgggcgacccaattgagacgatcaaacattgtgaaaaagtgttggagcggcagccaaacaatgtgaaggccatctaccgtaaggcacaggtgtgtcgttcatacattttttaggnggaagggggtcgacccccccccccccccccctcgctcgcaaagggggccagcgaggggggggg

SEQ ID NO: 45698 - DNA, 2132 bp, Heterodera glycines
attggcaatgagcagatatacgttgaaaggacggtaattgaaaaaccatacttttgattgtttatggactatataagtttagttcctcgaattccattcaaccattttgcctgcacttataaatggaggaaagggaacgtcaaagcaaaatcccattcgccttgaaagtcgcttcaaaccttcgctcgttaagttggcgtttcgcgtcgttggcttaaaatcggcattttatggtaattaaattagtaatggattgtgtgtttttcctttttggatcataaaacatttaatgttagttacattagccggtattattacaacacaatatttagtgtcaaacattcccgaattgttggactttgcgacaacttacggcttccactcacttcttcagatggtcgaacaaaggctggttaccaaaacctgcgcaaagttacaaatagggacgaaacttgatttggcttacaaacaccatatgaatgggctaatcgtacgttttatcttgagaatatttaattaggcacataattaccattcgctggaagatgcttacacagactctatttaggtggcaattgcaaagcgaataaataagccgaccgaaattgaacatcacctgaaaatgaaaaatgtgccggcgcagttcaaaacaatgctccggagaaagatggaagcgattagggcgcgggttttcgaaatcggagcgaagagcaaagagaaaagagagcgaaaaaaggaaaagagagaaaagaaagagcaaaaaagacgcagggaacgccgaagtcaaaaatgtcctcaaaaagcttaaactttcagactgattgtgagattaaacgccttattcaattgtttaaattgtgcagattcattcttaatttgttatttttgaattaggtttataaatcatttctttatgataagttatttaacttttgatgttcatttaatttttttttacaaacatattttctatatatactattagtgggtgtaatgcgtgttctgtcatttgctggattacaactcaaattggacacaatcggagatggtaatatttggacaaaaaaatattatatgggggacttttacgaaattaacaagtttaattttttgttccctataaagggctgattttgtttcaggtgagaagatagcggccaaaatccgcgagtgtgccggcttggaggtgttggaaatgcgcggcaatacgcttggtgtgggtgcgaccgctccgatcgccgaagcattggagtgccagagcaacttgaaggtagcaattgtcgcattccatttgtcaccctgttgattaagagagccctttggagtgacatgttcaccggacgactcaaagaagagattcccaggacattggtacgctgtcgccccacaacttcttgtattaattttagaaaactttgtgcgacgcaatgattctgagtggagcgaggctgaccgagcttgacctgagtgacaatgccattggtcctatggctgtgccggggataaaagaatttcttgctggcgaggcggcctttgccttaaagacgctgaagcttaacaactgcggccttggaattgcgggaaaggtccatccttacccttctcttcaattgttgcaattttccacagacaattgctcactgtttgatagaatgccatcggcgatcagttagccatggcactccgctttgtctgaaaatctttgtcgccggaaggaatcgcttggagtacacgtcaacggctgcgctagctgaagcatttcaggcactagatgaataatttaatttaaaagaatttagtctttccattcgtttatcaacaaacgcattttgttaattttacagataattggcacccttgaggaaatctccatgccacaaaacggaattagcgctgaagggatactcaaattatcggaatccgtgcggcaaaatgcatcgctaaaaatactcaatcttggcgacaacacattcggagaatcgggagcgagtgccatggccagcgcactggaaaagctggccaggttggaaatagtcgacttcagcgattgcttgtgcagagaccgcggttcggttctgatagctcgcagcatggctgcttcgaaaagccccctgacggagcttaacttgtct

SEQ ID NO: 45699 - DNA, 1835 bp, Heterodera glycines
atgcgcaattcggtgcgggatggaaaaacggtgtccaacgaagtcatttctttgactgtaaaaggtgacttcattccaacgccaatttccgtcattgtttctattttaggtccgtctttgccccgaatggttcttgtcgatttgcccggagtgatttcgactgttaccacagacatggccagggagacgaaggaggacatcgcgaagatgtgcaagcagcacatggagaatccaaacgccataattctttgcatccaaggcatcgcagcaaatttgtctcattcttttccgtttctttcagatggttcagtggacgcagaacgaagcaatgtgaccgatttggtgaccaacgtcgacccggacggtcagcgcacgattttggtgctgacaaaggttgtccttcaaccgcaggacggcatttgcagtcattttgcaattctgtaggttgatttggcggagaaaaacttgagcaacccgcatcggataaagaagatcctcgacgggaaactatttccgatgaaagcgctcggctatttcggcgttgtcaccggcatggacaagcgggacgcgagcattgcggagatccgcaaatacgaggaggacttcttcgagagttccaaactctttagggatggcgttttgaaggccacccaaatgacgacgcggaatatgtcattggcggtaaaaacttttttaagctaatgaaacgtttcccgtccatttgtttaggtttcggactgtttttggcggatggttcgcgaatccatcgaagcgcaggcggacgctttccgcgccaatcgcttcaatttggagacggaatggaaaaacacttttgcgcaccaacgcgacttgaccagggacgaactcttcgacaaagttccgtcggtttccctcccccacggttttttcatttttaggcccgtggcgaagtgctcgacgaagtggtcaatttgtcgcttgtctctgccgacgaatgggaagtgcttcttcgtgcgcatttgtggaatgccatctgtccccaagtgttcgaccaaattctgatgcccgcgtcaacggtaaaaatggacgaattatggtggtgtttacgttaaatgaccctattttaaggttgaaagtacaagttctttcaacactgtggtggacattaaactgaaacattgggcggaaaaggaattggccaaccgatcagtgcaggtccgacaattataatctcaattacctaatcagtaccaaaatttaaaggtcggatgggaaacactttcacaaatctttcggcgtcaagtgagcggcgaggaaaggggcggacagacgctgaagtccaatcggacgcacggcagccaaaaatcgccggatggtggaaatttgttgaaagcactgaaggctgcggtggtcagtgccgtgttggagcagcacagatgggattcaaaagcgttggattatttggtgattggtcatcgtttgtctttacaaataattctggtgggtgttcagcgtgttatccaattgaatgccgtcgctgaccaagtggtgcccgaccgaagggcgtgggaccaatcgtgcgctttccttgccaacgcggcctctgaccgaattcgtgaacttaaaaagacattggaaggtgtgtcgggaaatccgtttggcattgccattctctgctcgtacagaatctcgcggtccttcgggatggtcacgttggtttggttggggttcgccgacgcctgagcaactcgtcaaccaaacggttcaagacgaacttcgagctttgctcgtcaataatccggtagccagtttaaatccgagtccaaaattaattgtgaatgaaagcgtcaccaaat

SEQ ID NO: 45700 - DNA, 978 bp, Heterodera glycines
  unsure (1)..(978): unsure at all n locations
tcaaaaaggcctattatcgccagtcaattctgtggcatcccgacagatttgcatcggcacagcatgacgaaacgacgcgcgagttggccaagcagaaattccaagtgatcggcagagcatatgtaattttgggggatagtgagaagcgcaaagcgtacgacgaaacgggtgagaaaacattggaattttagtcagcgaatccgactttatctccaatttgttggcacaggttcgctcgacgatgagaacgaattttacgaaggcaaagattggtcggccgtgtggcgaggcgttttcaaaaaagtcactccggaagagatcgaagcgtacctggccaaattcagaggtccgtatggaaagaacaatagttcaaggatgaaaatgtataaatgaatctaccgcttctcgttaattggattgatttagagaaattagttttaaggattgtttaagcaattggtattatatggttcatatgggtttgtattaaattgaacttgtactatcaaatatatttaacgacgtggagaggaagtcggataacgaaactttcaaaattacatttccaaattattttttaccttttaaggttcacaggaggaaattgacgaggttaaggaggcgtatcagaagcacaaaggcaacatggacaagatcatgcaaagtgtggtcggcgccgagcatccggacgaggaccgaatccgcgagatcgtccgccatggcatcgagcggggcgaactgcgtgcatatgctcgcttcgtcaacgagcccgcctccgctcggactcggcgtgccgcgcgcgcacaacgcgaggaggtggaagcgcagcaggcgctggaggagttgcgccagagggaagacgtcagcaaagggacggacggcgacgactctttgggcgcattgataagggcaaagcagcgcaaacgcgccgaaaagaatggttcngtgtgctgtttccggacattagaacgtttttga

SEQ ID NO: 45701 - DNA, 940 bp, Heterodera glycines
atggagcgttatgatcgtgcaattacgattttttctccggatggcagactttttcaagttgactatgcgcaagaagcagtgaagaagggctcaacagcggtgcgttttattgctttttaaaaatattaatgtgcattgctttaggttgccgtgaaaggaaaaaattgtgttgtaattggagtcgaaaaagtaaattatttttagctagtgtattcacagacataaaaattgcttaaactgttctggtgaacttttattttgcagaaatctatcccgactctgcaagacgaacgtaccattcgtaaaatacatgcattggattcggtaaattccttattcctcttcaatgcacgcctatgtttagcatgttatggtcgcattcgccggactcagcgccgatgcacgcgtccttatcgaccgtgctcgagttgaatgcgaaaattacaaattgacgcttgaggaccgcgtatctgtcatgcatatctctcgcatcatagctgatataaaacaggtcaattgacttacaacatctgagtaactttttgtttgtttagagatacactcaaaccactggccgtcggccttttggaatttcaatgcttgtcggaggcttcgattctgatgggacccctcatcttttcaagacggaaccgtccggagtttactacgaattgttggccggttcaatagggcgaaatgaaaagattgtgaaggagtatctggagaaagaatacggcaacgacaacacagctgatgaggagtctacgcttaaactgatgctcaagtctttagccccagtggtccaatcgggggcgcagaatatcgaaattgcggtgaatacaaaaatacacgttaatttactagcaattcatttttaaggtgctcaaatgggtggatggcaccaatggggaggcaagttcatttttagaaagctaataaa

SEQ ID NO: 45702 - DNA, 1557 bp, Heterodera glycines; identical to SEQ ID NO: 22247

SEQ ID NO: 45703 - DNA, 1783 bp, Heterodera glycines
atgactaaggaagagagcgaagatcctcccgccttccgcgagtccaaaagaaaacagcacgaagaaaagcgtagaaaggaggaggaaattgttgcggaatcggctttgaaggaagtgcgttaggtgaaatcgcagaacggcacccattgactcgtcacccggaaatatataacttttttgggtgggtgagatgggcataattggattgcaaccgatttgcaggcaaattcagattaactcatttcataccggacccttcctatattaattgaataatataaatggcttttagtttgaaccagttcgtctcgaggttgagcaggcactcctaaaaaggttcaaacgctcaccttatgccaaaatgattgcgaatggtttggtggacgacactgtgccggaattgtcacaggcaagtgatatgctgcaggaagaagtgatcgacacggtgtatcaactggcagaggaacaccaacagcagcctggcgcaatatcaaacaggtgccgtacaatcttacaattagggggcggaaattaatgacaaagccaataggctagtaagttacttttctcgttttggcacttccccctgcccaaaaaaccttcgccgaccttgacatacatgtgcaaggggtgtctcaggccaagggtcgtacgacggacgattgagacaggggggggtgtacgaaaaaggtccacttttttccccgatgacgaccttttttctttcctttttttgctatattttttggcaaccttttgctattaagaaatctgagtataatttgttgacagatttacaccaaaaaaggtccattttggaattttgagtcaggtgacgaccagttcatacttttaacaacacttttcggccgcttttgatcaaattttaaattttcccccgtcgtcgacgatccccccccccccgttcccacgacgacccctttcctcttttacagccgccccccttacgacgaacgaagggagggtgtccgaggcggcctcttacgacgagaggggggggggggtgtcgagacaccccttgcacatgtatggtcttgagtggtggtggatggagcaggagagggttttttaaattttaataaagcactttttcatttattttcagcgggcattatgccctttatgggccatctttggcttcgttgggcatttccaaggatcaaaaccagcagcgaactcagcaacaccaacagatttcttcctttccctcctctgattcaccagccatttgtccaccgactgttgggaaccaatcaaatgatacaattatctcaaacgaagacctcgacttgacaggtcctttttagtggtggccttgacattttacaatatttaggcatcgatgacaatgaaattaactcgtacattttgacagacgtagagacgaccatcaaagagaagtattggatgaagcaaaactccaaacatttagaagtgatggaggaaaggttggaattcggtttaaaacaatatcaatctaataaaaccatttttcaaattcctatttttagaaaacgacaacgccaggaggagcaagaacaacggcaaaataaagaaagcggcccaaagaggagaaaacgtgccccgaatgttcggaagagggaagtcaacgcggttacgcacaatgacgcgatgctccatgtcattcaggtggagggggccaatgccgaattcattccttcactgttataaattttaggaaagaaatttgtccagcaaaattaactacgatatactgaagcaactcgatgatgaaagctga

SEQ ID NO: 45704 - DNA, 285 bp, Heterodera glycines
gggatcaaccctgggaggaagcgcatcggttacgccttcaagtccaccaaccggaagcgcatcaacatgaacccgccgaacggagtgctcggcccaaaggagtccgtcaacgtggccgtctcctgcgacgccttcgaccccggcagcgaggacaccaagggcgaccgtgtgaccgtggagtggaccaacacgccggacccagccgccaccgcgttcaagctcgagtggttccagggagacgggatggtgcgccgcaagaacttgccgatcgagtacaacgtctga

SEQ ID NO: 45705 - DNA, 2356 bp, Heterodera glycines
atgttgcccaactcgtcgtcaatgctgctgtttcacaaccttcgaaaacagtcggtcaacgcgcttccgcttggtcgtcaagcagtgcacaacgatgtccaattccccaactttgacgcgtatcgcaacgaattgaccaaagacccagctcaaccgtcccatgtgactgaggacaggcgcaaaggcgtgtcaagcttcatcttttatggaggtttgccattttttgccgagtttggtttcgattaaccaagggttgtcccaccagagtggtctaaacctccttggagactattggacatttatccgttgaaattttgaaaaaataacggattatccgttttcgttcgggatatgaaacaaaatgttttgcactgctaaagtttacgtatttactttgtcaccccaaaaaaggatgtctttttattgaatgtgaccctgactttcgaatttatatttaattcaattgattggttctcaaattaaatattaaattttgtatacatttcagtgggcggtgccattacgttgatgacagcaaagttcgccgtccgaaaagcggtcacttacaaatggatgccacgggaccaagccgcaatggcagcaaccgaaatcgacctcagcttggtttatttttcataatcaaatgaattaatctaacaaatcttttttttacatagctccttatcaagaaaaaccattgctaagattttttttctcagatttttgtaccgaattttagtcagtagttccgaaattcataaaatgcatttcgctttgaccaaggacctccaaaaaaccttgggaataaaagagtagtgaacccaaaacaatgccattttccgcccaaattttccaatttcaattttttttttccaggtgccattgggcaagacaaagacatttgagtggcgtggtaagcccgtgtttgtcaagcatcggacggccaaggaaattgagcgcgaacgtgcggtggaagtgggcaaactgcgtcacccggaacgggacgaggaccgtgtgctgaagccggaatggtccgtgctgatcggcgtgtgcacccacctcggctgcatcccattgtgtaagcgatattttagagaaaaaaattgttggatttcgaggcattgtaatttgggcaagtcgaaacgttgtcgaagaattgttgttggaccataacttttttttcattattaatcaaatatgacatttctgatactgtcagaaagcacttgacgaaaactctattaacacgtaaaaaaaattttagttcatctacaaaaaaattcaatgacgaaacactcaaaaaaatgatggtctttatggttatttgggcatacattttttatagttataaaattttttgaatttttgctgaataacagtataccacagagccagcgaacagtacaagaccataatgcttaaatttggctaacaacaacaacaacaaaaaaagttgtccaaaaaaacgtacggcgacctttttgtgtggacagacattttttagcaacaaaaaattaggcatttgctaattgtaagaacatttttttagcaaattttaccaacaaatcaatcatggaactcaaattccaccaatttcagctggcaaaggtgaattcggcggttacttttgtccgtgccatggctcacattatgacgcttctggtcgcattcgtaaagggccggcaccgctcaatttgggtacgtctttttaatgcctaaaatatgcttaatcaacaaataaatggcagttttcctactatttaattgctaatatatttagtaataagattttgtgtgtagaaaaaaaggaaatgggacaaattctcgccgccgatttttttttaattttggcggcgagatcttgtctcggcgagattttggggtgcaccctcagtcgcggatggatttttattcgatacgatggctggaatttgtgtttgctgcaaaatagcaatttattctggaaacatgagcagagttttactacaaaggcacactttgcgcgaactacttatttttcgtcagatttttatgggcctcgattttcttgaattttattccctcctgggccagtcttttctcaaaatgctgtactatttaaattaatattttcatttttgttgtacatttcagaagtgcccaagtacgagtttttgtcggacaccctgatcaaagtgggctccgactgatggcacaataatcggatgagaatggatgtgtttttgattttggagtcgatcgattgactgactgaatgtctctatctttttttttgttcatttgatcggcatcaatttcattgtcattaatttaggagggttgcctggcttaaatcacacagtgtcgttttaataaa

SEQ ID NO: 45706 - DNA, 2162 bp, Heterodera glycines
tgtttagactgtcagcgatttgttccaaccccaaattttggctgccatccaacaatattacatccagcagcacacacagcagaacattcaacgtgaaaatgttagttcaatactccgtgccatctttttcaccatttttggcattttcaggcggctgccgtcggcgcccttttgcaagcggtgacaacgaaaagtgccggcgccgcctcctccagcggaaacgcgacgccaattccgttccttccgcccgcgtcatcaacaacgtccgcggccgctgccgcttccaccgcctttctgtccaatttgatggctgccgcggtggccaaacgcaacggaacgccaaaaggggtgagaaaaacaaatttgaaattcttattgtcgtcatctattcgcaataaacaggatgttgtttccgccgagttgccctcttctaaatcgctgctcggctcgcccccgccgcccctttcgctgacgcccattccgtcgcaccaacgcgcgacaccgaccaccgcttcgtcaatggtgcgcgtagtcgccggtggctccgcggtaacgcccagccccggggcgttgaggcgacggtcgccgctgctgcaccacacgacggcggcgagcagttcaatggtcagtccagtgttattcgttggcattaccatgccattttgtgttgtccgttcagacttcgcccaacactctttcctcctccgcctttgtgtcgcccgtccccggcggagtttgctcgcgtcttctgactccgtccggtcgaagtcgttcggccgcgaatgttttgcacggcgtctcggcctccgctttgactccgcgctcttcgcttggcgccgccgccgcgggcgccgtttttccgggtgagaaaaagcattttattaaaattaattgactttgctatttgcagacgatgctgacacaccgggcacaccacctgaagatgaggaggcacagagattggacgaacaggaggaggaggaaggacaacagacagtggaaggcgagggggacggagacgagctgagcgatcggttgatcgtcgtcgacggggacgaagagccgccgtgcgaaccggcggcgaagcgagacccgaaagcgcggaaggaccggtgagcaaagcggggggaacggagcggaaggggagaggagggcagggcaggtgatcggacctaaaactgacggaatggagtgatcggaaggggcatttcgaactgatcgaaaaaggcagacaaaaggcatcacaaacaaacttttttttaggtgtacgttttgccaaaaagtgttcaccaaccgttccaatctcatcgttcacttgcgctcgcacaccggcgaaaagccgtacaagtgaggaggggggggggggagaaggagattggcaaaagactgaattatttatcctctccacaggtgccaactttgtccctacgcttgcgcgcagagcagcaaattgacacggcacatgcgcacccacggacagcagggcaaggaggtgtacaactgcaacatttgccaaatgccattctctgtccattcgacattggaaaaacatgtgaggaaaagcatttgagagagagagcggagagagagaaaaaacattggggagaggggggaaatagtgtgtgagagagagagaaaaaaatcactaggagaggagcaaataccatttctaaattttagtgttttgacatgacaggaacattttcagatgcgcaaatgcgttgtgcagaatggcggcttccaatcacacgaaaaaaggggcggtgctctttcgccgcacgaagaaaaaggcgccgttagcaatggcatttccaattttcggagatgttcgttgtgccgtttttgcgcagttaccttcgagttttaagccgcttcacttaaacacacgccggatgcggccagttcagttgccgcccttttggagctgtccaaagggcctgtttcggtcggtggtgcggcaattggggaggaggaggacggcgcggaaggcgactgcgaccggacggcgccgctggcgaccgcttccgcgacggcgggcgcgccacttccggcaaatattgcgcaaagcaatcggctggtgctcaattggcttcaggtagtgataccatatgatcggaagcggcagtattatttccaaaattggcaggcatgaacgctcaaaa

SEQ ID NO: 45707 - DNA, 769 bp, Heterodera glycines
atggccaacaccaactacggtatccgaatcggtggagcattacggtccgttgtccgtccaaataaatgggggtgctgcagatgaacaccactgggtgcccgtggtccgacaaccgccatacaaggcggaaatgcgcgattttgtgccagacgaacccgagcagcaaatcaaggggcacggtaccgtaatttgccggactctcggctctgtcatactgtaaggctgggatttgagattttccaggcactggcccccttgaggatgtggcgcgacgacaaactaccggtgtcattatgccatcgcctgacggttcgcatcgtccacgtactgaatttgacggcgcccggaagccgcccgcgggcggttttgtcccacacgcgcccaatgttgtacgacgcgcacgaacgcgtgcgccacatgcggatgaggcagcaatgatccattacgaaacggacacggtcacgccaaggcggcggcgacacgctgccgcgtccgattccgcacgcgtgcggcacgcttctgccgcgccgagcaccgcgcgaggcgccgtaatgcagcgtcgtcatgatgtacattcggaagatgatgattatgatcatgatcactatcaacgactacaacaacaacagcatccgccggcggatgattgggacgcggcaccggaaatgccacgacgccatccacgacggcagcacacgtccaccattgtcacgctgggcccactgccgtgcgctgatgtgcggcgaaagattcgtgccattgaaggcga

SEQ ID NO: 45708 - DNA, 1561 bp, Heterodera glycines
aagcgctgtccgatcagtcggcgcccggccgtgtgctgttcagcggcaacttctttctgaacaacgccgttgcgggtgccattgaactgcccacactgatcttctgtgtctatttgatgaagtaaattcgttggtccaaaaattttaacaaaaaaaaaatacaaaaatttttttttgccaatttttcattttaaaaatattttattttaagaaataattaaaaattattgtatgcgttgccatagaccctcttttacggtagttttttgtttgatttaattaaattaaaaaaaaattatttgggtttttagcgccacattttcaaattcttaatattttttgtttttgggaattaccttacaatatattttttaattctttaatttgtccataaatctttgagaaaatttcataatatgagcgaacttgtttccaattctttaatgaggtctcaaatttaccccaaaaaaacaatttattgtcttttgtctccaaaaaggtacggacggaaacggtcccaaatcttcacgctggtcgccgccgccattttcattctgtgcgccatggcttcgatgagtgccaaccgttccatgctgtcgctggggctgatgttgctcggcaaaatcttcatccagggcggcttcaacatcctgtacatcttcacctccgagctgtacccgaccgtcatccggaacaggtacgcccggccggtgcccatggtcaaatcactggggcagggggggggggtgtaaaagaggtgggtgggggtcgccccggcgaaggggaaaaagagggaaatttctgaaaaatttggctattttcccaacaaaattacttcattaaaaattctcaaaattttcctcccggcggcgcctatcggcaccgccggcccccaaaaagtcctattcattttttctttaaaaaattggcctaaaatctcaacatttggtcattttttagacaaaatcaaaaatgtttttaaaatgtttgtcatggtaccaatttttgccacacttaataatgtttaattgccttttctaatcattttccctccgttcagtgccgtcggattttgctccatggtaagcgccgttttgcattttctacatcaaaatcatagcgccgatcacaaaaatttgaaaatacactcatccgagcctagaaaagcgtcatttggcatgaaacatcgaaattcattttggccaaaaatgccaatttttgagtgatttagtcaaaatgttcaaatccccattttcaaaaattcaacaccaactaaacttttggagaaaataatccgtccaaggaccggtatccagaaaaaatttgggaaataacggactaaaaaaaattcatttttttggttgtaattttttggcgaatgcccttaaattcacagattgcccggttcggctccggcgtctcttcgtacattgccattctgtccgacgtcacgctgtccatcgtgccgatgatcatttttgccaccttttcactgtttgccggcactttggtgatgttgttgccggagacgcgcgaccagccgctgcccgacacgctgcag

SEQ ID NO: 45709 - DNA, 1277 bp, Heterodera glycines
gtacaaagatttggagattaccacaaagaagaccctgcttcactgaaacttaccgacaaattttctctgttcccccaatttatgtttcatttgcgccgttcccaatttctgcaagtgtttaacaattctcctgatgaaactgtatactaccggtttgtgttttatttttattaatgtattttatatatctttttcagccatattttgatgggtgaaaatgtttttgaaagtacgacgatgatacagcctcagctgttctcctattctttcaatggacctcctgaacccgtccttttggactcgtcgagtattttgcctgaccgcattttgctaatggacgatttcttccatgtgttaatttaccatggacaggtcctttcttcttttgcaagtgattccaatgagtaaaataccttttttaagacaattgctgcttggcgaaaagccaattaccaaaatgacccccaatatgcttcgttcaagcagctgctcgacgcccccgtgcaggatgccacggccatcatccaagaccgttttccagtgcctcgatacattgtgacggaatatgaaggctcacaggttttcagaagcggatacagctgcatccatcttcatccaatcttccttttaggctcgctttttgctttccaaagtgaaccccgtcgttgacacacaacaacccgtattctcaggtgaatgaatgaataatattcagcccatttgaagaaattacaatttcaggagggcggtgcccccgtgttcacggacgacgtttccatgcaagtgttcatggaacacctgcgaaagttggcagtttccgcttcgtcatgagtgttgcattgtgcgtggcaaatttatgcgtaaaacaaccataattatgaccatggctgactgaatgtttcccttcgtgacacattgtttcgttgttttttccatcatttcgattgattccatgtgattttgttattgtaataattatattttaacgggatttgaatgatcgaaaatagtaatcaaaaactgagttatttgtttagtattttttatcctcaaatttcattaattaaacctctaattgtaagacgtttaaaatgcatggccaatcgaacaatgcaatagagagatttttaaggacagtggaagtaatgctggacgtccttaaattcatggattattaccagaactgcaaaatggaactgacatcgattggtttcagatcggtaatcgaccgctacagaaacgaattggcattgtgccaattcttccaaattcaactc

SEQ ID NO: 45710 - DNA, 290 bp, Heterodera glycines
gtcttcaattctacgaccaggcattcgaaccgcatcccgaagtccaggaggcattgcgccggcgccggcttcgtcttaaggacccctaccaggtcggaatggggaagaacagccaaataaaatttcccgaacaattatatatcataattcattgaaaatattcggtctgtccctaatttcagtacgatcttcgtctgcagcgtattcttttggccagtcaattgggctcaaagaatgagcgactgccgaagaacatgtggacaaaatgggacgacgagacatttacctga

SEQ ID NO: 45711 - DNA, 4231 bp, Heterodera glycines
atggccttggcccattacggctttttggcacccaaacgacgcattgaaccggccggcatttcttatgaattctcgttgatcaaagatcggctgatcctcggcctttccacacttcccgtccttcaaattgtctttcaaaacagcaggacgacggatggcgacgacattgacggagccgctgttagtggaacaaaaaatggcatatattggccgctttattttcttgatcaaattttttgtttggatttcaatgcgttaaaatcataatcaacgcggggaaggctcaacaaattggttaaaattaagggtactttccagttctggggccccaattcattcgaatatttgtcttacattcaaccatatcttctaggacagtgtcgattggcttgaccgagatgactccaagttccgcaaatacatttcccggttggaccccaacgagtggaaaaagcaagaccagtaagttatgcactgttcgctttagcaattaaaattcaaatgcttttcagctacaaagtgctcggcttgtcaaagttgcgctaccaagcgacggcggcacaacttaaaacggcgtgtgagtgcaataaatttgtaaaaatagaattcgacttggacccggaccaaggcctggattttctctgtccatgtcaaggcttttttcaaataatcgaaccttaataaaaaaaaatctagaaaagtaaaaaaatgttttagacagacgcaaagtgttgaaatatcatccggacaaaggcaaagcgacggagactgaggacaagttgcttcgcaatgaagcagtttttgcgtgcattcaaaaagtagggaattggaaaacattttaaaaaagtttagccatttaattttttaaaccatagtatgacaaaatgttgcccgattcgtacaaaaatgtgatttttcagaaaaaattaattagtccaaatggttgtcagattactcggctccaatatcatagccttttatttcgttcaaaaagggcccgccatttgcggtactcccccaattttgattgtcttcaatttttaggcctacgaacaattgggcctttctgaggagcgtcgccgtgccttcgactcggtggacccccaatttgacgactcaatgccggacagtgtggacactgccaatttctttgaactgcttggacccgtttttgaacggaatgccaggcaaaacattgctttttattcaatttaatactcaattccggtgggttttcccttaaaatccccgatttgcttaggttttccgtcaatcagcccgtccctttgctgggcgatgaacacaggtaaattttcattctgtcccaaaataccaaaacaaaacatttggcatttatttgtttgcgctgccccttttctagcgatcgcctccacgtggaacatttctacgaattttggttcgattggcgttcctggcgagaattttcctatttggattcagaggacaaagccaagggggaggaccgatgggagaggcgggaaattgacaaattaaacaaagtgcgaatgtggtggggtgggggcggaccaggaaaaaacgtcgccgccgaacttaatacgaaaaatattctagaaaaattcaaaaaaaaatgttatcaagaaaattcaaggaaattttaaaaattttaaagtttttggtttttttccgaaaattcagcaaatttagtttttattaacacttagattttcaaaaaactaattgtaaaatacttttaagtttttttgaaattttgaaaattttttaatttattttaaatgaaagagcattttagggccaaaaatagaggattttccctggtcttccgagtctgtacgagagggaattagcaataaaacatttcttgtattaataatcgcttcattgttcaggccgaacgggaaaagcgacggaagcgcgacctgagacgcatttcggcactcgtcgaattggcctactccaaggacccgcgcgtggcccgttttaaagtcggattctgacgcgtctataaatattgcatttacaaattaacaatttctttttaaatcattttcaaaatgtcttttttatattctttaggaggaggacaaacggtcaaaaaatgcgcaaaaagagcggcggcggatggagcgcgaggcgcgcgagcgggcggaggcggacgaacggcgtcgcgcggaggccgaggcggcgcgggagagcgaagcgcgggcggaggagcagcggagggaggcgcaggtcgagattcaaaataacagagaaaatgccgcggcatttgtggactgattactgacaatttgcaatcatttccattcagattcaaaatttttgcgattttttcaaaaaacccattcaaataaaagtattgggtgtgatcaatgctttagttttccaacatcttttttgattaccgtacgagaacttgaggttactgtatgctattcaaaaaaatctttttttgttttaatttatgtaaattttcattttaagaaatatttgtccccgttttcaggtcaaacagcaacggaagaaggcaatggcagcacaacggcgccaacttcggacgatggcgtccaatgcaaattattggatggaaaacggcacggcattggacaaccgacggatggcatcaattgctgagcaaattgaaaggtggagaaagtttccaaaaatatcacccaattatgtcaaaatagcatgccaaaggttgtgactgatttccgattttttaaatattgttcgtgtgaaaaagccggcatttccatcgtctaactgaattcaggagtttcttgtgcccctcttttcccaccccttggctcattcccaaataattttttagaatttgtctgtccgctgaattcgacgaattgacggcactctgtgaggggttggccatcgtccaaacatttgacgaggcacagaaactgctggtggaatgtgtatgttgtgtttctcaattctttttcaatgaattttattaaatttaatttttaaattttaggcaattaaaaaagatttcgccgatggaaaggccggcggcgaagggccgtcgacaaatgcgcagaacaaagcgccggttgcatcgaaaatttggtcaatgaacgaattgcaacttttgatcaaagccgtaaatttgtttccgccgggaaccaacgaacgatggaaggtgaacggaacggacgaaactgaattggaaggggggaagataaatgggtagtaaatgattaccagacccggaaaatttggtccaccgattaattggtcggatttacactcccaaccccctgaatcataaaagccctagaaaatttcataggaattttatctatttttcttgagatttcaatgtaaaaattcaaaaaaaaatttcgggggaatgaaacgggagaaaatgacggatgggcgcacgaacagcttccaaatgaaatgcaattagaaaggaatttcggaactgttaattttaccaaaaaacggacaaaacattttttaaagcaagtggccgagtacgtcagcagccatggtgaccaacagcgcactgaacgggaagtgatcagtcaggtaacagtttaattgcactattttagttaattgattacccattttcatcgacaaacttttcaggttaaactgctcaaatcaaatccatcctcaaatttggcgccgccgccgaccgtagtgactaaaaatgccgaaacgaatgcctcggcgacattgacggcaccgtccgctgcatcggatgaccaggaatggagtgccgaacagcaaaagtgcgtcgagtttatttttggaaattctcggaaaggcttgaccacgataatttacaataaataataaacaaatagtgacatggagggaaattttcaaaaaatatttcgcaaattgattttgaatttattattttttaattttatagaaggggaaccctctagatcaacatagcctgatttttggtggggcgtacaccgttccaatttttccgtgcgctctttcgttcatacatattgggtcccaattttggcattttgtccgttcattaaatttttttaggcaattagagcgcgcattgaaggcgacaatttctgtcgatgcgaaagagcgctgggacaaaattgctacgatggtcgacgggaaggacaaaaaggagtgcatccgacggtacaaaatggtggcccaactggtgaagaaggcaaagatggacggtggtggtggccaacaacagcagcagcagcagaaataa

SEQ ID NO: 45712 - DNA, 3874 bp, Heterodera glycines
atggacggccacccggtggatggccgtgtttccgcctatcaccatgtgagctccaacatagggaccccatcaggacctaaagacactatcacaacaaagctcacttcaattttcaagaagacaaccgctcatgaagacgagtacccgcccaagactgagcctttcctgggaccggtggcacaaacggatcgccaacgggagttggaagccgttccggtggtggacaggattgaacggatacccaaagggttggtgaagtgcgaaaatagtcataataaaaaaagaaaaccttttttggtttatccatgttggggtggggtggtctcgacaactaacacgggaaaaagccggccaacttttatgttaaaaatgcaaatgttctggcataatagacttcgactaatggggaatgttagagccatagaattttgaaaaattttttgatcacggatttccagcttctacgaggaaggcgaactgcatccagtggtggtccatgaggagaaggaattgactccgtctgaggcggagaaaaggccaggaacattggagcgaattacgcacttgttcaagcggacagccacagagggagagtggccaatggtcaccgagccgttcactggaccgcatgctgagacatcccgaaagggggagcttgaagcacgcccgcttggcgaactcgtggctgcctatgcttccggccgttctgacgaagtcggtccaatgcaaacgattgagacgcaggctgcgacgacaactgcgcgtgaacattacccggcaacagtttcctatgaaggaccgctgagcgcaacaacacggaaatgggagctggaaggcgctccgctgaactcacatgtgactgtgtaccatcatggccgctctgatttggcagcagctgagcaacaacaaccagtcgctgagaaagtcacaacgaagataagctcattgttcaagaggaagccacaccatgaggacttcccagtctcggagcccttcactggccaattggaagagacggcaagggtttcggagctgttccacgaaccaatcgacgcaagggtcagcgtctactcggccggaagatctgatgagcatgtcgttgtccagccaacaacaattgctgaggcggagcccgtaccgctcgttgagtacccgcgcacgacagcatatgatggtccactgcaaagcacatcgaaaggagcagaaatggaggggcagccgttggatgcacatgtttccgcctatcaccatgggcgctccgacatggcacccccagcagcaccgaaggagacaatcacaacaaagctcacttcaattttcaagaagacaaccgctcatgaagacgagtacccgcccaagactgagcctttcctgggaccggtggcacaaacggatcgccaacgggagttggaagccgttccggtggtggacaggattgaacggatacccaaagggttggtgaagtgcgaaaatagtcataataaaaaaagaaaaccttttttggtttatccatgttggggtggggtggtctcgacaactaacacgggaaaaagccggccagcttttatgttaaaaatgcaaatgttctggcataatagacttcgactaatggggaatgttagagccatagaattttgaaaaattttttgatcacgacaatcgatttccagcttctacgaggaaggcgaactgcatccagtggtggtccatgaggagaaggaattgactccgtctgaggcggagaaaaggccaggaacattggagcgaattacgcacttgttcaagcggacagccacagagggagagtggccaatggtcaccgagccgttcactggaccgcatgctgagacatcccgaaagggggagcttgaagcacgcccgcttggcgaactcgtggctgcctatgcttccggccgttctgacgaagtcggtccaatgcaaacgattgagacgcaggctgcgacgacaactgcgcgtgaacattacccggcaacagtttcctatgaaggaccgctgagcgcaacaacacggaaatgggagctggaaggcgctccgctgaactcacatgtgactgtgtaccatcatggccgctctgatttggcagcacctgagcaacaacaaccagtcgctgagaaagtcacaacgaagataagctcattgttcaagaggaagccacaccatgaggacttcccagtctcggagcccttcactggccaattggatgagacggcaagggtttcggagctgttccacgaaccaatcgacgcaagggtcagcgtctactcggccggaagatctgatgagcatgtcgttgtccagccaacaacaattgctgaggcggagcccgtaccgctcgttgagtacccacgcacgacagcatatgatggtccactgcaaagcacatcgaaaggagcagaaatggaggggcagccgttggatgcacatgtttccgcctatcaccatgggcgctccgacatggcacccccagcagcaccgaaggagacaatcacaacaaagctcacttcaattttcaagaagacaaccgctcatgaagacgagtacccgcccaagactgagcctttcctgggaccggtggcacaaacggatcgccaacgggagttggaagccgttccggtggtggacaggattgaacggatacccaaagggttggtgaagtgcgaaaatagtcataataaaaaaagaaaacctttttttggtttatccatgttggggtggtctcgacaactaacacgggaaaaagccggccagcttttatgttaaaaatgcaaatgttctggcaaaatagacttcgactaatggggaatgttagagccatagaattttgaaaaattttttgatcacgacaatcaatttccagcttctacgaggaaggcgaactgcatccagtggtggtccatgaggagaaggaattgactccgtctgaggcggagaaaaggccaggaacattggagcgaattacgcacttgttcaagcggacagccacagagggagagtggccaatggtcaccgagccgttcactggaccgcatgctgagacatcccgaaagggggagcttgaagcacgcccgcttggcgaactcgtggctgcctatgcttccggccgttctgacgaagtcggtccaatgcaaacgattgagacgcaggctgcgacaacaactgcgcgtgaacattacccggcaacagtttcctatgaaggaccgctgagcgcaacaacacggaaatgggagctggaaggcgctccgctgaactcacatgtgactgtgtaccatcatggccgctctgatttggcagcacctgagcaacaacaaccagtcgctgagaaagtcacaacgaagataagctcattgttcaagaggaagccacaccatgaggacttcccagtctcggagcccttcactggccaattggatgagacggcaagggttacggagctgttccacgaaccaatcgacgcaagtgtcagcgtctactcggccggaagatctgatgagcatgtcgttgtccagccaacaacaattgctgaggcggagcccgtaccgctcgttgagtacccgcgcacgacagcatatgatggtccactgcaaagcacatcgaaaggagcagaaatggaggggcagccgttggatgcacatgtttccgcctatcaccatgggcgctccgacatggcacccccagcagcaccgaaggagacaatcacaacaaagctcacttcaattttcaagaagacaaccgctcatgaagacgagtacccgcccaagactcagcctttcctgggaccggtggcacaaacgaatcgccaacgggagttggaaaccgttccggtggtggacaggattgaacggatacccaaagg

SEQ ID NO: 45713 - DNA, 1627 bp, Heterodera glycines
ttggtcgtcgtcggtgacggcggtgttggcaaatcggtggatggaattttttggcattttttactggaaaacattgacccccacttttaggcgctgaccatccaattaatccagggccaattcattgaggagtacgacccgaccattgaagactcgtatcgaaaacaggtttattttttcgctccgcgaaattagctaactcgaaaaaagaattttgacaattccttagtaaatggtttttttttctttgaaaattcactgattttatggacccattctaagcctttttaggcaatggtaaagaattgtgggcccggatttatttttaaaaaaaatttattttttattttgctcgaaaccaattttaagaggttttcgagggtgctgattacgaatctcaactcgttttttggggggtaaatgcttctaattcatttaacaattatttttttgatgtaaaacaatgcttcaactgttaattggataaaaatgcgcaattttcgccaaaatttgaccggttataacttatattttggaaaaaaaattttcaactttttgttcgaattcgggtccggggttcggaattgggcaaatccgagttcagattcataatcagcaccctcgaaaacccccggaaactgaattttagtccaaaataaaaaagttaaaatagggggcactatatggaaagtgacagtttttgaaaagtttttcaaaaggggggaccctttttgtgatagtcataaaaatttattctctggggtttttggggtccccgatcacgaatccttcaattattttgatcaattccgatttcctaatctaaatttgaacaaaaaatcataattttaaaaattcaaaatttcaatttttatttgagttcgggttagggattagaaattagtcaaaatacatgtcagattcgtgattagcaacctttaaaaccccggataaaaaattatcatggttttttatcttaaaaaaattttgcaaaacaaaagggtccccccttttgtttcaaaaactgtcaatttgaacaaaaaattgtcgtaaacattcgaattttcgagtcctcttttttccaaagattgttatatgacttcaaccaaatagcgcccacccgtaaaactataattttatctaaagagtttgaattttcgacaattttttagtgacgtaaatccttactctttgtcgccgcaataaaaaaaatatttaaaaaattttgcattaaaatttcagaaatttctttaggtacttattgacggtgagacttgtttgctggacattttggacaccgcaggacaggtatactgaactcttccgtctaacttagcaaaaaaaaaaaaaaattttttttttggcgaccatcaaaataccgaggctttcttggttttttttttgagatgcattgacaatctgcaaaaagccacttccaatccccctgtcctccataggtggacaagggggggggtcaatttcgtaaatcgtacgattggttagccaaaatgcgtaaagacgcgaccaaaaaaaaaattttttttttcagttttggctttttttaaatttatttccatccttttgcaggaagagtattcagcgatgcgggatcagtacatgcgcacgg

SEQ ID NO: 45714 - DNA, 1177 bp, Heterodera glycines
  unsure (1)..(1177): unsure at all n locations
atgagcgatatttggctgagtgagcagctcgaccttcgcatggtgctcttccgctgcttgccaaccggcagcaaaaagggattggttggtcacggcaatttgcctaattattgcaactattttgatatactggtttccattttagctgtttataattaaattaaaattagtctttttgaatgtttttctaatatttttaatttttcttctggcgctttaaaataatttttaaactttgtctcgtcaatttaaatgactatcataacatttttaacagattgagcttgtgcccagctgtaaaacattgcgcgagattcaaattgtcagctcgggtgccgctggcgtgttcaaagacgaagtgctcaacgaatggttggcccggcagaatccgtccgaattccaatataaggcggtcagtaattaagcaattttttcaggttttcaaattgattttcaaggctttggaaaatttccggcgttcgtgtgccggttggtgtgtggccacttatgtcctgggcattggcgaccggcacaacgacaacattttggtcactaccaatggccacgtgttccacatcgactttggcaaatacatgggcgactggcaaatggctgccggcttcaaacggtgtgcaatcattgtgattaaaatccattctctcaaatttaagaattcgaaaatggaactaatctattctattggattataaaatgaattgaaatttcaacgaaattttctttaaatcttgctggggaacagaatttggtagcctaatagaagacctaattttggttagatttctcttggtttatgtggtaattgttgtcaaaaatgtgaaaaattttataggccctaaaaatgcctaatttcttcgccattcccttaaagtgctcttttaaacgctgtttcacccttcagctaattaattaccaccccctccctaaattcgcttgcagagaccgtgtcccatttgtgttcactcccgaaatggcctatgtgatcaatgggggccaaagctcgancgaacacttccagcgatttgtggatgagtngtgccatgcgctgaatctcttgcgaaaaagtgcgccgaccgtactgaacataatgcgctttctgagctgctcggacatccggggaatgtccatggaatcagtagtaagctgaattataataata

SEQ ID NO: 45715 - DNA, 1010 bp, Heterodera glycines
atgcttttcacccaaatgatcatggattcgctgcagagcaaattccctcggctgaatttcctcgcccacacattggcccaatttcggggaaatcccctcgggggccgaagcgaggacatgaacaggctcagcttcatctccgaactttacaagtgagccaggaaagtgatatcaatcagcagcataaggcacagcaagattcaaggacacaaaattgattaataacttaaaaggacattgaaacaatgcccaatcgggattcgggatttgagatggggttgccaattgaaatccaatgccaatgacgatcattagagctttgaccaaattgcatttgaagtgcacgactttgtcctaaataattcactccctctccaattactttaaatttaattgctaaattttaaatttttagcgaaaagaatgaaggtcgtcttgagtcggtgcatgtcaattcgtacgaaaaatggaaaaacccggagaaaatttatgtaagttttgttcatccgccatattccttaagcttaagcaatgacataagataaacggataataatggctcattttgcccccgccctttctcagatgtacaaattgttggtgaaacggcagcaggaaaatgtgaccacggtgatattccggtaataattaaaaccggaggaatgcagtaaaacaacccgtaatcagtgacttggaaatcaaaaatttaaaatcccgaaaattcttttccttacacaatgcccatgtgcgcaggtcctttgccgagttccaagagttgcactggaagctgtgctaccgcttctccagccgtgccattccccaactgtgccaaacggtgaccttcggccgcacaaacattcgcacggtcgccgtgcggcgtcaggtggacctgcagtacttcttgcagcgcttgttcgccctgtccgacgaggtggcacactcagagttggtctacacgttcatgcactccatctaccgcgacacggagcccgaggcacacaaacagagcg

SEQ ID NO: 45716 - DNA, 2849 bp, Heterodera glycines
caaaacccgggaccgggaaccgggacctcggatgaccgggaattcccggcccggtcccgtggcactctagttttatcttataacttttcaaaacaatttttcgtgcttttcaagtaaatgtaaaaaaaaaatcataaaaacccgaatgattgatcgattcgaatccggttttttgggttcgacgtgaaaaaagctcagcaatacgacagttctaaaaaacaatgggtttctgggccacagaccggtttaaaactggaaaaacaagttttggccgtttcgacccaaaccggttcaagaatttttttctccacactcctgaaagttggccaaaattttttgatgctattttgtagaaaacagataaatttattaaaatgatacaaaaaaaaaatttttctcagctaaactttaagttttttttggtttaaacaaaaaaacgacaataattatgcgccaacccaataacatgcagaaaaaaatttaaacgtcacgaagcaaatgctgtctttctattataaagagatagtacgctaaagtcagaaaaaattataaagaaaaagaaaacgggagatagtactaggcaataaaaaatgggatgtaaaaaagggagggatgcgagacaaatttccctctgtatctcccttccctttcttttactctcgtttcttttcctttgccatttactctccctttttcccactcactccaaaaacccgaattctagaaaggataacgacttcgcttgaattcttctgaaaatcaattgtttgttttgtcgtttgtcgtcttcaatatattcgtcaacaatttttcatcccttgcctttgcatttgctcgcggcgtcccttttttgccgaattttcgacgctttcaatttataaaaattaacagaatggcatccattgaagagattattgagacgaccaaatggaaggacggacagaagttggtttttagaatttcatattgttaccaattgggcatttgcattcatgccaatttctgctcatgactttctcttcttccagaattccttatcttgcacttgctaaaacattggagcgcattgaggcgacctcctctcggttggaaaatgtctgttgtgtttaagtcaagcttttatcgatagaaattgccctgaataatttattcttgaatctttcgtccgggcgcaccctttttactttcttctcatcttcagattcgcattctcagtggttttttcggcgctgctattcgcctttctccgtccgatttgagtcccgcagttcatttatgtctcaacaaactcgggccgagctatgagggacttgagctgggtatcgccgaggcgtaccttatcaaagcgttggccggggccaccgggcgaacggttagtggtcaaatgcatagactttggcgatttatcgctattaaaaaaaattagttcaaattccttagattttcaatattgttatcaatttgaatgagttttaggtagacatgatcaaaaaggacctcaaagtgaagggtgaccttggcattgtggcccaacaaagtcggtccacgcagcgaatgttggccaaaccgccgccactgactgtgccgcttgtcttcaatcggttgcgtgaaattgccaaaatggctggcatttcggtcggtaatttgaagagtagttcaggttaataagcaaattcaaaactttcttaagtttccggattccctgattacaaatatgaaattttgactaaatatgaatctgaaatccaacaaatagtcgaaattttaaaatttcgatttcaagaaaatgtgccagtattaccatccccatttttatgatcctttaaattaaaaagtcaatggaccgaatccttcgttttgcgcttacttagtctatggacaagaaagtgaaggcaatccaagctttgctcgtcccgtgcatcgaatgcgaggcgcgcttcctcgtccgctgtttgcaagccaaactgcgcatcggattggccgaacagtctttgatcgtcgcgttggccaatgcatttactaagacagaacttagagaaaaaagtgatttattgagtcaaatgaaatgcacaaagttcaatttccagagaaaaaattaagcgacgaaaaactcaaagatcggatggctgaagatgcgcaaacattgaaaacagtttacaggtgggagagttgaatatatttttttcgggatttgtcatgggtacgtccgtttcgttaatctcagcgagttgaggcactgttttcctaaagatttaagcatagctcatgttttctgaattttctatagtctcagttttcgtaaaatattacattttttatatccctgttttcgaatcgttctcttttttcagtgagtgtcccaacttcgaccgtatcattgaggtggctctccgttccggcatttcttcattggcggatgaatgccgtctgacccctggcattccgctgaagccaatgttggcgcacccgaccaaaggcattcaagagttgttggaccgttttggcactgctgaatttgcatgcgaatggaaatatgacggcgaacggtgtcaggtgaaccctttgaaatgctggggaatagtgaaatttatatcactattgcatttaaaaagttgcagattcatcttttgtcggatggcacctttaaaatattcagtagaaaccaggaggaccacaccggcaaattcccggatgttgcgcgacgctttccggacgcactgaaaaggggtgaagtgactgatttcattgccgacggagaggtggaagcaaatgaaactgaaaatgctttattttgttttccgttcgtttaggtagtcgcttgggatccaaaacagaagcaaattctgccg

SEQ ID NO: 45717 - DNA, 1045 bp, Heterodera glycines
  unsure (1)..(1045): unsure at all n locations
atgcggccacccgttgacgaggattatcgcccgatccgcgtacttggccaaggcgcgtacggcgaagtttggttggtgaccagcaaagaaaatgagagagagcaggtggggaagggcgggggagaagtcgttctgctgattgttcaactgaacgtgtttaagttcgccatgaaaaaaattcccgttaaagcgacggaggagggaattccgcagagtgtcgtcagagaggtaaaaaggcagtgaatccgtttttgcttctttcggatggcatttccactaaaccgctttggcatggcaaaatcaccgaaacaaattcaggtcgcttctctcgtcgcactcaaacagatgaaacacccaaatattctcaggcaaatttctgtttttgcagtttaattattcacacatccaaattattaaaagtaaaagattaaaagtctgtgttcttttctaaggctccacgacgcattcattcgccgaaagggcggcaccatcagtttgaacatcgtctgcgaaaagtgcgactgggacttgtgcgactttttgcgaaaaattccgaaaaatatgtgcgacgcgcagtgcaaatattttgcacgtcaaataatgacgggcattgtgaggaattgatttgtttttgacaattaagaaagcaattacttaattgccttttccgacattttcatttatgtcagtttttgtttaggatttccttcatgccaacagtattattcaccgtgaccttaagggtttcatggcgtcctttttgacacttttttcccccaatttttagcctcanaacattntggtgaacaagacacactttgcgggtgagtaaatttatttatttttttattctgctcaaatttcgaaaagctttgtaaatgattaattcgcttacctctctgttttcagatcgccgatttcggactgtctcggaactacggtctgcatgccaccttcaccaccgaggtggtcaccctgtggtaccgtagccctgagctgctgctccagtgcaagtacggtactgcggtcgatctttggtccgccg

SEQ ID NO: 45718 - DNA, 1157 bp, Heterodera glycines
cagtaattattattaatgattcatcaaatgaatggcattcagcatgagaagagagtgaagaaactgctgcaaaaggcgcgcgagtcgagtccgactttgcccacctttgaaaggtgtgctgttccgtcccctcttcactttactgtccgctttagtgttgtccgaagcggctctttccacgtcgatgagtacggttttcgccattctttcgcagaaattccgttggccgtccatttcatcgccactcagctgaaccagcactatcagtccaagtcgaccggtcatgctcagctgaaggccaattggcgtgtgctgctccgggaacaaccagaacgccttgagcgatcggtcggtctttcgaatgccattcgaccattcgtcgcccccccccgcccatttcagcgtgaaattcgcctcctctgccgccgtggcattccgcgcgctcttcgaccccgcgtttggcgtcttctgatcaatcagcaagtggccgatctgaaggaaaagcacggccaatattattacaaaaatttgtgcagttcgcagggaacggcggcggaaaaacacgtgagcaaagcttagaattcaaaacaaaaagagaaaaagattgacttctccgcttcagtacagcagcgcccatcaaaagcaagtgaatttggacttgctgaggacgatgccgagcaacgttcactttatgtccgcctcttgcaaaggcgtcactcaccttcagtccgtcctccgtgccttttgtctgcacaatccgagcatcggttattgtcagggaatgaactttttggtggccactgcccttcttttcatgggccccgaagacgcattttggtacatttggccaaggattttctcaaaagctttgcctttcttaggtttcttgtggcggtcactgaaagatacttcgactcgtcctattttgaccagacactcaccggggcacaagctgatcaagtgattggaaggagaagggcaacggaacaaagcttttgtcccccaggaagtgctgaaggaaattgtggagcagaagttcccccgtctcgcgcagcatttggacgagtgcgaaatcgatttgaccacggtttttcaaaatggcgtttctttggcatttttgctccctaaggtgactctgaattggttcatcgctctgt

SEQ ID NO: 45719 - DNA, 1478 bp, Heterodera glycines
atggaagaactcgtggcgctctcccctggaatccgcgtcggccgctggacgatcacaaagaagctgggcgccggagcattcggagccgtctacctgtgcgtgaacgaccaaggagagcaggccgcgctgaagacggagccggtcaacacgccacatccgctgctcgtcatggaggtaggcgggggaggaggggcggaaaattggcaattcaatttaaatttttttttcaccacccaggctcacgtgatgaccaagctggacgcccttcgagacggagacgggaagcacttctgccgctgcttggacctcgggcgcgatgagcaaagggaccaacaatcgggacaaatgaagaagttcaactacatcgtcatgtcactcgtcggtcgtggcctggacggagtcgtcaaggatgccggtggccgcctcagccttggaagcgcagtcggcgtctcgatccagatgctcgccgctctcagaggactccacaccgtcggctacctccaccgcgacatcaagccgggcaactcgaccatcggacgtccggaatcaaacgaaatccgcctgctctacctgatcgacttcggaatggcgcgcaaatacaccagggacgacgtgagtttgagtgaagcgctttgaaaaaacaaaaataatttgttccctttcccccctttttcaggggagccaacaccgcccgcgcgctgtcaccaacttccgcggaagcccccgttacgctgcgatcagcgctcatctcggacgcgaatacagccgcaaggacgacatcgaatcgtggttctactgcatgatcgagctcttaaaaggcgcacttccatgggccaacgtgggggaaatgaaagcggtgagcgaatggggggggagggataatcagaattctgatttcattgtttcttttttacagataggcgaggcaaagatcaaacgccagaagaaacaaccggaagccgttcgacgccaggcaatcgccgacttgctctccggatgcccgaacgagttcggccaggtcctcaaatacatcgtgagttcgttcgttcgttttttccaaaattaataaactaacaaattaaattttgcaggacgacatgaagtacaccgacaagcccgactacgactggatcatcgcgacattgcgcagcagcctcagcaacgccggcgtccaggaattcccctacgactgggagacgggcaagcgcaacgcggcaccgggcgctggaggcggcggaggaggagggggaggagacagctacttcaactgatgagccgtgcagcagcagcagcagcagaagaatcgccaagaagcgtcaccgtgctgaattgatcatatgaccactattactgtattgtatgtattattttgtgtccatgctgccatccccgatatacacatgtattgtattgttgacatatgtattgattgaaattgttgttgcataactgtgtttgtacatatgacttttggcgaa

SEQ ID NO: 45720 - DNA, 1672 bp, Heterodera glycines
agctgagggtaaacttaccagttactcgattcttttagtgcgggttaaaagttacccgcagctgatttgtgagggtaactttacccttacctcgttcttttggtacgggccctcaaattgttctccaatttctcatcaaaattggctccattcgccgtatttgcataatccataacgttggccattggactcccataatttggcacttcgtttggttttttccatttggtccgatcagtctgatcatcgtctaatctgccctcctcctcctccttctcctcctctttcatgccttccccgactttcgtttcagtttctgtgtgttggcaaactccgctgaaggccttctccgggaaaagtgcgaattgtgcgacccatcggtggcccaattggcccatccggcggcactgctcactgatctgaacaatgccaacaatttgacttgttgggtcagcgaaccgaccaccgcatttccccacaatgtttcgttgactttgtcattgggcaaaaaatttgaagtgattaattttcctaagtttcgttgtgtaattaatgatgtcattaagatcacttatgtatcgctgcatttttgcggccgtttggccgattcattggccattttcaaatcggcaaataggggtcgaacttggacaccgatgcaattttattcgaccgaatgtgaaaaagtgtatcaaaggacgaaggaagtgccaataagcaaagagaatgagcaggtgggagggatgagacagatcagacaaaatcaaagtgatcagaccaaatgagagtgatcaaaacttaaagtgatcagacaaaaggaaagtgatcaaattgaccgtatcagctgaaacacccaattagacagacagctcttacaaattgaggtcgcccgttgcaccgattcgcacattttgtcgcctctttccgatcgcatcgctttcgcaaccctcgaagggcgtccatctgcgatggaattcgaacagtcgcccgtccttcaggcacggcatttttccattttgttggaatttcttttttttaggattgggttacggccactgacattcgcgtggtgttcaacagactgagcatggatcaggcaattctcaatgtaaagtggcggacactgaaattgatcaaagtttgtaggccgaattatatggattggctgaatccgacaaaatggccgagcgaatccgaagggacaacggatcggtgttggaactgccggagcctgacagagtccgggaaaggtatttttatgcaatggccgagttggcagtgggcggacggtgcaaatgcaatggacacgccagcagatgtgtgatcgaccgaatgggacggtgagcgggggcgggggactgatcagaaaggaggaatttgggaaaaataaataacggaagggggggggagggtgaaaagaacccattgaattgcatcattagcaagaaaaataatttttttttttaaataaaaaaaaaacattcttttcgtgttacactttttgttcgacattctttctttctcttcttctgatcagtgccttttatccatcccatccgttcagatattcctgtgactgtaaacacgcaaccaccggattggactgcgagaaatgccgtccctttcacttcgatcgcccttgggcacgtgccactgccgatgatgcgaatgc

SEQ ID NO: 45721 - DNA, 1293 bp, Heterodera glycines
cacttcatgtgaaatactctatgagcgcatgaaaaagttgggttccgatgtgcccgagttgatcattctcccggtttacggcgcattgccaagtgaaatgcagaccagaattttcgagcctgctccccccggcacgagaaaggtatgtgccgtagtttgtcgatattacaaattttgatggtttttatttttgggttgtcattgcgacaaatattgcggaaacgtcacttaccatcgacggcatttactatgtggtcgacccgggttttgttaagcaaaagatttacaacccaaaatcgggcatggactcgctggtggtgacgcccatttcccaagctcaagcagcacaacgcgccggacgagctgggcgaaccgggcccggcaaatgttacagactgtacacggaacgagcatacaggcaagaagcaataatttaacaaaattcggaattaaaatattttaatggaaaattttgcacattcagagacgaaatgttgcccacgccggttccagagatacagcgaactaatttggccagtactttgcttcaactgaaggccatgggcattaacaatcttttggagttcgatttcatggatgcgccgccggccgaggcaatgataacggcgctttaccagctctaccaattgtcagcgcttgacgaggacggcttgcttaccaggcttggccgacgggtgggaaaaagttacagcaaatcgaccactaactcaccaattcacagatggccgaattccctttggaaccctcgttggctaaaatgctgattatgtctgttgaacttggctgcgctgacgacattttgacaattgtttccatgctttctgtgcaaaatgttttctatcggcccaaagaaaagcaagaattagcggatgagaagaaatcgaagttccaccaacctgaaggtgggagacagtggaacgtttaaaaaaatttttcatctttttacaatttcaaaaaattaaattccatgttttcagaaaaaatttatttttttatattttttagtggaaaaccccttaaaagatcagaaactagaaaactgagtttaaaaaaaaatcggaaaggtatgcagggcgggggggggggcccgtagtgtactcgaagatgtgatggattatttgggtcgtcgccctttatatttcaaaaacattgaaataattcgaattccgcttgactttttttattaggagatcattgcacgctgttggcagtttataatgcatggaaacaccatcactattcgccacaactggtgtcaagagcactttgttc

SEQ ID NO: 45722 - DNA, 1849 bp, Heterodera glycines
atggtcagaacatctcggaaaatacccacagagtaaattatgaggatataccttttgaatataataaaatcaagcattttctaatttggtaaattcttaattttattactttagttggataaaataccaaccacttggtgcaagcattgagggatcgaggatttttgcatttaaaacaccacttttgcccgagttgcaaacatcaatcccaaaggagtgtcgtttttcaactttaactttattacaacaggttttatcacaaattttgacaattaattgattaatttcagttggctttctctaatcgttcattgggacttgtgattaactgcaataatactaaaagatatttttgtcgaagagacatcgaagggcttgggatttgctacaaagaaataccatgtccaggccgcggctttctgtatcgtactgatgccgtaaaaactttcataaaaacaatagacgactttttggaacttaacagtgacaatggttggttctatacaaatttctgacaatccatgtattcagcttctccatttcctttagatttgctaattgcggtttgttgtagcaatggaattaaccgttctggctatttgatttgtaactatctcatcaatcgacttggctggagttctcatgatgcattgaatggttggaaatttttgatcattttataatagtgctactattaataacaatctttttgcttttttcttctggtcgaatcccctacaatcttattgttagtcaaaaaacataaaagtaaatggattgagtcacactgaaatttagtctgtaaaagagctctttggactcgacattgtttattactaaaatctaacttaagtcgtcacccctttgttggatgatttattttttctaataaattaaataatatttttgcttttttcagcatttgaaagtgccagaggttattccatcgagagaggttcatatgttcaagcattacacaaagtcgacagagaacgtcgttctaaaacgtattggttttcagctaacaattcaattgagtatggattatttgtttgttttttttgaggatgccgttcggtttggacagaagtgagcatgaaatgggaaatgacgaagcacttcccgcgaagactgaccaattattgcctggcattagcgacttcaacccacaattgacagcgcaaatgatgcaacaattcttcaacatggaacaagtgaatttttgaaaacaaaacaacggggggttgctaatatgctccaatttttcttgcaggaatttaaacaagttgccgaaacagcggcccattcgtcggctaattcttcgcctgcgcttgtcgcttcgactgcgcctcagcagcagaacacggcccttcccagccaaaagagtggcgctgcaaactccacaatatctgctcgacaatcgctcaaaatcactgcgaaaaagcgcgaaaagacactcaatcaaagtgtgtcgtcgtcatccgccattttgaatcagccggacattggcgttgaacaagccgaaattggtgacacggaatgcgtttctgacgaggaatatgacgaggacaactcgtcttcgccgaacattgtaaatacattgcaaatgcatagttttgtgttcttagtgacttttacctaacttaattataaatttatttgcctttcaatttaggacttcgactcaatgggccgtattgacacggcagcagcaattacgaaatcgcaaatgcgaagacagcggcgccagaagcgcgagaaaatgtttgctgtgatgaagaggggtcacttctgggaaataaatgagatgagaaaagaaatgcaagaataactgcatatatgtacaaca

SEQ ID NO: 45723 - DNA, 2225 bp, Heterodera glycines
atgagaactccagccaagtcgattgatgagatagttacaaatcaaatagccagaacggttaattccattgctacaacaaaccgcaattagcaaatctaaaggaaatggagaagctgaatacatggattgtcagaaatttgtatagaaccaaccattgtcactgttaagttccaaaaagtcgtctattgtttttatgaaagtttttacggcatcagtacgatacagaaagccgcggcctggacatggtatttctttgtagcaaatcccaagcccttcgatgtctcttcgacaaaaatatcttttagtattattgcagttaatcacaagtcccaatgaacgattagagaaagccaactgaaattaatcaattaattgtcaaaatttgtgataaaacctgttgtaataaagttaaagttgaaaaacgacactcctttgggattgatgtttgcaactcgggcaaaagtggtgttttaaatgcaaaaatcctcgatccctcaatgcttgcaccaagtggttggtattttatccaactaaagtaataaaattaagaatttaccaaattagaaaatgcttgattttattatattcaaaaggtatatcctcataatttactctgtgggtattttccgagatgttctgaccattaaaactaattggaagatgaccaagcaattctaattagaaaaagactgaaaaagtcagcaacggcacaatggctgggtcaacgcctccgcctttgttagacaaaatgatccataacgccaagttgcgtaattttatgcgcgttaattcaaaaaactagtcagattcaaaaaaactggtcgtttttttttgatcacccaacgcatcccaaacaaaaccttatacagaatatcactcgatagttttagaaagaaataaatacttttttttaattttattttttaaattaagataggaaaacgctaaaactctaattttaagggtaatacgctaaaaactaatttgtaagagaggatgtcaataccatggtaaataaatacctatattatatttgaaatttccatattttactctcacagggttgagaaatacaggcctaagacattgggagatgtcattgggaattcggaaataattgaacgtttgattgaaatctcaaaagtgggaaatatgccaaatttagtcatttctgtgagtcattttcactaatacttacttaattacccaattaatttccttataatcgataattaaagggtccgccaggctgtggaaagactacgagtgtttgggcattggcacgggacatgctcggagaaaaagttagggatgcttgtttggagctgaacgccagcgatgagcggtagtggaaaataaataatttaattgatataatatttaaaaaattttattatttaagaggaatcgacgtggtgcgcgaccgtataaaacgttttgcatcgacgaaagtgactttgccggagaacacgcacaaaattgttattttggacgaagcggacagcatgaccgaaggtgcacagcaagcattgcgtcgaataatggaggtaggtttatatttccagaagctctgatagtacttttttgattttcattctataaaacaattttatataacaattatgctcaggtattcagttccacaactcgttttgcgttcgcgtgtaatcagtcggacaaaattattggtgtattttccaaccataatctactgaatgggaaaaccttttagaaccccttcagtcccgctgtgccatcataaaatacggaaaattgacagaccaacaaatattggaaagacttgtttgcgtctgcaaaaaagagagtgtccaatataacgcggagggcctcaatgcgatactttacacagcacaaggggacatgcgacaggtgcttggggttgtcatatagccacttataaacagtgtttaaacatcgtatctaatgaattacgaaaagcaagtttattattaattaaatttcaactacaaaatttaaaccttttcaaggcactcaacaatctccaatgcaccgctgcgggctatggaactatcacaaaagactatgtgtacagagtgtgcgacgaaccacaccccgagaaaatgtgtaatattttcgactgttgcatcaacggtcgtacccaagaggcgttcgatttaattgacgagctttgctgtttggggtattctgtcgatgaccttgttggcgttatgttcaaaacggcg

SEQ ID NO: 45724 - DNA, 184 bp, Heterodera glycines
acatagaacaatgtggggttggactttgtggagtgtggaactgcccatttccgaggcaacaattcggaatggtcggatggaattggtgtgcaaggcgacggaccgttcttataacacacagcccgagacggggatcgcactttggaatgtccgtgggctgctgcacaatgcatggcacagagtt

SEQ ID NO: 45725 - DNA, 731 bp, Heterodera glycines
aaatttattgaattcacttttttatttggtttcgtccgacaacaagaaatggtaagttgtaacggaatagcattactgataactcaattaattcatattcaattgcttaggcaaagcgcacaaaaaaggtcggcattgtcgggaagtacggcactcggtacggcgcctcgttgcggaagacagtcaaaaagatggaggtgtctcaacatgccaaatacacatgtgcattctgcggcaaggtttgcataccgcacattatgttgcaatttgctagcgacaagaagacggatacaataaaacactaatcaaaagatggtaaattccatgggattgtcattctgtttttagcggttttgcgatgtgctcagagttattcgaaaatgactatcattcatctgacattaattttggaccctaaatttgtgaaataatttgcttattctcaaaattaccatccaaattgcttattgcatttaatacattgtcaaagcgtgagttgtttttcgataacctgaaattacattgcagaactgctcaaaacatcatttttatatttttttgtgttgacgattggaattacccttgaaaaagtcaatgggataagaggcacttattatgtgcaaaaagacactaaatctgtgggttgcaaacgtccaagcccagaaaactatcattttgtttaatcattgcatcgggaactcaaatatttcatgaccaatcttcaaaataaa

SEQ ID NO: 45726 - DNA, 1013 bp, Heterodera glycines
atgtcccttttgcagacccaacaagtgaacagcactgcagtgactacaacaacaaccgcaaatgccaattgtccaacatggacagcagcaacgacaacgatgtcgacagttgcgaacattagtggcacaacaatggcaattgccgccaaaccgggggctctgaaaagtgggctgttgggcattggtggtgcatccgttcgtggccagctgacgagcggttcgacaatggtattcagtggcgcaaaaactgtaccaacagcaacaaatgcggtgcaacagcacaaccagaaaagtgcggcaggagggcattttcggctgttctgattgctaattgcttttgaatttcagttcttgctaatggcaccattagttcggcaacaacaaaatttgctgctgttgtaccacaacgggtcggcagtgttgttgcaccattgacaccacccattgaagcgaaggagccgcagagggaatacacgacaagtacaagcagtatcacctgtacaactttcaccacaaccacagaaatgtcggcatcgtcgctggacaaatttgccgacacggtgaacagagtggcagccggaacggaaatttccccaccgcatccgtcgatgcaacagcaaattgttgttgcctattcgtcggcagcaaccgcgacgacattggcgagcagtacggcaatactaacaacgacgacaacggcaagcagtacagcagcagcaatacaaccaccaattgcaacaatggcaaaagggcaaccgccgcaactcggcacggagaggggccaacaaatgttgaagccgaaggcgcccaagaagaagaaggcaccagcagcgccaaaagcgaagaatggcgcgacgaacggaattgacgagggggcggagcaacggaacacaacgaccatttcagttgtcgatatgcagcagcagcaacaacttcaacaggcaagcaaagggaattgtagtgcaagagcaacaagaaaactattgggataaaactggaaacaacggaataaa

SEQ ID NO: 45727 - DNA, 1913 bp, Heterodera glycines
  unsure (1)..(1913): unsure at all n locations
atggcatataatttcatgaaacgaaattcggacgacagtgacaatttgggattgacatatgtatggaaaagtgcaaaaattattttaaaaatgaaatttttaattaggatattggctcgacaatgcattaccctagcaaaggctttagcaaagatcgtaaaaggtttttataataaaaaaataaataaaaattttgggaaaaataattttccaatatttagttatacaatcctaacaaaagacccaaactttcaacaaacaatgggcaaccgtgctggactttcattcaaagatgctcgaataataaataaacgttattgtaaaagtaggaaaattttgataaatttaaatttaaaataattaaaacgattccaaaaattttaaatttttttaaaatataattacaaaaaataattaatattttttacaaaaaagattcatgcagtgaaaaattggaatgctcaaatgacggttacacagatccaaacaattgcaacaaatgtcggtgtccagatgtaattcaaattttattaatttgaaaagaatgtttatcgaacaaatttagggatattcgggcgccttctgtcaagaaacaccgttaagcggtaataattagttataatgatgaattanaattaatgcagtaataattaattataaagattattaaagttaattaatttaattaatcagacagtccattttgtgtcattaaaataaattaatntaatntaattagacaattcgttttgtgtcattaaaataaattaatttaatttaattagacaattcgttttgtgtcattaaaataaattaatttaatttaatcagacagtctgttttgtgttattaaaataaattaatttaatttaattagacagttagttttgtgttattaaaataaattaatttaatttaattagacagtttgttttgtgttattaaaataaattaatttaatttaattagacagtccattttttaatttaattagacagtccgttttgttcaaatgtcggatttttgatggctgggaaatgggccggaacaatcacaactggtcaacttcaaccgaacactgaatgctattggagaattattgtaaaaaattattattttttttataaaattaattaaatttttaattaatttgcatttatttagccacataaacacgagcaacgaatcaaaattacaatcacaaaattggagttcccgtgctccgatgcttgttcaagttatttggaagtgaaagcaaaaaagaaaaaaatttcgacaggttagagaatgaaattacaaacgaaaaatttagaccattattttctgagagatttttctttatgttgggttagctaaaaataatgttataaaaataataatgaaatttctgttatttttgtcatgaaattactccccaataattaaaaataataattgtaaactgttattacaaagtaataattgaaaaaatctatttcattttatttttctaattttatatgtatttatttttaaaaaatgttccaaatttttataattaaattaaaatcaaattttaacaaaagcaattaattaaataattttttatgcgcttttgatctatttaaatttttaggggctcgactttgctgcggcacaccaacaacaatatttagtgatgttgacacagacgttattttgatattgaaagtttcaaataacttaaatggcacttttcatggcgctaattttgaatataaaagcggtaatttttattataagaaagaaaatactgtaaaatataatacaaatttacagtaaaagcatcgattacggtaccacaaacaattcaggtaatgtacaagtttaattttgaaaatttattatttttttgaagccaatccgattattctttacttttttaaagaatacaa

SEQ ID NO: 45728 - DNA, 952 bp, Heterodera glycines
  unsure (1)..(952): unsure at all n locations
ggttttgctttttgagtaccaaacaaaggaggcggccaacgcagttttgcccattngcgatggacatcgccttgacaaaaaccacactttctcagcgtatccattcaccgctattcgaagcatgaaggagccggaaaaggactggaagaaaccggagagacaaccttatgtcgatttggtaaattaaagtgaattagaggaatttggccgacgacatttattgcccttcataatattaatgctaatttgttaagggtgacccatggtcttggctgcaaaaccccaagtgtttggatcagttcggtctcctctatgaatcgggccagggtggcactctccgtttggatgtgttttggaacgtcagaaatggcgagccaacgcccgtggacaatgcttctcgagaagtaattctgagtttcaaaattttcgagggccaattatgttcagaattggtccaatgaccttttcaaatggtctccccatgggacttatttggccacgatgaacaatgacaagcggaatcagcgactcggagccgtaatttggggcggcgaaaagttcgacagatttcaacgcttttcccacgagggcgtcaattaccttgacttttcgccaaatgagaagtgagtaattagttgtttcttttttgcgttatcgttcctttaatcgaatgtttttttcgatttgttttacccttttattttgcttttcttcagatttcttgttacttatgcttgcgatcagaacagcactcgtgataatgagaattgcttgcgcattttcgaggtgttcactggcgaactgaagaaggccttttcgccctctctgcgctccgctggccgtctccatgattggccctttctgaaatggtcacacgacgagaaattctttgcattttgccgtctccgtggcaattgcgtgaataactgtagcacggatgacttcatgcttt

SEQ ID NO: 45729 - DNA, 4222 bp, Heterodera glycines
atggaagatttttacattgtacttccctcaaacacacctggtccaggaaatactgcctcaaattttacggttagacttccgcacaccttagagcttgactccaaatggtccgtcgcgttatcagcaataatctatccatattcattcccgtcgatcagtgtggacgaggatgactctatctctgtcaaactggttaatcctaactacagagaagatgctggaaattctgacgaggaatcgcaaaagtttatcaatttatcagtgaagattccaaatgtacaattccaaagtgtacaaagtttacaaaaaacactgaatcagataatccagaatgcttacgatacaaagtttggcggctcatcatcattaaatgatggtacaaccaacaaaagagccaaacgacaaaccgaattgtcagaaacaggcgctggagttatcgaagtagagaatttcttcactcgaaatccctttgactattggcaacagattggagaactgagaaaaaagcactatcagctcagagaaagggttgaaaaaatggcaaaggagtacaattcaacagcggatggcgaacgaaaaacatttctctcaacggaacttggggtttttcaggggcgagaaacttttctgaaagaacatttgcatttgattgaagaagaggcgaagagaagggacggtgagcagcaagaagccaatgaacaaagactcattgaccgtttctttgcccgataccccgacaattatagagagcagctggacgaatggaggtcaagttacctccgagatgtgctagatctacaaacaaagatgggagagtatgaaggagttaaagatttgaaaaggcttgaagagctcaattcgcaaaccgaacgaatgagaaattccatacacgtttttggaagaaagatggaaatattaaacaacgcagcattgcaacgtgaccagaaaaggtctcaagaggagtttgaacggacaagccatgaacaaaacctgaccttcgtccaagaattcttccaagccaatcccgtgaattattggcaagcaatccagaaaaattatgaagcgcttcagcttgagtacaccaagaagagggaattgagggaaaagcttgaatttgaaactgacgcaacggaaagggagtcgctgcagcgacaaatagagagcattcaacgtctgattgactacaggcgtaaacggtttgccgctttggaatacgaggctaaaaaaagagatgcgcagacagggaaaactaactcaggcctcagtgctgtagctgaggggtcaaatagtactagttccaccccaatagactccttttcaccagcagatgagcccgcaaacccagacgaagaaaatgctaccaatagtaaaaacaaccaccaacaaaacatcactactactgccaccgctactttatcatccgagacaccagctgagcaaattttagcagatcaagataatagtattgatgagaaagacgaagcaggtacgccgccatcaagtgggttaggacagtccggtgatgcttctgctacatcagtgactcaagttgaagatggtcgaaatttacctcaagcagccgcgttgacctccaataacccaaaaattgttgctaaacaatcaacggtagcgacagagagaaggaaggagaaaataattgaaaagctgatcgacgaacaagtggaccgaatggtcgacggaacacatgcacagcagaagatgctacaggaagaaggtaaagacaacgagagtcaacaccgcatttcaacatataaactcatcgaagaagtgctacatggtgagcatggacagctaatgtcgcaacagcgtgaatccaaaatggcagctgaatttgcatacaatgaaataactcagcgattcggcattagaatgggccccggagtaatgcacgttgatttgagcaaacagctgtcctatgtgttggggtttgatcgcaaaacacgcatttacaacaatcagtcggcaaaatatccacctgatctgtctggtggtgtccgtcagctgtacgtttacgcgcctaaactggtggaggattccattataggtgaccgcatggcaccgttgctgcgagttgtcaacgtgtcagggacaccagggttggacatgccagaggttatatataccaatgaaatttttcattctctccaaaataaacgcatttctgaaattaacattgaaattcagacagcatttggacgttacgtaaaatttggttggggaactaccgtaatcacattacattttagacaaaaactattttagcaaaaaaaacgatagttatgacgcacgttgtttttaacccggacaacgtgaattggtccgcgttccttgcgttacagcagcagcaggagggaagcggtgagctgcagtattttgtaggcaataaatttcagcgtggtggcggtctgttacaaaatatttcgcggttcctgatgcctgtagccacaaacctgctaaagtctgcctcaaaagagggcatttccgcagggacacggatgcttgacgatctcgcgcagggaaaggcgtttaaagagtctctcaaaactcaggcaaagcaaggatttgagaatctggccgaaaagctcaaccaatgcggaaagggtgggcggcaacggcacaagacaatcactcatagaaaaaataaaaaaactggtacaatgagagggaaacggcagatcatcgatcaactaacacttgcacattaacattcggcaccacacgaagcctataaataggtaggataattttaatttttttcactaacgactacactctcaacaacatacattaaatattttgagagaaacatactaaccaaaaaactcagtggaaaatgagcgtaattaaaaagattgacaaagacagtgttgagggtctggaaggaagtctgtcattattctctttgccgccaaccaatgtggccataaataagacaaacgtccgtgaattgctgcctctttctgcacttaatcagacaggtccctatttgtttcgcctgttctcggacagtcaattttgtgacttgagcaaaacctatatgtacctgctcagctcaattgaacggaagaatgacgcgggagaatgggtagcactcagtgacacggacccaaacgataaacatgttggcgtcattcaaaactttgctagcagctttgtccgctcgctgaaggtcaatatttcaggcattgaggtgtttgacagttcaatttattatcactaccgcgactacataatgaaggagttgggttattcacaggaaattcgcaaggctttccatgaggcatcgtgctactacgcagacgatgatgaccagaacagcgcaacaaacccaggttttaccgcacgtgcggcacgcttttcaggtggtaaacagtgtgagacaatggtaaaactgaattttgatttggcacgtcaaagtgcattgatgttgaacaatcaggatgtaatattcaccattcaccgcaacaatgattcattcctcctgcttacacccccatacaaaaaaccagatggtacacagcaggaaaataagaaagagtaccgcatccgtgtgcatgatatgcgtctctatgtgcgcactgtggacgtaacaccaagccttaaccttgccattagccgacaattagagtcgacttcagcaaaatatccgctgcgtaaaattgagatgaggtccatttttcttggcacaggccggaccgagctggcacacaatgtgttcacttctacgttacctcgtcgtttaatttgcactttcgtttcaaccgatgcatattccggtaaccgaaaaatgtcaccctacaagtttgaacacgccaatgtacgttcgattagtgtcgaggcgaacgggcagacctttcccagcaccccgtatttgctgtccttcgatggtgtacagccccgctttgtccgtgcttttgtcgacatgtacgcaggcctgggtttggatgactccgacaccaaaacggtctcaattgggatgcagcgttttcttaacggttgggcctttttcgtcattccgctgacttccactctggaggacacacctggttttgagctgatcaggcaaggcacatgcacgataaaggtgcaatttgagcagcctataaaaacggatggatatgagatgcttgtccttggcgaattcgattctgtgttgtccattaacgcagaccgggttctgagtacagacggaagtgtgtaa

SEQ ID NO: 45730 - DNA, 572 bp, Heterodera glycines
atgggccacagttttggcgccgcctcgtcgctgtccgcatgtgccgaatatccgtcgctgttcaacgcctgtgtgctgctcgacgcctggctgtacccggtggaacgacgaatgtatccggcgactgtgcaggtgtgtgaaatgcgattttttggaaaaaaaattttgaggaacggcggaagggtgccgataggcgccactggaaatttttaaatttgttcaaattcaaaatttgtcttctttccccccttcatcggcacatacacccaatgggattcgaacccgcgccaataaaacccattttgtgcaaaaaataaatttggcccgtttccagaaaatttcggaagtttttttttttgctcatcgcctttccccacttttttagcccgtgctgatgctcaacgccagcaaatggcaatggccacgcaatgtgcgacgaatgcagcgactgttagcgaaagcgaccacttccaccaatgacgacaaaacagcaacggagacgacaacaacgacggcaccgcagcaacagtcgcaggacggcgccgcaacgacagcagcactgccacagccga

SEQ ID NO: 45731 - DNA, 1311 bp, Heterodera glycines
atggctttccataaaatcgacaacgactccgtgaactcaatcaccaatgcattggactttttccgtataccccctacaaatgtgagcgtttcatcttcaaaggtattcgagcttctgcccagcaatccgcttacagacacaccttaccatttcaaacttcattccagccaaaattatattgatctgtccaaatgttatttgctcaccgagtttcgaatccgtaaggaaaacgctaatggtcaactcattaacctagacattgatgacataaatattgcaccaattcaaatgatcggacaaaccttcatccgcaacataaaaatgagtatcaatgggcgcgaaatttttaatgccaatgccctaatggcctacaaatcatatttctcacatgaactctcttattcaacgacagcaaaagactcccatttgaatgctgctgggtattatagggacacgggcgatactctggagatgggaggcggatgcacagcgcgacgtaatttgtttgcgggtagtaacgtagctcaattcatcgtcaaaattgacaccgacctattcaaccaaccgctatacctgatcaatttctgtgaattggacattgaaattctacccaatgacaatgactttgtgttaattgcgccgaccgggggtcggtaccgtttcgaggttgtgggactgaaaatgtatgtgaaaaaggtgtctctgatggatgggttggcgctagacattgcgcgaaagctagagttgaaacctgcccgttatgctgtgcggaagacaatgatgaaatcgatgttcatcagtcagggtcgatatgagtttacagctaacctgtttatggaccaaatcccgcgtcgtgtgacaatgggtctggtggctaatactgactatgctggaacaattttgcgcagtccattcaactttcaaccatttaatgtgcgcgaaatttctattagtgcaaatgggcgaccgtacccccaagcgccctatgatttggattacagaaatggaaaatatgttcgcccattcaatgacatgaacgaagcggtgggtttcgccaactcaacagagagcaacgggattacttttgctcaatacggaaaaactcattgcatttatgtgttcaatttgaccaacagcggggatgatcaagcggcactgtttgatttgataaagaatgggaccacagcggttagcatcaaattcaatcaaccagtacccgtcggaggaataatgctagtggtgatgggagaatgcgattcccttgtaatgttggacaaaaaccgatcaataagcacagataccactatttaa

SEQ ID NO: 45732 - DNA, 7001 bp, Heterodera glycines
atgcggccaaatttccaaggtcagaaaccggaggcagcgttgcaacgtgcttatgaatttttgtcagttgggaagcaaaaggatgctcttcaggcgctgcatgacttaataaaagttgttaccatatcttgaactttttccaatgaaattttaggaccgtcgtcacaaacaatggacccaaacatatgagcaaataatgatgctttacattgagctttgtgtgatcttacgtaattcgccacttgcaaaggatggtctttaccaatacaaaattatcactcagcaggtttcctttgtgtaaattcatggtaatcttgactaaaaaagaataaacaaccgctttttggattttacataccacttgagtgttattagggccgttttccatgaatttgacggaacggaaaaccatagttaacaaagaagttacagattagactatgtcatatgacacttccaataaccacgagtggtatatagaaacgtaaaaaactggctgtttacttcttttttatgagaccaataaaagtcaggataaccaatgttttggtaatccttcggaattggtgttccggcggaatagtttgtttaggataaaaaataggctgataaagatccgactgaacaattccagaggattaccatttcttatgtttcgtcattttgatttaaattgttttatttgtttttcttaaggtttctgtgaagtcgctcgaaagtgtgctcgagaagtttttgcagcttgctgaacaaaaggctgtggaagctcaaaagcactcgatcgaaaaaatagaagaaattgacgacctcgatgttgctgatgtgccagaaaagtgagtcttcaatttgtttctatttacacattactcaaaaaagatcgatagatgaagttgaaatttggtatttccgtgttttgctccccccccccccccccttgaaaatataaaaattcatattttgggagatttttgcggtgtctgtccacgcagatgttgtttgtttcgacctttggtgatactttgtttgtgatagtgacttagaaagccccgaaatatgaatttttaaggggggtaacaaaacacggaagaccccgaaattttagggttttattaataagttgtgaaaaatttccattaaggttttgggcactgtttcaaccaattccaaatccctaacatcgaaacaaatagaattagaatttttagacttgttttgaaacattcaaaataaattgctttcactttttttcagtctattgctctccgtttccggtgctgttgcacaagaccgaatggaccgtaccgttctgagcccgtggcttcgctttctttgggatgcctatcgaaactgtttggatttgctgcgcaacaatgtttatgtggagaatttgtaccaccaaattgcccgtcaatcattcgccttctgtaccaaatatcagcgtcgcaatgaatttcgaaaattgtgtgaaatgctgcgtcaacatttggtccaaattcagaaagcccagcagtcgactgccttgcatccgtatgacctccacaacctctcgggggaacttatacttttcttttgagaattcgcctgagcaacaccgaatcgttgggtcatatgctggagacgcgacttatccaattggacaccgcgattaacatggacttgtggcaggaagcgttcaaaagtgcggaagatttgcacagttttatgcaacttggtaaagagaaggacaaaaaaatcatccgaccgactagctatgccaattattacgagaaggcatgccattcattgcataagtcgtgccatgctttgattatctcaacttggttttagatttctttggttttttggaagggcggcaacattcttttccacgccgcttcgctgcttcaacggttttgcattttcaaagacatgcgccgccaatttggcggtgaagaggcgatggatcaagcaacccgcgtgttgttggcaactttgagcattccggagggggcggagagtgcgtcgatgttgacgaaacacttggacattgaggagcaacactcggccaatattcggtaatgattcaaagcaataaaaaagttgaagtgaatcatataatgaaaattattctcaaacaaaccattgattgtttaagcattctttcgtctcttttacgtttgccaattacgccaagccgaagcggaatcctcaaagaaattgtccgactgaacatccccgagttggcctcgcccgccgcctacgcactttacaaatgtgtggagatggagttaaacccattgcgtacagcagtgaatgttcaaatgcatttgtcggacatcgagaaacttggacatttggagtataatcagtatgccgagccagtgaaggatgttgtgacggcacgtgtttttaaacaagttggggatatccaatcgtaaatcaactaatccgctcctccctccctttgagttgtctgcgctgtacgaaacactttctctcactcgtcttcataagctgattcccttttacgaagtgattgaactcgagcatcggctggtgaacgtgtgcaagcagcaatcgttgaaagctcgggttgaccatcgaactaaatgcgttcgttttggccatattgaaaatggatttgcgaacgatttggagagtgaggtggacacaaacacatcggaggtgggtaaatgacgaatttcaatcacatttgttgttcattaatgtaacactgtcgattgcattttttttaggttttgaaggcacgaagccatttggaggaaatgtacaaggagttgagccaatttaatacaaaggaacgcagtattatgcaagaaaaggtacattctaaacgacttgaaaagcgatttgtcaggcgcgctgacaaaatcactactgacaaaatcactactgacaaaatccctacatgacaaaatccctactcagcaaaaaatgacaaaatccctactaaccttgaaagtgacaaaatccctaccaaaaacaccgacagttaaaaaagttcttttttcgaatatatttttaaaccaaaaaaaaagtgaaatggtaacaacgggataatgtgatgggaaaaatagggtttaatattaaaaaggcgcatcaccttatcaatttgcttaatcatcttccgaatcgacatcgctttcattgttcgtaacatggagaccaccaacgaagcctaaagaaaattttaaacaacaaacttttgaatggctgaacaccatttgccgcgctcatccaccgcatgaccctttagaaattcgaaagtgccgaaacgaaacgcggacttggggatggaaccgtagctgaacagaaagagggcaaaaaatggaaatagtttggcaaaacgtacagcagaacggacagtccgcggtaaaagccggaaagtccgtgaaatcatcaccttaaattttggagttgtcgacctttcatccaactgaagttgtgttttgacgtactcagtggggtaagtgatgcaaatttcgatgcctcccgtaatccctccgattacaactcctttcattgtcctctctgaaggagcaaatctaaaaggaaatgtgaaaacaaattcccctttaacacaccttcgccatggtcgtcagtggcagcagctcgcatttctgccacctgcacaactgctcgctcctcaactacaatgctgtcgtctgttgatgcaatgcgtggccgtttactcaaatttaaattcttttcaaggtgttcatggcaattcatttcaagaaattgactcttgctctaaatacgtaatgaatcataaaataaatcttaagataaaaaaatatgttgctcccgtgcaagactatcagagctggcaagttttgaaacttgtcattttatctgagtagggattttatcgggtagggattttgtcatttttttgctgggtagggattttgtcatgtagggattttgtcatttttggctgagtagggattttgtcggcacacgatttgtcattttcacatttttcagttaaagcgccaaaatattcatttaccaaaaccaaaaggacgccgattttgagcgaattttggcgagaaggaagcgaattgagctgtacaaagagaccaatgagcaagtgaagcgggaaaaattgcagaaggaacaggcacaggcgaacaaacaggaggaacagcgcagaagggaggagttgaagaagttgcaggaggagaacaaagagaacgagcggaggcgcaaactgaacgaacaggcaaaaaacaaacaaacggaaggggcaaaaagatgagtaaaatgggcatccctttcaggaggagattcagcgaaagttgcaatccgagaagttgaagaagtaccaggcgcaccctttcttccaacagttggtcaaagagcatggggaggcgatattcgacaaagttgaccctgacaaactcatcagagagaaggcatttccaagcaatttatttttataattcatgaaataacattttcagcgaattcgttttgacgctgagcgacgcgagcagcagaccaaattgcaaaacttggagaagaaatatgaccacaccgtccgggcatttcatttggaggaaatggcactgtggaaacatttgtcggacgaacgccagagaatttacccgggacttcatgaggcttacgaaacaaaacgaattgaaaaagcggtgtgagtgatttggttaacccaatttcatgcctaatcaagcaataatcattcattgttttgaagaaaggagcgcgaattgtcattcgaaaaatatgcttatttggtgagcgccaaagagggggccaaggaatttatgcgttccgttattcaatctcatgccgaagagttcaaagaacagcaggcggcgtggaaacagcgtgttgaggaagctcggaacaaaacattgaaggtgggaggagagtagttaattgaaaagaggcacatttgaagagcaatacaatggcttttggctataaatttattcaaaattcgacggaatttttttggaatttagaaagttattattgtaaaacacttgggctattgacaatattgagaattaaaatttatttgcttttgcaatggcactggctattgtgtccatcacattttcgctgttaaactccatttttaaaaggaccgagcggagcgcaggaaggaacaacgcaaaaaagaggcgcgggaggccgaacagcaacaggcagcacaggcgcagacgcaaaaggcgaaggagcaaagacagacgcaacagccacaaaagccgagggaagtcgagcagcagcaaacgccacagacacagcaacagcccaagaaggcgaaggaggacgaacaacagcaacaggcagcacagtcgcagcagcagcctcagaagtccaagtacgtgccaccgtcgatgagaaaatagcggagcgatttgtttgatgaaaatttagtatttaatgtgtgcttaattggtgttgcaaagtattgttgatgagacatttaagcgttttggagttgtaataaattgttgttggtttttgcacatgtttttccgaaataatgacttaaagttttgttgacagttcgtgaatttgaattacttttgtcgcataaatatgaattttgtcgaaaatttagtttttgaatccgggttcgaagtgggccgaaataggtgttgaaatcagtttttctgacccaaaagcctctaaaaagaattatcaattttgaaaatttttcaaaaagcaatttaaaaatgctaatagttttattgttaacagactttttatcgtatcacatcggtaataaaatctgacataatgttctaaacacaatttcaatttttggcatcattttattcgactggcagacaaaaaaaaaatgcatatccgtgagcaaaaattatatacatttttatagacacataaattcagtaaaatttgccctgtttcttacagtataggtaattatcattattattgtcatgcccttgactttttacaattggcccatcaaccgccaccgctcttccgtgtcatgaactttcgcagtgcgttttggcactcctcggacaaccatcgcgacttgagcagcgcgcactcgcgcgtgttgaccgccagcaatgcgtcgcggtgcacgtcccgcaacagcgatttgttcagtcgcagcgactcgggcggaagggacgccagcgaatttaccttaattagatgggggtggggcagttagagattagtgaaactcgagttatggtttcgagattaatgaatttttcagaaatattccaaaaagttaaaagaaaaatggctctcatcatcaagtgctgtaccatccgttcagtttcggtgccaaaactgttgttgggaatgacgcgggagaccaaattgcgctccaatgcttcttcggcggacatttttttgtcgaacaaaaggagttcagatgcctaacaaattaaggaattaatggaaattaaacggaatggcattaaaaagtgcagcaaaattattgcaattcaattcaacaaaactcactttcgacgtgcccataatcagaggaaaagtgtaggaggagcagccctcgggggattggccaagcgaagagaagggcgcgtggaaagtggcctaaagcgagtgaaaaaggagaaaaatgccatattttgattcgatcgccggcattttttgttaccttatccgaagcgatgaccaaatcgaacagaggcaaaacagtgacagaaattctgaaagattcggggcatgtaatgtcgtataaagtcgaatttaattttgctcgaaaaataatatttttcctccacccaatcgctggcccattgatcagtccgatcagcggcttttcatgctcaatgaacgcgcgcacgtaacgctccaacacgcgctccccacggtcggccatagcacgcaaatcgtcgctcgttttgacgccgcgcgtaaaattggacaaatcattgccggcacagaaataggaaccaacgcctgccaaaatggaccaaaatttggtccggctttctatcagctctctgcattct

SEQ ID NO: 45733 - DNA, 1548 bp, Heterodera glycines
atgttcttcagaaaagttgtgccgtacaaaattgtgaaggcgtctaatggcgatgcttggcttgaagctcaaggaaagttgtattcgccttctcagatcggcgcttttgttttgatgaagatgaaggagacggctgaaagttttttgggcacttccgttgcgaattctgtcgtcacagtcccggcgtatttcaatgactcacaaagacaggttttcaaattaattgatcgtttactttcttttttgtttctaggcaacgaaagatgctggaaaaattgctggactgcatgttcttcgcgtgataaatgaaccgactgcagctgccttggcttatggtcttgataaggcggaagacaaagtgtaagcatttaccaaatttcaagtactgaaaggagatgtctcaagaggcttttactgacacaaattaatatcaaagaaaaagttgactattctatattttagcattgccgtttatgacctcggaggcgggacgttcgatatttcgattttggagatccaaaaaggcgtctttgaagttaaatccaccaacggcgacactttccttggcggggaggactttgacaatgtgcttgtgcatcaccttgtcgccgaattcaaacgcgaacaaggaattgacctcaccaaagacccaatggccatgcaacgcgttcgagaagcagccgaaaaggcaaaatgcgaactgtccagcactacgcaaacggatatcaatttgccatatgtcactgtggactcatcaggaccaaaacacatgaacgtgaagctgtcgagagccaaatttgagcaactcaccgccgaccttatcaaacggacgattgaaccgtgcaagaaagctatgcacgatgcggaagttaagccctcagacattaaggagattttgttggttggaggaatgactcgcatgcccaaagtttgttctttatattattaccaagtttaggcatttgtgtttttcaggtgcaacaaactgtacaggaagtttttggcaaacagccaagtaaagctgtcaaccctgacgaggctgttgctatcggggccgcaattcaaggaggtgttcttgctggacatgtgacggacctgttgctgctggacgtaacgccactgtcacttggaattgaaacgcttggtggtgtgttcaccaaactgattacgcgtaatacgaccattcctacgaagaagagccaagttggttgctgtcaacacttgatttctactttcttaaataaaggtcttctcaacggctgctgacgggcagactcaagtggagatcaaagttttccaaggcgaacgcgacatggcattggacaacaaaatgctgggccagttttctctcgttggtattccgcctgcccctcgaggtgttccacaaattgaggtcgcttttgacattgatgccaacggaattgtgaatgtgtcggcacgagaccgtggaactggcaaagaacagcaaagtttgactcttcgatatgaagaattgtaaatttttggtttgttccagttattatccaatcgtccgggggactcaataaa

SEQ ID NO: 45734 - DNA, 1391 bp, Heterodera glycines
  unsure (1)..(1391): unsure at all n locations
atgtatttgactggaatggttgataaacggacattggaaaagtatgaaaaagaagcgaaagagaagggccgtgagagttggtacttatcctgggcactggacacaagtaagatattattggtagttttttcgatagagaattaattattcattttgtcagttttatgatgtaatgttttttagatgaagaggaacgggaaaagggtaaaacagttgaagtcggcagagcattcttcgagacggatcagaaacattttaccattttggatgcccctggtcataggtcttttgtgccgaatatgatcgctggtgctgcacaagccgatttggcagtattggtcggtagtattttgattatttcaaaatggagagcatttagcattaatttttgagttgaaaattatagcgaattaaatatcctaatatttaagaaattgttacatacttttagggtttcnaaatntattaatgaatatttcgcctgttattctccctgacccgagtttaccattttaggttattagtgctcgaaagggagaatttgagacgggttttgaccgtggcggacagacaagagaacacgtcatgttggcaaaaacaaccggagtgaagcacatgataatacttgttaacaaaatggacgacccaacggtcaattgggatgttggccgttacagccaaatccaggaggagctgacgcctttcttgaggaagtgcggcttcaacccgaagaatgacatcatgtttatgccatgctccggactcacaggcgccttccttaaggaacggccttcttccgacttatgcccttggtacaccgggatgtgcttcttggaatacatcgactccctccctttgatcgcgagggatttcaatggcccagtgcgcggcataatagcgaacaaattctctgtataattttactttcttatttattagagccgattttacaggacatgggcacagtcgtttctggaaaactcgagtccggttcaatttcaaaaggacaaacgctgacattaatgccaaatcgagtgtctgtgcaagttctaaattcctttgtaaacgatgttgagaccgaacttgtttatgctggtgatagtttccaactgaaaataaaaggagtcgaggacacggaaataatgtccggctttgtgctttgtacttccgattctccgtgtccaattggtcgcatattcgacgcggaggtaaaaaataaataaactgatagcttacgctgcttttgtatttcatgttttactatattttaggtgcttattttggactataagtcaataataacttcgggttttggctgtgtgctgcacattcacgaagctgtggaggaagtcacagtgaaggtgaccgaccaattcgtttggcctttgtaa

SEQ ID NO: 45735 - DNA, 557 bp, Heterodera glycines
atgtcaaaaacatcgaagaaaaattttgtgacaaagcaactcgttaaagaaattgttattccagccgacaatgaatttgttgggaaaattttagcttcacgaggcaacaacctccatgaagtagaaaccgatgaaggggaaaacttccttgtgtaatttaaaatttgttttaaaatacttttcaattttttaggagtatgcccacaagatttcgaaagaaattatgggttcgtcgcggcacttatgtgattttacagtcaattgaagaaggagacaaagtgcgagctgaaattgttcatgttttggacccggaaaacattgcgtttttgatggaaaaagaagtttggccggagagatttattgtagaagctgcgcaattgaccaagcgagggcagcgaactgaagaaaatgacgattcggacctattccccgcaacttcggaatctgaaaattcggctgaagagagttcttccctcgtttctgaagatgtagctttgaatggacagacaaatgccaaagatgaaacaacgatttaaaagaaatttaattttgttgca

SEQ ID NO: 45736 - DNA, 2206 bp, Heterodera glycines
  unsure (1)..(2206): unsure at all n locations
atgtcaacggaatcaactacgcgtccactgatcgcaaccagcacatcccacaatgtgagaaaagagttggaaaccgaagaaaataggggaaaaaagactaaattaagaaaaaaatattcagataaatttaatctttttgcctttttgttcaaaaatgtcaggaatttttgggttcaagttttcattcaaaaggattggcgtgccgatgccgacgctgtcaaaaggcgctaccgggataaatttttgaaatttttggctcttttattaatagagatttcacatcaaaaattgccaattaaaccaggggcgtaggtctaaacaaatgcgtccgtttcttgccaagattgtggctcatgctgggcaatgggtgccacttcttcgctggctgatcggatcaacatcaagcgcaaaaacgcgtggcctcccgcctatttgtcggtgcaggaagtgatcgactgcagcgaggccggctcatgcgaaggcggcacgccggacaaagtgttcgagtacgcgcacaaaaatggcattccgcacgaaacgtgcaacaattaccaggcgcgagacggaagtgaggggncggggggggggggggggggaaattggcattttgtaaaaaggaaataaggaaatttaattaaaattttattttacttaaaacatttagcattttgagaaaaatgtgggcataaacgaaatcatttgaatatttgttagtgatttataacttaattagatttaaaattaatgtgtaaaatagttatttatcttggttaaatatttttggaatttatcaaatgatttttggaattattttatttccgaaataggtctatttcatttttggtcttcggcatcatccaattttgacttgccgagagacccaatccgttcaaattcaagctgatcattggctttataatttgcattatgcaacagaatgtgacccgtacaaccgttgtggttcgtgttggcccgacaaatgtttcaccgtccaaaattacactttgtacaaagtcggcgacttcggctcggccaatggaatccaaaagatgaagtaaagcaagcatacataaattaaaataatttttaaacatatttttagggccgaaatttaccaccacgggcccatcgcttgtggggtggcggcaacgccgcggtttgacaattattcgggcggaatttacaaagagcgaacgaatgaggtgatcagaggagagactgatcactggccagaataactaattttaaattttaggatattaaccacgtcatcagtgtgagtttattaaaaatttattagagtctttcaatggcggtatttttggccaacggctcaatttttgttttttataattatttatttaattctaaataaataatgaaaggttgtcggatggggcaaagatgcggcttcgggtgtgccgtactggatcggccgcaacagttggggcaccgcgtggggagaacagggtaattaattcgttaatatgactaatttgcataattgaaccctggacaataatttaaagctaagatcattttttcattttccagggtggtttcgtgtcgtgacgtcggagtaccgcgacgcgggaaacaaatacaatctgaaaattgaggaggattgcacctggggcgagccaattatcatctgaatgaggagcgaacaatccgagcactgttcaaacccgatgccaaaattttttccatttttgtccaagcatttttaagccaaaataattacggaatttgacaaattaggcaaatatcaatcgcctttctgctgttgccttatttaatccaatttttaaataattacaacgacaatttattttagtttatttcgctaaaatatttttttataatgtttatattattatcgttagaaaaatcagatcagtaaaaatttttagaaggatgggagacacaaaaagaaacggaaaatgaaagttgaaaaggaaagaacaaaacagaaaaaatcaaaaataatttaaaaataatattaaaaaaaagaattaagcaaatagtaaaacatcatctaaagaaagggtgccagcgtgtttcttaatccaccacccaacaaatataaataaccattttttcattgaattttaattaatatacttttgaaaagataaattaaaagcaaaacttttgttcgaaagaattcagatttttcataaagacaaaaacaaaaaaaaaagaa

SEQ ID NO: 45737 - DNA, 1807 bp, Heterodera glycines; identical to SEQ ID NO: 4184
  unsure (1)..(1807): unsure at all n locations

SEQ ID NO: 45738 - DNA, 2293 bp, Heterodera glycines
  unsure (1)..(2293): unsure at all n locations
gtggaagggctgcgaaaggggccggacgccccttcccccgctatttatatgcttgttcaacactttcggggtacacaccggcgagaagccatacaaatgcgaggcaaatttaaaagtttgaaatgtttcctaaaaatcgtgggacgaacaattaaaagaatagaggggaatagttggattggtcgaacattctttctgatcattctaatgtccgatcattcccttattgatcactctattttcttccgatcattcctttctctgatcattctaatgtccgatcattctaatgtccaatcattcccttattgatcactctattttcttccgatcattcctttctctgatcactctaatgtccgatcattcccttatttgatcactctaatgtccgatcattcccttctctgatcactctaatgtccgatcattcccttatttgatcactctaatgtccgatcattcctttctctgatcactctaatgtccgatcattcccttatttgatcactctaatgtccgatcattcccttctctgatcactctaatgtccgatcattcccttatttgatcactctaatgtccgatcattcccttatttgatcactctaatgtccgatcattcctttctctgatcactctaatgtccgatcattccctttccggcgttctgttccttaatagccatctttttgtttaacattcagtgggcaagttgtgaaaagcgctacgcgcggttggaaaatctgaaaacgcaccagcgaacgcacactggagaacgtccgtttcagtgtacgatctgtggacggtcatttacaaacatttcggacaaaatgaaggttcagtgaatgaaaggacaaacattaaaaggaaagcaaatgattgatcagctcttttcagcatgagaaacgcgtgcacaaaaagaaggtcagcaaagtttgagagagaatgggggacggaatgccaaacggacgaatgccaaattgggactcactttaatttactaatgaggagtgccaatttggactcactttaagccccgcccctaattgtcggctcttttgattgggcttgcctttgcagaaacaatactcttgcgtggttttgggctgtgccaacgcctacacggacccatcatcactgcgcaagcacactttgagaagccacgggaccaatccgtggatggaatacaaagcaagacgaagcaaagtgcgaaggattaatgccaaaggaaaacggacgaaaagagacgaaaaattataaaaaggaggagaaaaagcatattaagcagacgacactcattggttgattaattaattaattaattaacgactgattattgtactgtactcatattttatcattactttaaaatgcatgaggtaatagccaaacgaacaaaagaagaagctgattgatcagtcagtgatcgtctaaaatgccaattctctcgcctttttcctcaatgtttttgggtcgcttttctccgatggatttccattgtgtaaacattgccatcgtcgaaaacaatcaccgaatcggattcctgctgattagacaattatttcccagcaaatgctttgactttttgcatcgcttttatttgtttcctttttaccgcgtcgtattgcacattcgaaatggaattgggccccgctgcagcccaacccggtgccgaaattggaagtgccgtccccgcgagcatttggccgtttcggaagtcgaacagcgacacaatttgcagaggaggcgaattggaatctgttgggtggggagaagaattagcaacccggnaccggcccccgacaacgccgaagggccaagaccnncacgcaggnangggagccgcaccacaccgaacagaagcccacaacncacaaaagcgangaccanacgaacggccgacgaccccccaaaaacccagagggccaacgccnacagacggacagaggacaaaaagagcacagacagacgagaaagaggaaggccggaaggaccggaaaggacggggcgacggaacagagcccaaagggcggactgagcgaactccaaatcgacggaggagaaaaaggaagaaggtccaccgaagcgaatggaaggattagcgaaagagaaaccgtacaaagggaactgaaggggcaggaaaaagggaaaaggaaatgcaaaaggaaagaatgcaaaaggaaaaggcttaggcaataggccaaatccgtcggagaagccaacttttgatttttttttagttgatccagtctctggcccctcccccctcttccctgcctctctctctact

SEQ ID NO: 45739 - DNA, 674 bp, Heterodera glycines
atggcgccgtacgtcaaaaccatcgccatttccgaaatactatcccgcactcccgagctcatattcctcaacattgtcactttggaaagtgagtttcattttggaaatattttggctgaaaatatgcaaatgcatttggtcagatgagagttattgcgtggaactcactcaacgaggctggcgggtgagttccgaccgtctcgactgtatgaacggagacattcaaaaggtgaccaaccatttgcaagggaattgcttttatttgtgacagttttcgcttttcagttggaaatgcacgtcacttactacgacgccattgagcagctgttggacagcttaagcgagcagtaccgcgagaattttggcgccgcactctcttcaaaactggccgctctgcagacggaacagaagcaaagacagcaggacggagaatcagagggaaatggcggaggggcggcagagagaagcgacgcggggcaaaggacggacgacgagccgaactgacaatgagcggagcaaagaaaagcacagaatgtttgtccattttgattgacccacccttcgttggtctgttactcatttacacttctccgaggcgagtgtcccatttctcttccattcccttcagtttcattttgaccgtaatcatatttaaaaattttttgtaaaataaa

SEQ ID NO: 45740 - DNA, 986 bp, Heterodera glycines
tccgagcgatcggacgttgtgccataaaagtggagcacagtgcggaacgatgtgtgaacacgctgttggaactgatccagacgaaagtgaattatgtggtccaagaggcagtggtcgtcataaaagtgatttggccgaccatcggcgagagatgggagagacaacaatttctaattttatcccttttaggatatcttccgaaaatatccaaatcgatatgagggcatcatttccacgctgtgtgaaaacctcgacacgttggacgagcccgaggcacgcgcgtcgatgatttgggtgacagcgtaaatcctatcgataaaacaactatttctttattcaataaacagattattggtgaatatgccgaacgcattgacaatgcggacgaattgttggaatcgttcgtcgaaggatttcatgacgaaaatacccaagttcaactgcagctcctcacggccgtactcatcaattagaatttaatttttggtcttattttccatccgttaaggtggtcaaattgtttttaaagcgtcccactgacacgcaacaattggtccaacgtgtgctcacattggcgacgcaggtggatacagaccacctctattctgggtggtggggtacccgttatttcggggagtatctcaatggtcaatgattgccttttctattttgaaataggattctgacaatcccgatcttcgggaccgcggctacatttactggcgccttttaagtgccgacccacaagcggcaaaagaagttgttctggcggagaagccattgatttcggaggaaactgatctcctggaaccgtcgcttcttaaccaactggtgaaatgcattaaaatgcatatttcaggacattaattagacttttcgttgctcttacccctccctcccggcttttcaggtctgtcacattggttcgctggcttcagtttatcataagccgcccagctcttttgtcgactccaccattatcctgt

SEQ ID NO: 45741 - DNA, 781 bp, Heterodera glycines
  unsure (1)..(781): unsure at all n locations
ctatacacgttggacgtcttcgtgccctgctcctcagccgtttgtcacatttcgccatcaaccgactattcaaatggcacttccaaattcaatgccctcatcgagaaaggcgtcgatgttgtcccggacttgcganagctcattttccgtgccgtaggctctacaaatgatgaaaaaatcattgctgcattgaaaaatttgatggagacatcgggctacgcacaagtggagttgtcatgtgtattaggtatgagatattaggcaaatgtgaggtggtcccttatgacaaaccttttaaggacttggccagtgttcggacttgaaaatgctcgaggacattttcaattatggtgttattcaaggcaaaatccgcgaccaggacctttatcttttgttcgcggcaacggaaatggcaccgatggcgtgctgtggacatttcgcatgggactttttcaaaaacaatttcgcacttttgatcgagaagtacggcagcgtcaacagcaacgtgttcttgcattgctttgactgcgtgacttcgggtttctgttcgaatgccatggccgaggacattatggtgggttaatgcacaatcagtggcaaaagcggagattttagacccatttaaatttaggagttttttaaaaaagaattggacgaacattctctgaaaacattggagcggcctcttcgtcaagccgtcgaatccattaaagtcaaagagagtttgctgaagaataacgtgcccgatttggacaaatatttgcagaacgtgggatattaa

SEQ ID NO: 45742 - DNA, 880 bp, Heterodera glycines
aaaaatatgaaatttaagaatttcttatttttaatgggttataaaaggtgttttaccccaattttcaggtgtttctcaacattttccaagtcaacgagtattggttcaactggtcccagctgttgtttctgatttggaatgccatcaatgacccactttttggctatttgcaggtagcgagcgaatctcccgcttttaacaaaaactcttaaccaaattcatgaagttttaaatcgcaaaaatttttaagcgtgctttttttacctagactcactcaatttttgagtctaatttttgaaaatttagcgaagaaatacaaccattttctgtttgttttggtgtgatttttaacgaaatttttgtaaattcaaatataaatttggctaacaaaatccgacatggtttagccatcgttggggaatttatgggaaatttctttcagaattatcttaaggcctagctttacaacaaaaaaaaaatgcgcatttttttattccaaattttcccatatttttttaggacgtcggtggcacttggatgaaagaccgtggcaaaattttcacctattttggcccctttctcgtcctctcctttctgatcacttggttcccgtggcgaagtgcgcccaattcgccgccgtacgtcgagggattgcatttgatcgtctcactgtttctctacgacgcatttttcaggttacaatggccaggccaataaaattggtgaaattttaaatttttaggcgccagggaggggtttaatgggtagaaaatttatattttgactaatttgggcggttttatgagaattttcacctaccccccccccccccctcatcgtttcacaatttttcggcattttttcttgcgaaatttgactc

SEQ ID NO: 45743 - DNA, 1106 bp, Heterodera glycines
atgacttcttccgttcacaattcccccaattccgttgtgctcccccaacttccttctgattacgttctccgtcctctgtcgttgaatgacgtcaattttggtttcattgagcttctggaacaactgacttctgtaagttcccccaattgtacgttaaaatgttttattaaaagattaacaaattgcattttgcaggttaaaccgttaagcgttgaacagtttaaagaacgattcaaccaattaaacgaacaaaaaccacgggcttaccatatttatgttatcgaaaaggaaaggtaaccgaatggaaataataaaaaattgtaatgcttgaatttattttttagtactaagaaaattgtggccactgcgactttggtgttggagtggaaattcatccacagttgtggagcccgaggacgtattgaagatgttgtggtggacagtgaagagagaggaaaacactttggccacattctcaacgaatatttggtaagtgattcataatttaacaaggtaatggttgttggatttaccaattgatgttggttgatttgttctttttttttgttaccattccctttttatggaaaggaatgattgggtttttacgattgtttatcccttccctgagcggcgaccttttcaggcagttcttccatgttttcatggataatcccaaaaatttcccctttttaaatcggtcataggtccctcaaagctattcaaaaactgtcagaagcaatcaagtgcgattaaacgaagagaaaaatataatttatgagcgcttgcttttttcacaagaaaaattcggtataacttttgtgcatccaatcaatttattcctaaaatttgaaatctcagaattataagtcatatacacgtaggagtgttatgaataaataatccaattaaacattcttggtatcatttggtagcaccgagagttctctattagcctacgattgttgaacaaattaactaatgattcaaaaaattatggtcaaaaaagtatttttttggatctaatttttctgaaaccaaacaaattttcaatgaaaaaattggttatactgaactagagcccattattctccgcctgaaataaa

SEQ ID NO: 45744 - DNA, 288 bp, Heterodera glycines
atgcctgagttacttttcaagaccatcacgcagcaatcgttcacaattgaagttgaggaaactgcaacggtgagatgtttagacatccttttcttgtgcctaaatacctaacgatccattccttttcagatcggcgaagtcaaacgaaagatccaacaggtcaaaggcgcagaatacccagcggagaaccaaaagctgatcttcaacgggaggatgctcgaggatgccatgttggtctctgagctgaactttgcggcgccgaaattcattgtcatcatggtcatgcga

SEQ ID NO: 45745 - DNA, 1697 bp, Heterodera glycines
ttttgcacaatttcttggtcaccacccaggccatcgtcccaccaccccgttacatcttcggtcaaccaatcggaggaggacgcgccgcgcttcaaccgcgccgcgtcgataaacatcggagcgttggaggcggaacgcgtcggttgcgattacatggcaatccacgacgtggacattggtgttgcatttggatggggatggacggcagaaaattgggcaaaaaattgagtgaaaatggaattgaaattgtaaattacccattttttagcaaatttgattacgccaaaaaaattttttttttttttaatttcttttttctgaaaatttttttgtttcgatacgggttttcggggctcttacaattgggaatatgtatgaaccgaaccacctttgtacaatgaataaggggaatggatcagttttgaaaaaaaagtcaccaaatgattccgaaatttttccaatttaagttccgcttaatccgaacttgagctaccattacccggaggatgggcacataatgcacgttgcagctggtcaataccatcccatccgaaggtggagtttcaaattttactttgtcattttcaccaattaaatatgacaaaaaatttcgactccctttaaaaaactgcttttttaaattgttttttgacttttttgtccgagttgggttagggtttctgagttggtccacaggcctatttataaccatgggggggggggggggggggggaatgactaaaagttggcgaaattgggctaaaaattcccattttttccacggagcttaaaaaaaattttgggccgggagagcaaaaaaaaaaaaaaacctccaaaaaaaatttttctgatctggtaacgggcctgagttggttgaaatggatgttgtcagatttgtgtgacaaatgggggaccccagaaaatccgggaaaatgtttcagaacttaaaacatttacacaccgtcaaaattcgaaacgaaataccaatttttaaatgaaaaatatacgaattcgagaaataaattaaaaaatttccccattttttaggtatgactacaaaaatttcatcggcagtgtgctcgtgatcactttggccgattttaaaaaggtttaatttgtttcgtggcatttttgttgaacgaacgcatattttctcatttttaggtggacggaatgtccaacgaattttggggctggggcctggaggacgacgacttttacctctgaatgtttcccaaattcaaaaaacgatcaaaattttctgacgacttttcaccccttttttcgcggcgtcttttccccaaaaaaaaaaaattttttgtttgggggaggcccggcggtgccgataggggccgcagagaagggagcaggacaaaacgtcgccagccgaaacgtcgccgggacatgtaccccgcagagaacaatcttaagaaattttttcataaaaattttcacgaaatgcaattcaatatcgttaaattgtttgagttttgaaacaaaaattatgattttttccattttcaattttcggattttgggaccgacaattttaggggggcgggaatggccaacaaaatcaggcgaccgtccaatttgagcaccaatcggtccaacacatttctgcatttgcacacgcggagccgacaaagggatttctcagtggacgaatacagaaaaaaggtaaacggaaaggcaaa

SEQ ID NO: 45746 - DNA, 1044 bp, Heterodera glycines
tgttcacactttccgtgcggttgctggggttgcccaacagtttagggcattcaaaatttatgtaattattaaaattaactgggaactgcacttacatatattatttatttttctaaatattgccacttttcttcaacccgccccctttttttgcaggttttctcgtctcttttcgtgccaattttccgttggtgccgttttctttggcgccatttgttgtcccttttgcgggttcgccctcgcaattacgcgaattcggaggcaatttggacgaacattcatcagcagcaacaaagcaggggttcatttttttccttttgcattttccactttctttctatttccttttttttccatttgtttctcttcctctgaccatttctctcttttctttctttttctcctctcttttccttcacatttttgcactttctttttctcctttccgcttttctttttcttatttttcctccccctctttcttcagtccctttttcttctcccaatttcgcttcacttttcttttggctgatcgctctcggcggccctttccttctttttaaatgtgtccttcggcttgccgaaagagaggccgaggcgaacaaatggaccaccggacagacggagcattacacggcacaggcaatttttatgattttgttattatttgttcttgctcattcttctcaattgatcctctttttccttctcttatgttaggcattgttcgacttttgcgctgccaatgccaatgaattgtcccttacggcgtttgatgtgattcgcatcgcgccaaagtcggcgcagccgaatgtcaaagattggcttttggccaggtgttataactttgaaatttgacagaccaaaaaattttattttttaagcacattagacggctcaaaagttggccttgtgccgataaattacataaaactgattggaaaatgcaacgacagaaatgcgcaaatcatatgaccagtccgaacattgggttaacggacaattcaattctctttcattttgtcatttcatttaaatgtttcc

SEQ ID NO: 45747 - DNA, 2225 bp, Heterodera glycines
atgaccgagtgttgttcatctgctgtttctgacaatggcactgctccctcctcctcctcttgggctgagttgggtctttctgctgcgactctcaacgctcttggcacaatgaagtcgcgtcgcttctcaatcaacaatttcttaaattacttattttcttcatttagctttccttttccaactccaattcaaaatgctgtgattcctatcgctgttaaattgaaaaaagacataattggagcagccgaaacggttgatatccaattaataccatttgattgaatccaatttgtcaacatttagggcagtgggaagactctcgcatttgccattccgattctcgagcattggctgaccaatgccattgccacaaatgcccaacattctccggccaaaggctcactttttgcgcttataatttcgcccacgagggaattggctgttcaggtggacagttgcatttgtttctctttacaaattgcctttttaacccaattttcccttttttgtcagataaaagaggtgctcattgccctttccgttcaaattgttccacgcgctccgaaaattgttgcaattgttggaggaatgagtgagcagaagcagcaacggttgttgaaggcaaagtatgcgcactttcttcacatttaatgcccttttgttatggcgattgaggccccgttttttgctgtttgagaaaactggcaatttttttatcttgttgaaaaaaagaattttttcccgtggaactagccacaacgtcgggtccctggttttatttcagttttgttcttgaaagcaatatgcataatgaatcaatcgccttttgatctctccgccatttttagaccagaagtgatcgtcgccactcccggccgtttttgggcattgcgtcaaaccgtgcgattttcccattttaagaatttatctcgtctaactaattcctcgcttcgctttattttagtcccaaaatgccttttagggcgaccaacatttggcggatttgtccgcacttcggtttttggttgttgatgagattgaccggatgttggagcaaggccattttgaggagctccgacacattgtccaggacattcacaggccagacaaattgtcttcggaatttaatttaagtgtttatttttcagggataaaaaggagcaaaaaatacggataagcattgcttccgaccaaacggccgacccttccgatggcattgctttgccaccgcttcaaacgctgattttttccgcaacgctcacttttactcatcacattccgttgcggaggggcaaaaaagaggcgcagcaaatggcgacggacccaaagcaaaaagtgaatactatcacattatgtttaagagaaaagtcacttttcggggtctttctaaatttatttaaaagggaatttcaagaaaaagaaagaaatttaagaattttaaaatttatttttttaattgttaaaaatattttcatttttaatcatttaattaacgatctgctaattgtaagcattttgttttggcgttttaatccaattcaatttgtttggtctctcttttgaggtgcgtcggattgccctttcgatgtccatgcgaaagggcgcagcgaatctttctgtgattgatctgacgccaccgcagaaaacgccacagactctgaccgaatgtcgcatgaattgtgccgatttactccaaaaggcacaaaacatttatatttcccaatctcattacaaaaaattcattttgcttattttttatacattttcaggattcaaatttgctgtatttgttgaagcggcacggcgggcgcactttggtatttgccaattcgatttcggccatccggcgaatgcattcgctgctcaaaaaattggcacttccgaacacggcactgctgcacggacggatgaaggaaaaggaacggctgaagagtgtggacaaattcaaaggcaaaggaacacggggacaacagagggaacgacgaattaaaacaaaaataaacacccatttcaaaattaaagaattatcagaaaagagcgtcgtatttcctgatatattttccctccaatttccatgcctttcagcgtcggatgattccgttctcctcgccaccgatgtcgccgcccggggcctggacttttatggagtgcaaaatatcgttcattaccaatgcccaaaaactacggaagtgagaaagaattggatatgttcttttccggtttga

SEQ ID NO: 45748 - DNA, 1414 bp, Heterodera glycines; identical to SEQ ID NO: 23003

SEQ ID NO: 45749 - DNA, 2620 bp, Heterodera glycines
tccaaaatgcgatgttcggcaacagcagcagtgagcccctcaaaagttgaacgacggcagcgaactgctgataccatttacacagacggcggtgcagagggaagtgcacgaagtcaaattgggtaagaaaatggggaaaatggggagaggggggaaggggaaacgagagggattgattcgaattaggaaaacaattggaagggcaaaaagagggacgagggaggggagcagtgcgaccagatcagaaccaatcaccaacaaactctcctcttttggccaaatttggttaatttaatgccacagatctgtctatgctggacaatgccttggactgcttcaaatcctttctgactgttctgtacggcggtgtttcgtcttgtgcctccggcgccttttcccttcccccgggggtcgacccttcttcggtttgatctcctcgattggcatgctcaattgttgtcagtttcagctgctatttttggccaaactgcttgaactcaccgacctggaggtttcggcactctttggcaaatttctctcctcggcgccgtcccttccgacctctctttccctctcctccgccgtatcctcctccacttcttcgtcctccccttcctcttccatttattcttccgggtccgtcaactttcgtccgatgccaaacaacgaaaatcagttgccattgtatttgggtaggtcttttgtcctgattggttcccccggcgttggcattccctcctttttttgtgccataattttttgccattttcctttttaccgtttattcctttggctttgtcccaatgggttgttcctttcttacttccggtcccacttttaagcctatctccaactccaatcgttgctccaccaacagcaacagcacttcgctcatcccatgccaccagatttggcccattttgcccaccatcctcaaatttcggctccctttggtgccgccccttccgccgttggctttgccgccccaatgtcagccttattggcccaaatgttcagcaaaaggtgagcagccgaagtcaaccaatagtcatttgtcataatcctccgctgcttttgcccaattaaccaaaaagggatgagaaaatgggcgaaaagtgagggaaagttcaattgcgtttgtgtgctgctctaatccccgctcacttttcgcctctcatcatcaattagaagggatttgagcaaagttgtggatgacaacgaaggtatgtggtgatgaacagcagaagaagaagaacatgagatcattgggaaggggagaaaggggggggagggggggggggggaaggaccaaccaattcaaagaatgccaattcggacaatccattcattcgtcgcccttttaatcatttggctctaaaaaagaatttaatgcttttcacttaatttcccctcttttagagcctctccttcggttggccaatcgaccgccgtttcggattcgtctctttcgtcctccaccgcaattggcgtccattcgacagagagtggggccccctcctccctgtcctcatcctccgtgtccatggaccatccgctggaaaacagcacggaatcgttggacagcataacccaatcatcagcgggtggtgccaacaatatgctggtgccatccaacgacaaagaaggcaagtgatcggtggcaaatgatcagaccaatgaatgaatgtgcttttccccacttaagggtggtgccgcaacaaaaagtacatacaaatagtcaaaaaaggtgccattgcaatgccaatttaaatattgccatcaaattcgccatcgttcccttaggctatcggtgtttggtgtgcaacaaagtgtacggtcgctacaactcggtcagttaccacgtgaccatttaccatcggaacccgcccatccgttgcgaggaggagggatgtcagttcaccaccaggcaagccaagcccagcggaatactgccaaaagagtgtctttccgtttagagaagcgcggtacattcactttcacaaatattaccgtcaccaaatcgcactgccggaatccatcgacttgggcaagtttaacaaccaatgggagacggacgaacaaattttaagacagaataggaaaaggggtcaaaattaagtgaacaaaacccaaaaagaatcgaatagagcgggcgaactctgttcaaagacattatatgtacatataccgtattacttaaattttttccaatttacatttcgggcgggaggggggggggcaattggatggcactccgttttgatatgttcgtcaattggtagaatattttgccaatttctgatttgaattgactcctccttctgctgttcagcttctcgcaaatgccctctgttaggctgtaaacacgtgtccaaaagcccggccatgttggacaaacacatccaccgacacgtggccgactgtttgaaggacggcgcgctttatgtgtgcacaatgccagcaaaaggaggcgaatcggaggcggaagtgcaggcggatgaggagcaggaacagtgccaattcagagcgaattcgcacgaagtgagaagcaaaaagggaaagggggggggcaaagggacaacaactaatgagtgatcggaaaaatgatcaggtagggggg

SEQ ID NO: 45750 - DNA, 807 bp, Heterodera glycines
atggagccccccagcgtggcgagcagcgactaccgaagcgccatttcctctcgcccgtacttctcccgccctcggccgttgtcgcccactcgctactcatccgacgggggtggcactcgtgtgctgaagatggtcagcgagtcgtcctccatcagcagtcgccccttgtcgccttatcccgcgtccaccacagccaccgcaattcgggatgcgcgagagcgagaaaagaaggaaatgagcgaactgaacgatcggttggccacttacatagagaaggtgagtgggtaattaagataattaacaggccaattaggtatcaatcggttggttttaggtacgttttctggaggcacaaaaccgaaaattggcaacggatttggactttttgaacaaacgatggggaaaagacacgtccaatgtgcgcgaaatgtacgagacggacttaagacaagcaaaaaaactgttggaagagacacaacgccaaaaagacgaattggaaaagaaagcgaaagcgatggaggaggaaatggacacactgaagaagaagtgggccattagagatgagcaaatgatacatgcattaatgctaattataaaaaatgttaaaggaatgccaacgcagtgacagcgcacgaaggggacaaaaaactgatggaagaacttttgcagagtctttcctcgttggaagccgaattggcaatgcttaagcgacggctggaaattttggacgaagaccttaaagcattgagacgggaaaaccaacatttgaatggcgaaatgcaaaaagcccggaccgatttggaccag

SEQ ID NO: 45751 - DNA, 1210 bp, Heterodera glycines
ctccaaatttgtgccctcctcagtttcgttgcgtccccccgtccgatttgccggcatttccctcccttttggcattgcggagcgtccgaagccggccaaaattcagttgccgcccccgggcaacgaaaaaggccattggcactacgagcgcgaatattcgcgagacactcgctacacaaaaccgcttcgagggggagccttcaatttgatagggtaaaatgcaatcaatgtccatttgcactattaatgttacttgattttttaatgaattctgacctaaaaattgtgaattgttagatctgataagaaattttgcacaaaatttttcgtgaccaaaacaataaattcatttgtaaaataatttctttaaaactaatttaattaaagctattttctcgatgggattgtctcttcctcttaatcaattcacttccacttgaattcccccgtagcattctcctcgagcccatcaaacacaaagaattgtatccgatgttcgcgctgcccattttcgccgtcactttgggctccgttgtcctcctcatcagcgccttcaaaatcgaagtttggctcgaccgaaccggcaaaaattcgtacacgcccccgtgggattgggcacgcgttcgcgacaaatattggaagctgcctacacaaatgtggacatttaaccatttttattttaacacttttctagactttggactttcgagagcagaaagacatgggaaatgcccagcggcacttccgtgctcaaagtttcttgacactattgaccagggcttaactaaaaaagcttcttgccctttaagatttgttaggccaattatcgcttgtcaaaattgtcaggttccaattagtgtttttttgttcgctaccacagtgataaatacccaaaataattccccttcagttttatcaatgccaaattctggccaattgccattcttttgtcttgtgtattagtttgagttcctttaccgtcattggattctgttggggttcccccgccgggcatggaaattgccaaatcgatcggtagggctaaaaatgatgaacattttgcccttcccttaacccatttgaagggttactttgcctctcaaatttgctaattaggtatgacccgaccggtgtgacgcacgaacgccttttggtaatggaacagttggaggacgagttggtggaggcggcgcagaagcgcggcacccgc

SEQ ID NO: 45752 - DNA, 406 bp, Heterodera glycines
atgaagcggattgagcgaggccctgtccgcggcatttccatcaaattgcaggaggaggagcgggaacgtcgggacaattacatgccggaaatttcctaccttgacgcacagaatcaccagacgatcagcacagaccaagagacgaaggacatgatcgagtatttggtcagttaatgagaaaatgcgtgcgatattctacgggatttttctttttttgaaattgagaaaacaaacctactaattaacattaacaatgaagggattcgaaaggacattccttcttttgtcatattaatttgcaattttttgtttctaacctatgcatagtgcattttcatattttcagggacttggtctcaacttggaggtgaaggggcctgtgccgactggcgcaggacgtcgttga

SEQ ID NO: 45753 - DNA, 916 bp, Heterodera glycines
atgtccggacgaggaaagggaggcaaaggactcgggaagggaggcgcaaagcgccaccgaaaagtgagtgggcggaattaggactaattttgtgattttaattaataatttttttaatattgctttgtttaggcgtgtttttcaaggtctaattggtctccccattttctcaggtgctccgtgacaacatccagggcatcaccaagccggccatccgccgtttggctcgtcgtgggggcgtcaagcgcatttccggcctgatctacgaggagactcgctcagtgctgaaggtgttcttggagaatgtcatccgtgacgcggtgaatatcttttttttgttagggattggtccaattaggtgtctgagtgtggttgaatcccggaaattctatgaaatgctttttgtgactaaatttctcgaaaaatagggatgggatggagcaaaccctaacttaagtacatattttaccaatttttcttttcttaggttacttactgcgagcacgcgaagcggaagacagtcactgcgatggatgtcgtttacgcgctgaaacgtcagggccgaactttgtacggttttggtggctgagcagaacggtgacggaagagaacttcaaccaaaaaacaatcccaaacggccctctttagggccacaaacatccaaatggacgcaaatgatattttgaaaatctttttcaatggtttttgctgatgactatatttactcctgtttttgtgtatgaatattcggtttataaaattgattttttaacacgagggctaaatgcggtgcaaacgacaaaaaaggcctgcgatgcgacaggcgtcagttgttagtgttgtttttgttactctctcccatttgtctgctgccacagtccgacatgtgagcaaagcgccccgaggggttaataaa

SEQ ID NO: 45754 - DNA, 784 bp, Heterodera glycines
atggggccttatatttctgatgataattctgaaatacaacaaccgctcaccatggacatggcacttgcggagccaccaaaacatttgacagatgttgaagagatgctaatcgaacagcgaggagttagggaggttaagttcgtttgttgtctaattgtaagaaaatgaatactgccgaccttttaagttgccctttcccggcatggataagagtggacgcggtgtctgccttaaaaacgaagtcaaagcgtgcatgtttggcgcattatgtcctctccgacacatcatcaaggacaaacaagttgtgtgcaagcattggttacgcggactttgcaaaaaaggcgaccaatgcgaatttctccacgaatacgatctgagtcgaatgcccgaatgcttttttttctcaaaatactgtttgtttattctcagcgaaaattatcggatagtttcattttagtggcttgcagcaacagggaatgcccatttagacacattgacccggagagcaaaatcaaggattgtccatggtacgaccgcggtttttgcagacatggtatgatttcggttccgctacatctttttagcacttattttttaggaccgttttgcaaaaacaggcatcgtcgacgtgttctatgccaattctacttgcttggcttttgcaccgatggcccagtctgcaaattctcacatccgtccttcaatttgccaatgccagaacctgctcccaagttgaattttcgtccaaactatgcggtcacttgtcataattgccacgaaagag

SEQ ID NO: 45755 - DNA, 1231 bp, Heterodera glycines
tctctttcgtagggcgtttttacgtgtcctacgcgcaacctcagcagaaagtgcaaagtgaggaaaatgcttggaactcattcatttggccatgatttccacaattagcatataaacgggagaagccgcatttgaacgtcggtacaattggccacgtcgaccatgggaagacgacacttagtgcggccattacgaaaggtggcgcatttgctgaccaattccaatcaatgttttgaatttgagaattgtactttgttttagtaatttgttcgttccttaacattcaccgttttaagtgctctcacggcagaaaaaagcgcgctttgtcagttacgaggacatcgacaagggcgcggaggaaagggcacgcggagtcaccataaacatagcgcacattgaatacggtcagtgggagtcatgggaaacgtacaaaaggcgaatgtcgtgatacccttgcccaatggggcgtaaataatctgacgatgagacaacgaaatactgaattttggccacaaaaacgaagtgccaaacttttgcatgtattttgtgccgtttcttttttgtacgattgctatttttgcctgatcaattgcgccgatcactcccacattttgtttctgttaatgccatcttttcactgtttccagaatccgacaatcgtcattatgcgcacacggactgtcccgggcacatcgatttcatgtaatgttcatagttttaaacataatacggaacttatacagaaagaatatgatcaccggcactgcccaaatggactccgccgttttggtcatcgcagcggacgacggagtgatgccgcagacgcgggaacatttactgttggccaaacaaatcggactgcgcgagatcatcgtgttcgtcaacaaaaccgacttggtggacacggatgtaatggaattagttgaagttagtgtgggcaaaagtgtaaatgcaattgcgataagcgaatgcctttgacagatcgaagctcgcgaactgctcaccgcctacggcttcgatggtctttgattttgcgataatatttatttttcatgacagtttaaattcttttgtattatttattttttaggagagaatgccaaaattgtgtttggttctgcccttcgggcactcgctgatgacgacgacaagtgcattttggagttgatcaatgcgctggacggactggaggagcccgtgcgtacagaggtactgcttggacttcgcatgc

SEQ ID NO: 45756 - DNA, 1317 bp, Heterodera glycines
atggcaacgaattcggcatttgaacggttggatgattacatttggggtcgcgctgacgagggcgaatttctgcggggagtggtcgcagatgagcgattagacaccgagaaactgttgtcgcgagtgcaaaacattcaacgggaaatgaactcgcgtcttcgccaaggggtgaaaaaaatagaaaaatcattgaaggaaatgccaatttcaggtggaagagaattacccaagtctattggagcaggtcagcaccatcgaacagttggacagtgcccattcgcacgtccaacgcgaaatggacgcggtggtgaggcgggccgacgcattggccaaaacgatggaggaacaggtcaacaacggagaagcggcaattgggtgggaggaggggagcggagagaagggagggattggtgctatgacatcactcaaaaactaatcaaaatagaaatcccttaaatcttcaaacccaaacatttttgtttttatgcacaggtgggtaaaatccgtaaggatgtgcgtgcaatcgcttctctgacccaactgagtcggatgcaaggcgatgcgatcaggtcaagaaatttttaaaaagatgtgattaatttgtttgatttaaaatgtgggattttaaggtgcgaagaattggtggacgcatggcgcgcggagacggatttgatcagacggacggaacacatcacagaagtgaacgcaattgtgaaggccaacgacaaactcagacatgtgcggtggcattccattgcatttaattgcccaaaaaaccctcagaaaagccgaaataatgggtgcaccccaaaatttcgccgccgaaattttgtcccgtccccgaaataattgctcattgtcacatattttatgtacattttcagttgaaatggctccagtaccgttgtctgttcagtctttccgagatgaactcgcgcactcgtcaggatttggtcgttcagttgcgttccgcgctccgttcgctgaacgcgagcggagtgagtgccgttgtgaaggcattgcaacaacttttgggtgagtcgcgagcgcaatttggcgacattttactttattagtaaacgaattgaatgaatttgtaccattttgtgcgttgtttcaaacaaaaaacttttcgccagacggtgtccacgcgtgtcagaaggaactgaatgctgtgatggacgagtccgtctcggagttggacgcgctgttccttcagttggacgctcactcggcaccggagaagacagccaaactgttgccgcagttgggcaacaaattgcacacgcaattggaacagtttcaattgttgggtga

SEQ ID NO: 45757 - DNA, 935 bp, Heterodera glycines
atggatgggttggcgctggacattgcgagaaagttggaggtgaagcctgcccgttatgcagtaaggaagacaatgatgaaatcaatgtttatcagtcagggccgttatgagtttacatccaatctgttcatggaccaaatcccccgtcgtgtgacaatgggtctggtggccaatgctgactatgttgggacaattaggcgcagcccgttcaactttcaaccatttaatgtgcgcgaaatttccattgttgctaatggacgatcgtacgcccaagcgccctatgacctggattacccaagtaggaaatatgttcgcccgttcaatgacatgaacgaagcggttgggttcgctatctcatcggagagcaacgggataacttttgcccaatacggtaaaacacattgcatttacgttttcaatttgaccaatagcggggacgatcaggcggcattgtttgatctgataaagaatgggaccacagcggtgagcataaaatttaatcacccagtgcccgacggaggaataatgcttgttgtgatgggagaatgtgactcactggtgatgctggacaaaaaccgatcaataagcacagacaccactatttaaagtccgcttgtcatatcattttgttccataaaataaataaaatgttctctaaaaaattgggtcttattttattcttgctccgagtttctcttcccattgtttcatcatcatcatcatcatcattgcgagaacaacataccgaaaacatatactctgattatctaaaaaatttgactctatctcgacatcaacacgagccagattattcatactcggaatatttaagaagattgtctttattcaaacgtaccactgccattgtcagtacaacacctgcaccattaacaaatagctcaccaaaaagcgacaaattaattgatgaacgcggg

SEQ ID NO: 45758 - DNA, 1664 bp, Heterodera glycines
  unsure (1)..(1664): unsure at all n locations
gaatttgcggcccaacctgccgaaaaaactcccagtgttgatcctcaccattataagcctagtcagagttcctgctacgatgaacgtactcagccccagcggtgtgtgcctgactttattaacgttgccttcaatttggaagtcgaggttggacttcgccacttttaaaattgtcgacttcgattgtgcttgatttgccagtattttctttaggttaccaatacttgcggagtccgccagccaactcgtttttgtgtacagactggacacatcggaaagggccaaacgtcgaaagtgtgtgatgtatgcgatgcgcgcgtgccggtcagttttctaatttggcgcataccttacaacttttaaggcttttgctcacccggcttcgtacctgaccgatttcaacatcaaagacaatgaaacatggtaattgaaactcgcttattatacgctaatgcaccttttcttcaggtggcaatctgaaacaatggcggtctgttttaggggtgatatgggcatgaagtttaattttaggaaggtattcaatatccacagacagtcaatctcacattgcacatgcacaaacgttacgatattacgtatattcggttgaaatttgccagtcctcgtcctgagagtttcgtcgtttacaaaaagaacagagccgaagacgactggattccctggcaatattataggtggttttgaccagtttgcgttttagcatttcaattgttccgtttattgctctttagcgggtcctgccgttccactttcaaattgcaagacaaagcgccgattctgccgggaaatgaagcggttgcgcaatgcacacgtgagttctctgacatttctccactgactggaggcgatattgccttctccacgctcgacggacgcccttctgctgagaattttgaggagagcgaagtgctccaggcaatgcctttgatttttattgtcctttttgggttggttatttcctgtccaaacgttctcaacttcgaccccgacactcaaattttttttgcacaattttcttatatattaaaatcttcaaatttttcccggcaccgccggacccccattttaccttacttagttttgaaaaacgtcttcggattccctccgaaatatttttgacaacggccttgtcggagtctgggtcataaatgtcagggtcgagccctatcaaaaaataattcacgtatttaccatcccttaggaatgggtggctgcagaacaaatacgcatttcattggttcgaatgaacacatttggtgacgaaatattcggagacagtcgtgtgcttcgctcgtattattacggaatttccgactttgcggttggcggacgatgcaaatgcaatggtcacgccaaccaatgcgtgaagtccacaggacggggagaggtttagggatgggatggtaggacaaagaagggaaagacaatgcgtgtgccatcaaggaacaattggtgtgcgactgtcagcacaacaccgccggcgtggactgtcagcagtgcgcccccttcttcgtggatagaccgtggcgacccgccacctccatggaagccaacgaatgcctccgtcggtttgggttgagaattctgacggcaaatttgattcatttgtttttccgntttcattctgcacccacttctgtgct

SEQ ID NO: 45759 - DNA, 331 bp, Heterodera glycines
aacaccaacgccgttttcatcccaacgacaaaacagcaccacatggaggcgagttgcagcacttgtgttctcattcatttaattcaaaatccgaatttaatcattcgaatattgtgtatacaggatttgctattttgatatataaattacgtttcaggaataactgcatttcctggcgaaggtggcaaagtgctaggcttacgtaacaaacggctgttacgcgaatacaggcaaaatttaaaaaaatatattcaaaaaattgacattaaaacattttttgttataggcctaagaagcattggtacgaatttgaggatgttgtgtttgatta

SEQ ID NO: 45760 - DNA, 1033 bp, Heterodera glycines
atgcagccgacgctcgtcagaatccacccgccggccgtcatcgtgggcgacatccatggacaattcgcggacctgaagaagatcttctcaacgcatggcctgccgccggagcagcagtacgtcttcctgggcgactacgtcgacagagggccccaatcgatggagacgatcatcctcctcttctgctacaaggtgtggtttttgcgggatggggggagggaacccccaaaaaatgaaattcatttccccccatttttcaggtgaagtacccgtccaacttcatgctgctgcgcgggaaccacgagtgcgccaacatcaacagagtgtaagtgaaaaagttttttgtgtgtttttttgtgattaatcattcccccccccatttttaggtatggcttctacgatgagatcgaccgccgttacccgcgaccgggcgctcgtcgactcttcgacctcttcaatcaagtcttcgcctggatgccattcgtcggactggtcggcgagaagatcctctgtaagttttgggggagggcaatttttggggttcaataactgttttccaactgactttcaggcatgcacggtggcatctccaatcagatccgcagcctggaccagctcagcaacttgcttcgcccgcagaccgagccactgcttcgttcgctggaaattgacctcctctgggccgacccgtcgacgagcatcacaggcgtcgccccgaacaacagaggagccggcgtcatgttcggcgcggacgtggtcgagagcgtgcgcaacctgctcggcatcgactacatcgttcgagcgcatcaagtgagtttatttttttttttggcttttcatttcacttttgctttaataattttccccttcccttctttttcagctcgtcatggacggcgtggaatacttcgcgaatcgccacctgatcaccctgttctcggccccccgctacaccggcaagaacaacacgggcgccacgctgctgatcgcgccggacctgagccacacaatcacgcgcttcccgcctgcctga

SEQ ID NO: 45761 - DNA, 1471 bp, Heterodera glycines
atggaagaactcgtggcgctctcccctggaatccgcgtcggccgctggacgatcacaaagaagctgggcgccggagcattcggagccgtctacctgtgcgtgaacgaccaaggagagcaggccgcgctgaagacggagccggtcaacacgccacatccgctgctcgtcatggaggtaggcgggggaggaagggcggaaaattggcaattcaattttaaaatttttttcaccacccaggctcacgtgatgaccaagctggacacccttcgagacggagacgggaagcacttctgccgctgcttggacctcgggcgcgatgagcaaaaggaccaacaatcgggacaaatgaagaagttcaactacatcgtcatgtcactcgtcggtcgtggcctggacggagtcgtcaaggatgccggcggccgcctcagccttggaagcgcagtcggcgtctcgatccagatgctcgccgctctcagaggactccacaccgtcggctacctccaccgcgacatcaagccgggcaacgcaaccatcggacgtccggaatcaaacgaaatccgcctgctctacctgatcgacttcggaatggcgcgcaaatacaccagggacgacgtgagtttgagtgaagcgctttgaaaaaacaaaaatgatttgttccctttcccccctttttcaggggagccatcaccgcccgcgcactgccaccaacttccgcggaagcccccgttacgctgcgatcagcgctcatctcggacgcgaatacagccgcaaggacgacatcgaatcgtggttctactgcatgatcgagctcttcaaaggcgcacttccatgggccagcgtggtgggcatgaacgaggtgagcaaatgggggagggagggataatcagaattctgatttcattgttttttcagatcggcgaggcaaaggtcaaacgccagaagaaacaaccggaagccgttcgacgccaggcaatcgccgacttgctctccggatgcccgaacgagttcggccaggtcctcaaatacatcgtgagttcgttcgttcgttttttccaaaattagtaaactaacaaattaaattttgcaggacgacatgaagtacaccgacaagcccgactacgactggatcatcgcgacattgcgcagcagcctcagcaacgccggcgtccaggaattcccctacgactgggagacgggcaagcgcaacgcggcaccgggcggcggaggcggcggaggaggagggggaggagacagctacttcaactgatgagccgtgcagcagcagcagcagaagaatcgccaagaagcgtcaccgtgcagaattgatcatatgaccactattactgtattgtatgtattattttgtgtccatgctgccatccccgatatacacatgtattgtattgttgacacatgtattgattgaaattgttgttgcataactgtgtttgtacatatgacttttggcgaa

SEQ ID NO: 45762 - DNA, 1226 bp, Heterodera glycines; identical to SEQ ID NO: 23107

SEQ ID NO: 45763 - DNA, 1182 bp, Heterodera glycines
atccacccaatcaccagctatgtagaccttagcaaggtgtttgtgtgcacagagttcaagctcaaaaaagtggcagatgatggggttgtggttgatgtgccggcaaacgcagcggtcggccttatccaaatgcccggcgcaacgttcatccggaacctgaaagtgcacatcaaccagcgggaggtgtacgactcaaaccagctgtacagctacaaggtgttcctggacaccgagctcagctaccctgtaacggcaaaggattcatactttggcgtggcaggctatttccgtgacagtgacccgaccaaagtaaacgatcgaaggaaaaaggcggtggaggagagcaagggctttcaagcgataagcaagctgagcgccgacatattcaaccaggacttgtacatgatcagcaatgttgagattgatattgagctcgccctgcagtcggacgattttatgatacatcaggaagccgcaaatagggacaagtacacgcttgagattgtcgactgcaggctgatcgtgaagacggttgatctgatggacggtctcagccttgacattgcaaagaagttggacctggagcccgccagatacggcatccgaaaaacgctgatgaagtcgctgttcatcaccggagggagatacgatttttctgccaatctgttcaccgaggaagtgccacggagggtcatcattgggctggtgccaaaccaaaactacattgggcacaatcagaagaaccccttttacttcaaccaccacaacgtaagtgccgctttgacatgtatttctggcagaaaaaatgttcaggtgcgggatattgaactgaccgcctctggcaggacgtacccacagtttccgtacaacttggactacaagaacaacaggtacgcaagggcgtaccatgacacccaggagcaccttggcatggcctgtacaactgagagcaacgggatcagctacagcatgttcaagactgcctactgcctctatgtcttccaaatgaccaatgcgcaggaggactcgccgggctttgagctgatcaaggagggctgtacagcggtgaacattcggtttgccgaagcggttccgaacgagggggtcactttaatagcctatgccgaggctgacgggctcattctgattgaccggaacagatcaatcactagtgaccttaca

SEQ ID NO: 45764 - DNA, 2182 bp, Heterodera glycines
atgtccgactattttgaaggtgcaaaacctgcggacgaacagtgctttctgcacaactctcgtggcttggaatacgggcactgtgggagggacgtggagggacggtttgtggagtgtgcgcgggaaaacgcgcggtgcggcgttttgcactgtcgcgggggcggcgcgagtccgctggggacgaacgcgagctcattcaacttgcaatttgctaaggagcaacggcatttgcaatgcaagtgagccaaaaggcggggaggtagaggtaattaccactaattgcaatacaatagtgctatacccaaaggggaagatgactgctcaccatttggcaattgcttgacacacattggccttgcccacctcaaaaagccttttccccttagggtggttgtcaattcagccaacggaatggtcaaagatggcaccagctgcggttcgggtcgcatttgcgtacgttctgtttgtgtaccgttaacgcaagtgtcgccgccagtgccatgtccgagcagtaatttggcactttcttgcagtggtcacggggtatgaaatggacgggaactttttcgccgggttttgtggttccgtcttccttccccaatacggggcctgtactcccccggccttaggactgcaccaccggtgcgcattgcgtgtgttttgacggatggacaggtccctcctgcgccctgcgaattccgtctaccgtttacaataaaaagattggcttgacatccgctgaagacggcagagaatccatcgaatttgtggtgccgccatcaattcgaggtgtttttcaatggctccaaaaaccttcaaaatcccccccccccccggattcagtgaatggtcgtgcgttggacactgccacactgctcggcattctgttgctggtcggcttcctcctcctcttgctgctcatttgtctgctcctcttttacaggtaaaagggaaagaccgagcctggcccggtatctggtttttgccgggcccgtaagccggctcggcaatttttgaaaaaatccggtttgaccggggttttaagaagctggaaccggtcattttttaaaatgacagccgggcccggcagattcggaaatctcggtttataatattttcatggtttttaggcgcaaaagttcggtcagagcgtacggaagagaacagaacggacaggcgaaagtggcagatgaggaggactgtgggaaggacgaagggactgcggggagagcgatcaaatttggacaaatgccgagctatcgggaggagaaaatgaagcggaaagcgaacaaaagtgaggagcaaagcgcgacccttggaataatttggcacagagtgccaaaactgttgttaagcatttaccaattcagaaatatatggtgccttgcagagaattacggaagcgaatgaggtgagaagaagccaaggaagcaaaaaactcagaaattttcaagaaaaaatcttagaaaaatttaaaacagtaattcatcataaaatttaaaaaaaacgtgaaaatttaagattttgtcccatccccggaaaagggggaccttaccatcttccatcataggccgactcactttcactcaaatcgcgcgagtcctcctgcgccggtgccgttctctccgtggacggacgaattcagacagcaaacggacagagcattttggcggaggtgccgtctttgtccccgcaccaaccgatggaacgaaggttaaattcggcaccgccttccattgtgccgaatggagaaataggcacgggttgcagaagtcggccgatcagtgacgacgaaatggggaaaaatgccacagaaatggtcagaagaatgcttaacattgagtcgaacattggcaaatattaccgctctttccaggcacatttcggtgcttttgcccaccacttgagaatgaacaatacatccccttcgtttggccctctcccttctcattttgagggagttggcacttttgctgcaccgcctccccggttgccacacattcaaatgctaatgcgacgattggagggatctatgggcgaagaatttgacgtggatgaggagggacacatttcgtcgaggacaccgtcggtgggcggcaacattccatgccccgcggcatccaccgactcgggccatcctggcagcaactttgacgtgagcggaatggaaagggtcccctaa

SEQ ID NO: 45765 - DNA, 955 bp, Heterodera glycines
atgttcaaaacgtacgggccaaggcccgagtcgttcacgcttgacgatggggagcgttattatgtcggtaagtgtgtgtttgaagcggttttatgcgttcggtactctgtttcaattggtttacgagtgttaaattggtctgtgttcaggtgccgacgttggccaatacttgaaataccatcgtggtacgctgtacaaacgctatcctcaactgtggaagcgaatggcatcggtggaggagaagaagaagatccaggagttgggctgtgccacctcctacatcaactcgaacattatgctggtcaaagcgaacgaggtgatgatgatgcgaatttggtttcattttttgaagtgggaaatgaaaattgtatttttaaggaagccttttttaaaacaaatgcctttccaggtggaggacatttttgacgggcaagaggagaaatatcgcgcgtcggtcagcggcggcagtgcgtacggacgcgcggagggtgcgcaaacgctgcgaagtcggggcagtgctccgtggctgaaccagcaggtggcccaaaaaacaaatgtttgtcagggagaatgccaacgcttttttgcactgattttggaaaatctacgcattccaaaaaaaatacagactccttcaattaagcgtattcatatttgaaatcccagttttttttattattcatcccagggacggtcccagggtttttccttggaggtggtaccgccgcactaggcgacgaccttctttttttacttttaaatttgcatgaggaaggtcttggagggcgtaccaataaggaaaatcggaaagttttggtcagaagccgttttgttctttcttaggtgaccagcggttcccaccacctcgagtccgtgccctgctccaccccttcggcgcacgggcgaggccatttcaaaaatcgcgactaccccaaagtgtgatgagtacggcgaa

SEQ ID NO: 45766 - DNA, 1380 bp, Heterodera glycines
acacaattcgctacctgtccctgtacgacaacaaatacttgcgctattttggagggcacagcaaaaagtggggccgccatttaaatgccttttattcatatgtttgtttgttcgtccatctgttgttctccagggtggtcactctgtgcatgtctccgttggacgacctgttcctgtccggctccatggacaaaaccattaggctatgggacctgaagagctccaattgtcagggcctcatgcaactcgtgtcccgtcccatcgccgcatttggtcagttttttttttggacggtcggtgaggaatactttgtctcctaattttatttaaatttaaatgtaatttaaaaaagtttttaatgctttttgattttcgaatttttaaaaattctctaattaccttcgtcgaccattgtccacttccccgctgggtttttcttattacgaaaattggattatgtcttacaaattgtggttttacagatccggaaggtctgattttcggcgctggcattggcaacgacgtcatcaaattgtacgacttgcgctcttttgacaaagtgactaacaatggaataataaatatggggattttgaaatttaaatttgtaatttaatatttggaaatttccaggggcctttcaacacattcaaaatcaacgacaccggactgaattgcaattggacaggcatgaaattctcgcccgacggaaagtctattttgatcatgacggacggtggtatgctgcgacttgtggacgcctattacggcaatgtgacgcacacgctgtcccacgaaaacccaaaggtagcgagcggttcaaaaaatgaaaaataacgggagaatctgatcaaattatcattccctctcccccgtttcaaaattggaatattaaatcgaaaaagggactggatttttgcggtagtcacccgcctaactccccaaaaggcgtaaaattattgttttttcgaatttagatttttttaaatttcagttagactaaataccttctaaaaatactcctacttgcactcaagttttcgaaaaaaaattccaattccagtccatgaatttgaccaaaaataacaaatagaagaatgctatgaaaattttccccccctttctctcgaaaacagaatgtgaatttcgtggccactttttcgcccgacgccaaatacattttctgcggctcgagcaacgggaagatcatttgctggtcgacggtgggtgttttgtccgacacaaatttaattatttatttttgttttgaaggaatctggtcgaaaaatccgcgaaattcccacaagtcactccggcaacatcgagcaggtggcgttcaaccccaagtacttcatgttggcatccgcctgcacgcaattg

SEQ ID NO: 45767 - DNA, 692 bp, Heterodera glycines
atgatcgagaaatttgtcaatttctgcaagcagaaggattttctgcactgtgcaaattttgatgatgaggtcttcccattttcattagatattaaacaaacaaaaaattcacaatttatttcacattcagatatttatggtcacagaggatgagattgatgaagggcatgaggaagacgtcgaagttccaaaggcaatgggtgacatttttgaatcagtcgcgggcgccgtttacttggactgtggcatggacttggacattgtgtggagggtcttttacggactgatgcacgaagtaatagaaaagtgctgtaccaacccgccccagtcgcccgtcagggaactcttcgagcgcaaaaattgcaaagccaaatttgcgtaagcgcacatagcaatttacaattaattgtcctttcatttcagaaaattggaaaggaaattggagacgggcaaagttcgagtgacggtaaggacaaaaactgtttaaaacgggctgttctctataatggtctgggcacaaagctttaaatttccaggtaacggtcaatgacaatttgcaattcacgggaatgggcaggggctatcgcatcgccaaatgcacagcagcaaagagagcgcttcaacacttgcgcaagttggacgcggaaaaaatcaagaaagaagctgataagaatgttccgagcacaatttga

SEQ ID NO: 45768 - DNA, 2092 bp, Heterodera glycines
tttaggatgaaattcttaaagctgctattatgaaatatggcaaaaaccaatggagtcggatcgcttcattgcttcacagaaaatcggctaaacagtgcaaagcacgatggtacgaatggttggacccgcgaattaagaagacggaatggtcacgtgaagaggacgagaaactacttcatttggcaaagattatgccaacgcaatggcgaaccatcgcgccaattgtcggtcggacggcggcgcaatgtttggaaaggtaaaaaaaaggcctttcaaaacaaattaattatgccattaccattcatttatgaacagcttttgaaatactaaatattaagatatgagcatcttttggacgaggctcaacgacgtgccgaaggcattgacgaggctgataccatgaaagaagccaaaaagctgaagccgggagacgtggacccgactcccgagacgaagccggcccgtcccgacccaattgacatggacgaagacggttgtcttatcgtctcctaatttatgtgatttggctttgtctttaagagttggaaatgctttccgaagctcgcgctcgtctcgccaacacacagggaaagaaggcaaagcgcaaagcacgcgagaaacaattgggcgaagcgcgtcgattggcgtcactgcagaagagacgcgagttgcgcgctgcagggataatgataggctcgggatttgcgtacaaaatgcgaaggcatcgcctgttggattacaacgcggaagtgccttttgagaaggaagtgcccgcgggattccacgacccgggcgaagacaaattcgacaaacgccagcggacgatggtggaggacagacggagagactggcaggagagagacgaccgtcgcaaagacaaggacaaactgcgcaagagaaagtactgcttgacggggatagcattaatacaaacaaaaagccaaacggtcattgggtaggggaaagttccgtgaagaaaagccaaggcttcaagcccgtagccagaaaaaaaaaattcagaggtgagaatccggacttttttttattcttcgggccaaatttcagctccggagagcaaaaataaaaatttgtagtcgttttccgcaaaaaaagactattttttctattttggggtcaaaatttaaaaaaaaagtaaaatgtgggggtctggcggtgccgataagcgctgccgggaatttttttttaattttaatgtagtttaagaaaaaattttgtttagatttttaaggattgtcaatttttcctgaaaattttttatttttctgttagttgaaaaacccattaagacaagaagatgcaccacagtcaattttctccgaaaagcacgagaagaagcggagcaaattgctgttgccggagcctcaaatatctgacaaagaattggacgacataatcaaaattggacacgcctcggactccgtcagagaattggtagatgacaatccgaccaggttgtgttatcctttcagtggccatttcctctttatgcctttcttcagcacccttttgcacgattacaacgaatcttcgcgtgtcagtgccatttctgcgcgcacccaaagaacacccgcgggcgcaattgactcagtggcacgggtaaaagcacatcaaaagggatttggcaaatattggctaattgcaaggctgcggacgatttgctggcactgaccaatgtggagactccgctgaagggcggtctgaacacgccgctgcacactttggactttagcgcccccggaaccacgcgtcagccaatcgccacgccaaacaccgttttgtcatccgtcgcggcgacaccgaaaaacatcgaagaccgtaggcacttgcattttcgtcaaaaattctcaacagcgtttttgattagaaactccgggctctcagcgcagtttggactccgccgcaacccccgcccattcttcgaccgttgccgggacgcccttccgcgaccaattgaacatcaacccgagcgaagggcgcatgaacagaaaggaattgcaaaaacaattcgagactcttccaaaaccacgcaacgaattcgaattggcaccaattgccgaagacgaagaagaga

SEQ ID NO: 45769 - DNA, 2596 bp, Heterodera glycines
atgctttcattgtacacgatgctcgagttttccctgttggtgctgaacggcattgcaattataaaccgtgaacgagttctgaacaaggttaacaaacacattgttttttatccaatcgttttccccttattttaagtatttgaagaatcggcagcacagtttcggagcagaaagtgaacaatcggttgtattcaggctcgtcaatttaatttttgcagttcaaactgttcttagaggttccgtttaattaacttttttgctttattaaaagtttgactcttttagtgcctctcatcgtcatgaatattattgttatcatcataaagctgttgtttggatgaaaatatgccttggccataatcatatatttatttgcagtttattcgttcgttccttcggttgtcattaaattttttcttgttactgactgataatcttttccgaattttctatatgccaatgaaaaattgacttaatcattccaactattttttctcacatttgaatatgtaatttgcttttttcgtggtcatgtttgtcagtattggtgctgcgctgtcttcgagtcgtttttttcgatgttcaacagttgcgaaagcattgtcttgcagaagatcatcccattttaccttttaccccacagcaaacacggaatttccaaacgacaccggaaaaggtcataagatttgctcgaattttgaaatgtcaaaacattgtaccccccgcccccccatcgttcctctttttaaaaaaaattgacgtttatattgctaaacaacgaaataaatttaagttactgaacgtctcaatttgtgccagtcgatcaacaaagctatgcacatcgcaatggaagaggacaagaacacaatatgttttggcgaagacgtggctttcggcggtgttttcaggtgttccgttggtcttcaacaaaaatttggtaacaattttctgggtcgattgtttatgcgaatttaacctgctgaatcatttagatacttattgtttaaatgttacaggcagagaacgtgtgttcaacacgcctctctgcgagcagggcattgtcggttttggcattggctacgcggttgccggacatcgggcgatcgccgagatacaatttgccgactacattttccccgcatttgatcaggttccatgcaggcaaatgtgatttctgggtcattaaattcaattttgtattccagaattttgatacattttaattcgagatatttgactataaaatgtccgttcccacagattgtgaacgaagcggccaaatttcgctaccgaagcggcaatcaatgggcatgcggaggactgacaattcgtgccacttggggcgctgttggtcatggtgccctttatcattcgcagagccccgaggcatactttggccacacgcccggactgaaggtgagatgtcacttattgttaacctcagtgttttgataccacgaaaccatttttggcataggcgcaaatgagtgaacacggaaaaaataaattaattttttatccgtttctttatttctcgaacaccgccaatttccattaattgggtgcttccgtaaatgtccaagtgaagtgcacattatttaaattggcaaaaaaagagaaaagcgtttgcacttaggtgcgaagtgccatttggcatcatttggtgccaatgtttaaaagctttgcatcagtacaactcacgcacatttatcataatgtttcaccaacttcaacctatgattttcatgataaaaattgactaaacgactcgaaattctttaggttgtcataccccggggtccaatccaagccaagggtttgcttctgtcgtgcatcgaatctcccgacccgtgcattttctttgaacctaaaattctctacaggcaagaattatgcaaaaaaaaagttattcattactggaaattttacagaaatgccgttgaagaagtgccgatcgacaaatatttgctgccgcttggcaaggctgaggttgtcaaactgggtcagtgcattttaagtacaattagacgtaaattacgaggcaaataatccttaatttagggactgacgtcactttggttgggtggggcactcaattgcatgtactgcttgaaaccgcagaattggcacaacaacggttgggcgtttcgtgtgaagtcatcgatttgcaaacaattttgccgtgggatgtggaaacggtggccgaagtgcgaaaggacaaatctctagaaacagtcaaattatagtcctagtttcagttaaaaataatttcgactcaattaaattaaacgctcttcacagatggatcaattttaggatttgccttttcaagaaaattttccgagattttcccgcttttgcttttcagagtgtggctaagtgtggacgactgttggtttcgcatgaagcgccgatcacttccggcttcgcggccgaaatcgcgtccaccattcagcagcgctgcttcctcagcctcgaggcacccattgcgcgcgtctgcggctgggacacgcccttcccacacgtgtacgagcccttctatctgccctcaaaatggcgatgtctggaggcaatccgcggattgatcgattactga

SEQ ID NO: 45770 - DNA, 4330 bp, Heterodera glycines
atggcgacaacaacagcagcagaaatccccagaaaatcaccacaacaacggaagcgcgaagaaatggcgcagcttctagagtcacgaaaagtgggctaaatgtgaacgaagctgatggtttacatgatccatgtttaggtggatcaaggtgctaccttcgtcgagccaagaaaaccttcaggaacagccggacaaaaggggaggatgaaactcatcacaaacgtttgtcttttctgtagtgttcaaaagagccaatactgtgattttaggcacacattctcaaactactgggtacgcaagccatctaccactacgaggtgaccatcaacgcagtgagcagtcgttcggaccggaagttttgcgtttcagagccgagcggtccacgggatagggacgagtaagtatgacgttgatgttaggtctaacatcttctgtttagtttcccattactcaaccgtcgtgacaaatgccgtgaggtcttctcggcattctacaggaccatggaacagtcactgaaagataccgggaacttactctactacgatttatcgaaaacaatattcacattgaagaagctacagatcgaggtttatgggctttggatggcattttaataataacacatcgtttagtcggaaggaaaattcatgtttaacatcggcacggtgccaaccgctgaacgcccagacgcggcacggttcaaacattatgaattcatcatcaggccagcgactggcttcgaggttaacgacttgtccttcatcacgaacgacgtgtcgaaaatggaacgatcacttgagcaattccttgacattgcaacggcgcagaaggccaacatggacgggtatggatttaatcgaaaacaataaatatataattttaatatacctaatcatttgaattggactgctgtcagtggatttgggaaattcagagttatagaacaaaaccaaatttcccgacagaaattttgaagtcatgaattcagggccaaattttaaatatttgattcacctaactgttaagaactcaaaagtctattttcaggaagcaatttatcgggtttacttcgtctcgtgtttacttattggcgccaaccgactatggcttcggagccaacgagtgtcctgtcttcgattccaaccactcattcttaggtgtcggagtgaacaagggatgtcgaattgttgaaggtttgttcgttttcgttcaattaactcattagaaaatcaggagatcaaggccctggccaaatgacaccagccatcgtcatccaaacgaaaaaggtttatttttatgggttccatcagtcgtcccataattattttttaccatgttccattcattgtccttagtccgctttccacattccggacatgtgcattttggacaaggcaaaaacgctccttttccgagagaatcagggaaggttcgagacaggtgactttactcaaagtgactacgaggcgctttgcaatggccttgtcggtatgttaatataatgcgtttgaaacgaattgttttatacccattctctaggaatttatgctgaaccgcgctatggaacgtcgggacgatttttccgcatcagtgacattacaaaaccaaacactggaaatggtcttaactcggagaacacatacatcacacaccaagtcagcgggaaaatcagcgtcaaacaatatttcgaggatacctatcagaaaacgcttcagtgagtttatccaattcgattgttttcttaaaagaaacattttagtaattatttctccatttcaggtaccctaaagcaccactcctcgtcaattatcgcagaattggggacccggcgtattatcccatggaggtaaaacggacagcaatttattgtccctttttaaatttaattaaaacacttaggtttgctttgttttggatggtcaacgcgtcaaaagttctcaacaaaatcccgagcaaattcgtgtaggtgtttagcgatttaatttataatcatcattctattccaacattaacaatatgtgtttaggaaatgatcaaagagactgccattccgcccaccgttttgcgagtgcacaacgaaagggtgaaggagtcgcttcagttggtcaacaacgaatacttgacaaaagcgtccgttcactttgacacaacgccactccatgtcgattaccgtgttcttggtccgccagcaactctctatcggaacaaccatcgtgtcactcctgccgcgtcaaactgtgaatggcgtccgggtgacgctttggtgaatgcgcaaattggcaactgggtagcctatgcgtttgggaaccctgcgggtgactcggtgcgacgattaggcttaaccgaaacgatgtggaggtaattagcgctgaaattcctgattggttttaatgtaccaaaaaaatttatagtaatatctgtcaactttaaacaggaatttcgtggacaagtatgcaggtgaaatgcgtaacaagggcattgtttgtgtgcctccggtgcgtgtctctttttgctggtttacgtccgtgaacgaggtcttgaatgttttgcacaaggaagccctgaacggcgttgagttctgtctcattggtcatgcgaaaggctttgagggtgatgacgtgcatggtaccatttattagccgttgtaaaatttaggctcctgattgtgagttatttatttagttacgatcaaggcgtttgaacaacagactgaaattgtcactcaagcaatcacatttgacgttctcaaggatgtgctcgataaaggcagcccattgactgttgcgaattgcattcacaaaacgaacgtgaaaatgggcggtctaaattatgctcttcatatggatgatccatcgtacgtctttttttcctttttccatatagccaatacaattggtttcagtgtggcccaattgttcgacggtcaaacactgtttcttggttttgcaatgaacttcccgggtggattcgctccttccgaatctgctgcccctatcaacggtgcgaacggttctgtgccttcaggaagtaaagctggaccaactctgcagaatggtgctaacggcgtcgccgctactggagcaaacaccattcctctcggctcaaatggaaatgtggttccgagtgcgcccgtgccacgagttggctcctcattgcctcctccttcgtgcattggggtaatacaaaaaggagaagagctcattaatcaattttaaaggtgtaagtcaatttctaaaattccagtgggccgcgacaatcggaaaacgacacaaggacgaatacattggtgactttgtctaccaggctccgcgacgtgaggagaaaattgatgtcattgcaagcgttgtcaggagatgcattgagtccttcaaaaagaacaggaacaaactaccgtaagttttggacaatttgcaatttatttgttcgcaatgattgctcagactacgcgtggtcattttgcgcaacggatgtaccgagggacaattcgaatatgtcatgaagtaatttttcaaattgatgaaattatttgaaaatgaaaatttctattaaaatagtgacactctggctcttcgaaaataaataatgtgccctactttaagatatgaaattccgctggtcaagaaggaactggaggaattgggttgcaccgcaaaacttactgtgattgttccaaaccgacttcaggtgcactttcccacacatcaaaacggcaccgcctcatgtaatttaacgtttttatttatttcaggatgtacgctttctgcgtcaagatgccaagccggaggacaagagcaatgagcaaaacatccccccagggactgttgtcgacactggtgaatattttactaatttattgccctaacgagttacaattttcagtcgttgttcaccccaaacgctccgagttcttccttaacagtcacgtggcgatcaagggcactgcttgtacgccacattacactgttctgcgggacgagaacgatatgtcgatggacacacttcaaacaatggtccattacctctgctttgggcatcaaattgtcacaaagccgacctcattgccctcgccggtgtacatcgccgatgaatatgtgagccaattcaaataacaataagaaaacatagacagagaatcgaaatcatttaggcgaaacgcggtcgaaacatctactcacactacgccaagaacggtattgacaacagcaaaaatttgcagctcttcgcaaagaacaaaggggtggaatggccgctgcgcacttatgcggacatgaccaaagtcctttctttcctcaacaccacctacctgagggagctgcgcatcaacgcctga

SEQ ID NO: 45771 - DNA, 2138 bp, Heterodera glycines
atgtcatccagctcgaaagctttcattggtaagccggcgccaaatttcatggcggacgccgttgtgaacggcgactttcaaacccaatttcgctggaacagttcaaagggcaatatgtggtgctgttcttctacccactcgatttgtacggggcaacagcgttggatgataatatgctcaatgttgccaagtttttaaatgggcacaaaggctccgaaatctgaaattttaccctaatcccataaattcgcccagacgaacgtcctttttttttgccggtagcgctttatttttgccttattttttcaaaaaaagattgtaggcgacagggaaaaaacgcaattttttgcggttttgagtcctttttttaaaaaaaaaatttgtcagaaattttgaaatcagtacaaatcttagagaaataagcctacttggcaacagtgcatttgatggattcactcttttactataatttctcccatttagcactttcgtttgcccaaccgaaataattgccttttcggacaaggcgggagagttcaaaaagatcggtgtccaactcatcgcgtgttctaccgactctaaattttggtatgtatgggcatggacaatcattggacccgtttccgaaacggattcccggggtccattcccgacccaaacttcccggcatgtggaccggaactaacgggattaaatttacactgatatacccaatgcagggagggagtgtggtttttgggagtttgctcgagttcgattccttccctggaaattgttaggaaacggataaatttttaaaattttgcacgaatttttcactaaatcttcccatatccattcagccatcttgaatggatcaacaagccgcgaaagcagggaggacttggcgagatgaacatcccggtgctggcggacaccagccacaaaatcagccgtgactacggcgtgctgatggaggaggcgggcattgcttatcggtctgtgctgctcgactaattcaatgcttttaacggcaatctcgtttcgaaaatattcattttttaacgggagggggggggggccggatggtataagaattttccataaattttttcaaatatttatcaaaacgggcccccttcctccctccccttttcataaaattttttagggtaaagagtagtaaccctaacgcaactttcaaattttgcgggattgaaattcaattttttttttccggtttggatttgcgggatcaacccgaaattttcaacagatgcggtattacggattattaacattccgtaaactccggcccgggggatccgatccataacatattattatagtcatctgaacaaacgcgagactaaagttttatcaattgactctgtttttttttaaatatccaattcggctccagtaggcattggaatgggcgtcaaatttgtgcgtgaatccatggaaaattctcaaaattgtttttccgcataaacacagagaaactctgacaatgagaggaggactggggtcgtctgtctcttcattaatttcctgccttttccagcggattgttcatcatcgatgacaagggcgttcttcgtcagatcaccatcaacgatttgcctgttggtcgctcggttgacgaggcaattgtttttgttttgtttttttaatttgaatgctcaaaaaagctattttctccattgttgctttcattaaaaaaaaattgggaaaaaaatttttttttgattccgaagagaaaaaaaggtcttcctccttcggacggacaggctcttcaatcactttttcttgtctaggactggttgtccaccaattataaaacgaggcattaatgaacggtttaccacaaccagggctaaaagcacgtgcatttttatcccaccgttctcttacgcaattccccccccccccccccctctaactgaagaaaagcgtttggtttcataataatttttgaaactaaaatttacacaaattctaaatcgcatcacgcattttcaagacgcttcgtctcgtgcaagcgttccaatacacggacaagcatggcgaggtgtgcccggccaactggcagcccggcaccgacaccattaagccggacccgaaagggctcgcaggcgtactttgacaagaagggc

SEQ ID NO: 45772 - DNA, 380 bp, Heterodera glycines
atggctgatgaagcacaatctccgcccaaagatggtggtggtaaaaacatgcaatggatgtacgagggtgccaaatcggtggtcaatcgggaggactatttgctgggcaaaaaggtccgtctgtcacacatttattcattcgacattttgcgtgtccaagttcatatgtggttcagatcgacaagaatttcgagatgttctctgatgttgttgtccatgaccaggaggaggagaagcgggatgcattcttccagcagagccttctcaagccgtccacttccgcccatactgctgctcctttcgtcgctcgtaatcagcacaaagtgtccgctttggacacgcgtgttgtacgaactgaagacccattggtggccctgaaa

SEQ ID NO: 45773 - DNA, 1942 bp, Heterodera glycines
acactgatcaatccgcctatgactccgatcactccgctgcatatcgaccacgaaccaagcggaccgcctttggcaacaattttgaagttcggatcctttctgacaattcgttggccaacattggcacgaaagcaatgccaaaattgaaagcgtttaatgaatgccgatttatggcattaatttttaaaaaatattctgcccattttcagcccggtggcatttgccaattgcgaaacatgcgcaaattgtacttaaacaaaaacggaattggccaactttcaccccaatttttcaactctttggccagcaggtgacaattggaattttatggtgatatatagtatctgagaatgcgattttgtgtatcgcaaaagataaaaaccgataattaccaaagttcaaaagggtaaagtttttaaattatgtatttaaaaaatattttaactccatttattgaatttattagcatttatttcgtaagacacgatggattttcccaaaaaaaaaaaaaatttctgtaggttgtttttaccgaaaatcactaaattatcagtatttcttccgttttttcaaaccgaagtgccaattcccttcaagggaagtgctgcaaaagttggaatttcgtggcaataaattgaccgatcagtcgctgaacgaaggcggcgcagcaggcgaaggcggccaacagcagggaatgttcggggcactgaaaaatttgcaggaattgagcctggagacgaacggactcagtgcggtgccgagcgtcgcactgagcgcacagcgcggaacactgaccaatctgaacttgggactgaatcaggtggtgatcagcagggaatagcgggcaaaagtaggcgtataaagcattgatcagagcagttgatcagaaagagaacgactgatcagaaaggcagcaactgatcagaacggaattagatcagctgatgataaaaagaataacttatcagggttagagcaactgatcagaaaaaaattagctgaccagaaagaaagtgagagggcaataggccagaaagagagcagaaagagaccagatcacatgagaaggcaagtgaacagacttagagaagctgattagaaagagagcgactgatcataaagaaaacaactgatcagaattagagggaaattgaccaaaaagagagtagaaagggaaaagtgatcagaaaagagaaacatccgatcaaagaggcaaggaattctgaatagaaaggatctgtcctcgaatgattcaaaattgaatgcctttcattcgttgtccatttgcagatcaaagaggtccccgtcggtgctctgaactttcccgagctcacttccctctccttggagttcaacggacttccgatgattgtgccgcacgcttttcagcacgtgccacgcctccaatacctttatttgacgggcaacaaattccccgcctggtcccccgacatgttccgcttcgtccccgacttgcgaacgctcggcatcggcgaaactccgatttcagtgattccggcaaacgcattcattgtctgtctgtttggccttattttgaaggatggtcattcattccagcacacgcccaatttgatgcggttggaaatgtccgaagtttgtcggcggaaggcctttcggcattttgtgcctttgcgacgaccgttcgttcacttttaggcggccgtcgattcaattgagccgggcgcctttcagcggactccgatgattcaggcgattgtgctaaacaaaaacagactgaccaggcaatggtcaatgagcattctcaatattcaacagctgttcagggtccgggccgacatattccagggactgggcgagttgtactcgttggacttgcagggcaaccgattggaggaggtggagccccgagggttcgccaatttggccgctcttcgccatttggacatcaggtcgggttttg

SEQ ID NO: 45774 - DNA, 6695 bp, Heterodera glycines
  unsure (1)..(6695): unsure at all n locations
atggaagatttttacattgtacttccctcgaacacacctggtccaggaaatactgcttcaaattttacggttagacttccgcacactttagagcttgactccaaatggtccgtcgcattatcggcattaatctatccatattcattcccgtcgatcagtgtggacgaggatgactctatctctgtcaaactggttaatcctaactacagagaagatgccggaaattctgacgaggaatcgcaaaagtttatcaatttatcagtgaagattccaaatgtacaattccaaagtgtacaaagtttacaaaaaacactgaatcagataatccagaatgcttacgatacaaagtttggcggctcatcatcattaaatgatggtacaaccaacaaaagagccaaacgacaaaccgaattgtcagaaacaggcgctggagttatcgaagtagagaatttcttcactcgaaacccctttgactactggcaacagattggagaactgagaaaaaagcactatcagctcagagaaagggttgaaaaaatggcaaaggagtacaattcaacagtggatggtgaacgaaaaacatttctctcaacggaacttggggtttttcaggggcgagaaacttttctgaaagaacgtttgcatttgattgaagaagaggcgaagagaagggacggtgagcagcaagaagccaatgaacaaagactcattgaccgtttctttgcccgataccccgacaattatagagagcagctggacgaatggaggtcaagttacctccgagatgtgctagatctacaaacaaagatgggagagtatgaaggagttaaagatttgaaaaggcttgaagagctcaattcgcaaaccgaacgaatgagaaattccatacacgtttttgaaagaaagatggaaatattaaacaacgcagcattgcaacgtgaccagaaaaggtctcaagaggagtttgaacggacaagccatgaacaaaacctgaccttcgtccaggaattcttccaaaccaatcccgtgaattattggcaagcaatccagaaaaattatgaagcgcttcagcttgagtacaccaagaagagggaattgagggaaaagcttgaatttgaaactgacgcaacggaaaggaagtcgctgcagcgacaaatagagagcattcaacgtctgattgactacaggcgtaaacggtttgccgctttggaatacgaggctaaaaaaagagatgcgcagacagggaaaactaactcaggcctcagtgctgtagctgaggggtcaaatagtactagttccaccncaccagactccttttcaccagcagatgagcccgcaaacccagacgaagaaaatgctaccaatagtaaaaacaaccacccaacaaaacatcactactactgccaccgctactttatcatccgagacgccagctgagcaaattttagcagatcaagataatagtattgatgagaaagacgaagcaggtacgccgccgccatcaagtggattaggacagtccgatgctgctgctacatcagtgactcaagttgaagatggtcgaaatttacctcaagcagccgcgttgacctccaataacccaaaaattgttgctaaacaatcaacggtagcgacagagagaaggaaggagaaaataattgaaaagctgatcgacgaacaagtggaccgaatggtcgatggaacacatgcacagcagaagatgctacaggaagaaggtaaagagaacgagagtcaacaccgcatttcaacatataaactcatcgaagaagtgctacatggtgagcatggacagctaatgtcgcaacagcgtgaatcgaaaatggcagctgaatttgcttacaatgaaataactcagcgattcggcattagaatgggcccaggagtaatgcacgttgatttgagcaaacagctgtcctatgtgttggggtttgatcgcaaaacacgcatttacaacaatcagtcggcaaaatatccacctgatctgtctggtggtgtccgtcagctgtacgtttacgcgcctaaactggtggaggattccatcataggtgaccgcatggcaccgttgctgcgagttgtcaacgtgtcagggacaccagggttggacatgccagaggttatatataccaatgaaatttttcattctctccaaaataaacgcatttctgaaattaacattgaaattcagacagcatttggacgttacgtaaaatttggttggggaactaccgtaatcacattacattttagacaaaaactattttagcaacaaaaaacgatagttatgacgcacgttgtttttaacccggacaacgtgaattggtccgcgttccttgcgttacagcagcagcaggagggaagcggtgagctgcagtattttgtaggcaataaatttcagcgtggtggcggtctgttacaaaatatttcgcggttcctgatgcctgtagccacaaacctgctaaagtctgcctcaaaagagggcatttccgcagggacacggatgcttgacgatctcgcgcagggaaaggcgtttaaagagtctctcaaaactcaggcaaagcaaggatttgagaatctggccgaaaagctcaaccaatgcggaaagggtgggcggcaacggcacaagacaatcactcatagaaaaaataaaaaaactggtacattgagagggaaacgacagatcatcgatcagctaacacttgcacattaacattcggcaccacacgaagcctataaataggtaggataattttaattttttccactaacgactacactctcagcaacatacattaaatattttgagagaaacatactaaccaaaaaactcagtggaaaatgagcgtaattaaaaagattgacaaagacagtgttgagggtctggaaggaagtctgtcattattctctttgccgccaaccaatgtggccataaataagacaaacgtccgtgaattgttgcctctgtctgcacttaatcagacaggtccctatttgtttcgcctgttctcggacagccaattttgtgacttgagcaaaacctatatgtacctgctcagctcaattgaacggaagaatgacgcgggagaatgggtagcactcagtgacacggacccaaacgataaacatgttggcgtcattcaaaactttgctagcagctttgtccgctcgctgaaggtcaatatttcaggcattgaggtgtttgacagttcaatttattatcactaccgcgactacataatgaaggagttgggctattcacaggaaattcgcaaggctttccatgaggcatcgtgctactacgcagacgatgatgaccagaacagcgcaacaaacccaggttttaccgcacgtgcggcacgcttttcaggtggtaaacagtgtgagacaatggtaaaactgaattttgatttggcacgtcaaagtgcattgatgttgaacaatcaggatgtaatattcaccattcaccgcaacaatgattcattcctcctgcttacacctccatacaaaaaaccagatggtacacagcaggaaaataagaaagagtaccgcatccgtgtgcatgacatgcgtctctatgtacgcactgtggacgtaacaccaagccttaaccttgccattagccgacaattagagtccacttcagcaaaatatccgctgcgtaaaattgagatgaggtccatttttcttggcacaggccggaccgagctggcacacaatgtgttcacttctacgttaactcgtcgtttaatttgcactttcgtttcaaccgatgcatattccggtaaccgaaaaatgtcaccctacaagtttgaacacgccaatgtacgttcgattagtgttgaggcgaacggacagacctttcccagcaccccgtatttgctgtccttcgatggtgtacagccccgctttgtccgtgcttttgtcgatatgtacgcaggcctgggtttggatgactccgacacaaaaacggtctcgattgggatgcagcgttttcttaacggttgggcctttttcgtcattccgctgacttccactctggaggacacacctggttttgagctgatcaggcaaggcacatgcacgataaaggtacaatttgagcagcctataaaagcggatggatatgagatgcttgtccttggtgaattcgattctgtgttgtccattaacgcagaccgggttctgagtacagacggaagtgtgtaactgactgaaactgattgacactgaaaagcaacaatgaattcagctcaattggaaataattctgaaaagattgcaccctaccaagaacaaattcattggtgttttcccatctgatcgaattccgaagcgggtttccaaattccctcattgtatggtcgtgaatacggacaaagaagggacacgaggtgaacattgggtggcttgctatgctttaagccatagaagggttgaatattttgacagtcttggtgagcccccaaaccccgatttagcagcctacctcaacacatttaaagaggtactggtcactagggagcaaattcaatttcccatatccgatacatgtggacatttttgtgtatattttttggcaagccgatgttctggcgttcctttctgccgtgtgattgagactttgcgtaagactcgaggcatggcagattacctcgtgaaatggtttgtcagaaacttgatcagcggtctataaaagctcacgtttcctgaacagtgagaaaaatgatggttcattttatgaatgttttttacgcaggtctagtcctcagccgtgtaccgtcactattgcaatcggagctgataaatgtggatttgacggttgacaatcaaaactatttcgatagcggcaaatatcgtaccttttcaaaagatgctacagcagcacaacattttggttatagttggaatacagcgtgccgaatagagaaatgtgaacgtgacagcgaatgggccgtttcacttcaaaatgtgtacactttacacagctatcagagtgtgtttttcgaaatgaaatcattggtgaaaatgtcaccattggcctgttttgaatacaatgggcatagttttaccttttttgaagacagcgaatctggtgagactactatcttccgtggtcaccagcataagattgtgcaacgactgtccaaacatggacggattgtgtttgatcacctttcgggtcgattgtttctgatcgataagtatcagaggcggattagcgaaatagagcttgaatacctggagcattggtggcttcgaaaaaaccaatcttccgcccatacgatcttgaagagcaactttgtcgcttttcttccaccagataaaagcgactttactatggtggacaaccatgtgtttgtgatcagagaccagcgcatctataaattttacattgccgactatgcaaaagggaatcgtgcgctaacttttgtaaccaattcaaatgacgtccgctttaattatctaatttataaacccaaagaccaaaatgctagtcgcggcgtttttgctcatctacgcatgtcggacgcctggataccgatatcgtacctgttcaatctgttcctaatagtactgtgcacatacatacttaaacagctacgacgagtggaccgaaagagtccgcttaacgtgtccgatagcgccgattattacagcagcccgttcattgacgacgcttattcatcccaacatcaacaattgttgaatataccgtatgtaactgcaacagcgagtgatcaaagtggtggagcccgtactcggagtatttaaagaacgatttttgttgtttggattcagttggccatttgtttcctagattttaagaaaagctatttcatttccataattgtcacaatatatttacctggttattgcatgcaaagggcaatccgttatctgatcgacagttacggtctgagcagtgtagacgatctgtacacctgtttgaaagaggaaattaaaagtgggcctgaaggtgggaattgtctctatcccaaccccctttgtgctgtggactgcgtacacatttcaaacgaagactatccgaaccaacctgtgcatattgacggctcgcttgaattgattgctgacgttgagctgtactcaacatgttatccgaagaggaagttcgagggaatagtgtggtaagttaactaaacaaaaaaacattattttttttgtcattatgcatttttaaggagcgaacctctgtatgtggagctgaaggacctgaagatttgtccgggcgactcgccgctgtgtctatcacgccatttcgaactaccgaacaacagcaacaacaacatgaacctgatagtcgacgagctggatctatccaactattggagcgacgacgaacgcgaaaacgagactacaacttggtgagagtgctgtgccgattcaacaactgtggtccctaccgactcgctaaacagctacagaaacggaggatggagaatctcacttatcttaatcaactggacattgaaactgctcatcttaggaagaatatcaaagttatcccggacgccttgtgtccaaatggcgctaatcgggtgtttgcctatcgcggattcctcggaatcactgttcagcaacatctctattctcgccatcgtgtcacgctaaagtatccgggtttaccctgtgttgtccaatttggcggtggctatcacc

SEQ ID NO: 45775 - DNA, 2194 bp, Heterodera glycines
atggactctgatttatacgatgaatttggaaattacatcggtccggagctcgatagtgacgacgatgaagaaatacaaccagtgggtggtaatgaggaggaggaggagcagaaagatgacattatggagcaggtcaatttgattgttcaaaccaaaaatcacttccacaaaaggaggatgaggaagaggacggagaatcgccagttgttcctggcagtcaaattgtgctgcacgaggacaagaaatattatgccactgccttggaagtttatggggaggaagtggagacattggtccaggaggaggacgcccaacctttgacagagccaatcgtcaaacccgtcaaactgcggcgatttcaggtggccggcattacttttccgcagaaagacaattaatgtaagcaaatgccaggcgcaagaacaccttcttcccgagactgtctacaagaaagattttctggtcgatatgacgaaccatcccgaactcatccgaaacattgccattgctgggaactttcaccacgggaagaccgcgttcatcgactgcatggtggagcagacccacccggacttctttcgttatgaggaccgagacgttcgcttcaccgacactttgttcattgagcagcagcgcgggtgctccatcaaagctctgccgataacacttgtcatgcaaaactctcggaacaagtccttcctgctgaacatttttgacactcccggacatgtcaatttttctgatgaatgcactgctgcttttcgtcttgttgatggggtggttataatggtggacgtgcacgagggattaatgatgaacacagaacgattgttgcgacatgccatccaagaacatcttccgatcaccatttgtctaaacaaaatcgaccgattgatcttggaactgaaattgccgcctgctgatgcctatgcaaaactgaaattcacacttgaccaaatcaacaattttgtacagtaagttcaaaaactcagtttctttccccaacaaaagcttttaatttatttccatcatttaaaaactttcagtcgcttgtttcgaaatgctttttcagaacattcggcgaggatgacatacccctcttctcccctctgatgggcaatgtgattttcgcaagcggtcgctatagcatttgcttctctttggaaagttttgctaatatttacgctgccaaacatagccaattaaatgccgagaaattttcgcgtcgcctttggggcgatatgtttttcgacacggcgctcaaaaagttcaccaaaaagccacaattgggcggagcaacgccaacgccgcgttcatttgtgcatttcatactggagcctatgtacaaactgttctctcaggtcccccctccttcactgtttgaccgtcgtttcgcttttttaggttgtgggcgacgtcgacacgtgtctgcccaaattgcaacaacatttgggcataaagttgaacaaagaagagcagagaatgaatgttcgtcctctcatcactttgatttgtcaacgttttttcggctcattcacctgtattttagtagcgaaaattaaaaaataagcttttgcactttagcatttgtcgatttggttgtcaacaatatcaaatctccgattgaaaatgggccgagaaaggtgcaacattgttacagcggagacgccaccagtcaattgccaacggaattggccaattgtagcccaaatgtgagtcgaaatgcgaaggaaacaaacggacaaaacattgcaataattcccacttttagggtccgctatacattcacacgactaaaaattatgccacgcaggacactacggcatttcatgtgctcggaagagtgttcagtggcacaagtgggcaaacggcgggggaagtgcaaaacaggcattttgatgtcaatttccagttcattctggcgacgaggtgaaaatattgggcgaaaactacagcatccaggacgaagaagactgtagggttatgacagttgggagactgtggctgcccgtggcaaggttggcattgagcttttccattgttttttcttttgggtttcttatttatttccacatttaggtacactgttgaagtgaacagcgtcggcgcgggctgtttagttttgatggaaggcatcgatcagcctgtgacaaaaacgtgcaccatcgttgaaaaggactacgaccaggacgag

SEQ ID NO: 45776 - DNA, 678 bp, Heterodera glycines
atggcacgaaccaagcaaacagcccgcaaaacccaatcccaaaaaggcttttcgtcgagcagtggcagccaacacatgcagagtcaactgcacaacttgagaaaacagttggctacgaagcgtcccaacccaaaacgagggatcggatacaaagaattgcctcctgtcaaaatagcccaaaaacgtcatcataagaaaggtaatttggctctactgcattttacgcgtccaatcgacttttacgcgtccaatcacagttttcgcgtccaatcaaaagtttatgtgtccaatcaattattagaaattatttaaaatattggcattaaatgctttgtgtgctttttctataaaatttaattgaaaaaatggaatatagatggttttgagatggtgtttattcatcaaactaatgtttttccattttcaggagcattggcacttaaagagatccgcaagtaccagaagagtgtgaatctgctcatcccgcgccgtcctttcatgcgtttggtccgcgaagtcacccaggacatgtcgcagtcgaccgacctgcgctggcagggcttggcactgctggcgattcaggtttttgctaatccgagctcattgtcagttgttacccaaaccgggcaatcatgttttattagtaccgaaaatttttttgaaaccagaaaattctaa

SEQ ID NO: 45777 - DNA, 1034 bp, Heterodera glycines
tctgcgagaccaaaggtttttttcgatgttatggttggcggaaaatcgacaggttataaactcggacaacaaatcgccctcattctctgttcaaaataggtttaggtcgaattgtgatggaattgtttagtgacatcgttccgaagactgccgaaaattttagggctctgtgtactggcgagaaagggatgggcaaaagtggtaattaaaaagtcttgaccgtgaccgttattgattttactttaggcaaaccgttgcactacaaagggtcgaagttccaccgcgtcattccgagtttcatgcttcaggtataaagttgtggcacttccgcgaaaaggaatccattaacggactccgttttcacattttagggtggcgattttactcgaggcaatgggaccggcggcgagtcgatctatggcaagtgttcggacgaaatgcgaatgaatcggtcctttaggcgagaaattccccgacgagaatttcaaagagaagcataccgtcccgggactattggtaacgtttctggaaatttaaggaatggaacactcgtagcccatgggccaaaaaagcgtcatttttcaacttatttttaaattcagtcgatggccaatgccggccccaacactaacggctcgcagtttttcatcaccacagtgaaaacggaggttggacgaaaggcgtatttagccattttcgagattcatttttaacacaaattaatctagcgaattcaagaaatactggaaaatgcctatacttggaaaattcttttttccgctctcctattcccggaaattgcttttgttattttcggtttagggtttttgatgattgttttcattgcagtggcttgacggcaaacacgtggtgtttgggcgagtcgttgagggcatggacgtggtgaagcaagtcgaagcccagggcaatcagagcggaaagacagcgaacgaagtttgcccatcctttcgctgttcatttcgccgtgactttgcctccattttcagattaccatcgccgattgtggccagctt

SEQ ID NO: 45778 - DNA, 1057 bp, Heterodera glycines
ccgccgcattgaactgcgattttgaggggcagccctgttgctgggccaatgtgccaacaccgactgacgatcaaattgattgggttcaggtggagggccaacctcgcagctccattttgccgaggaatttcacggcggacggaaaatatttggtgaaaaatttatttattatttttaaaatttaaattaaatcgtttttttattttgattaatttactgctaagatattataattttaaaactacagttggccacaacatttttgttttctaaagctttaaattaaaaaaaaaattctataaatttttttgaatttttatacttaaatcaattttttaattggttatttcaagtttcaaaaaatagttttaagattttttcataaaaaaaacttgttatcatttgttttttatcttttgcatgacatcattctaacaccttatatacctttacctaatcagcacattcagatcaaaaataattttgcgagattctaataaattttagggctaattaggcccccctccccctcatttcgagatataattttcaaatttgatcacagattgcttatgccacttccgcgtctccgtctgacgaggctcagctgtcctcatgtgccatcgcctgtgccagctcatcaatccgcgttcgggctaggtaggtatgggttttggagaaaattttcaaaaaattctcaaaatttcaaaaattttcaaggcatatgcaaacaacgaacgtgctgctccaagtgtgccagcgcgagtgagaattttgtttttcgatgcaaaaattaaaattttaaaaaaattttcaaggtcctttccgccttcgctcgggttcaacccgttgctgaactgccaagaatttccgacctcttccgaccgtatgatcaacactgagctggtgttaccaaaagcctcctacgtggatgtttgtttgaattttaaatttggcgcacttttttggcgttacgttttttaattttaagatcatcattgttgcctccaatttcataaatgaacggggcgacatcgctctcctagacgatatccaa

SEQ ID NO: 45779 - DNA, 1201 bp, Heterodera glycines
atgccattgaaagccctgaggggaatttcgccatgcacgaaaagcacatatgatcgagaggagaaggaggaactgcgcgcagcgctgaagaaggaggaggaggcaaagaagaagctggagattcggaagaaaatgtccgtggttgtggaaagggtcaacgacgacggcacggagggatggtcggtgagtgaacgggaattgaaattcgaattaaaacgaaacgaaattaaggacaatgtgccgatcacgaaagcacggatggccgaactaatccgccatttctacaatttgggatggatgcgcgacaacggcgccggcatggcggtgcgctttaagtgtccgaagacgggcgagcttctgattctgaactcgtccaactcgttggccaaggagatattcaacgagtgagccaaaagaaaatgaatgtgtccaatttggatttgttattcagaaatgagcattttgtgatgaaatcggccggcacaattttgaagcgtccggcggacccggacagaacgccgactgcgccgtattatttgctccgtgacaacccaggtgaagcagcagcagtcgggcacattttaacgacctcataatgatccgaattgctcagatttggtttgtgtggttcacacgcacacaaaatggggcaatctgatcactcagctgattcaaggagacaaattcatgatttcgggccaggagatgatccaggtaaagcccagtcgaactgatggccaaaattgggcttcatttctgttccaattaaggggtgcgaaaaccgtcagaccaaacgccgaatggaaaatgttgacactttggtggtgccgatcatcgaaacggaaatcaacgagttcgtcctttgcgtaagctctgctgatgaatgtttgccaatctgatcactgtcactttcagcctcaactgatgaagactttgtgcagatatcccgaagcgagtggcgttctcgtccgggggcacggcttcttcgtattcggcagcaacacgtggcaacggaccaaaatgatgtgagcgatttggcattccgtgttcaaaattagcattataattgccattcaaaaatggcatttgatatttggcattccgtttccaggttggagtgctacgaatatctgttcgagttgggctgcgaaatgctgcgcttgaggtccctctggtgaagaacgatgaagaccaaaacacc

SEQ ID NO: 45780 - DNA, 860 bp, Heterodera glycines
tttcaggtgcgtatcaaacggttggacattgtcggctcgtggcgttgggtggacggcaaagaggacgcgtgcggcatttgccgtactccgttcgagacctgttgcatggactgcaaattcccgggcgacgaatgtccattggtatacatatttattgctggcggcgggtggttttggattttaccggatttcgcggattaattgaacctgtcgtactctaggcctaaactagtggcaaatcgtttccccggtgttgccccacatttgcgtctttgtccaaaatcggactcaaaattgaatttttcaagcaccatgatagcctaatccgcattagaattaagaaaacgcggtcttttggttcattaggatcaataatttgttgtttgaaaattttattattttttcaaaaattttttgaagatcaaatgatcggatacaatcacttcactttcaatcgctcatttaaagctgtttatacaatcaagaaatgcaaaaaacttaattttgaacccgattttggacaaaggcgcaaatgtcgggacacgcgataagaaactgattgtgccaagatcgtcagcaaatttttgaaaaaaaaataaaaataaatttaaacaaccaaattattgttcctattccccggtctctatgatggaacacaacctatgtcaaacaacataaggacacttctttgaaattgaggactcaaaaattcaaaaaaaaattttttgaattttttttgccaggtgttgggccagtgcaaacatccgttccacatgcattgcattgtgaagtggacgaacacgcaaagcgggcagaagcccgcctgtccgctgtgccgtcaggagtggaaatttgcgacc

SEQ ID NO: 45781 - DNA, 1749 bp, Heterodera glycines
atggattgtggcaacaaacggcctaggacaacaatttcggcaaaaagcctggagacgctgaagctggcctaccaggacagcaagaagccggcacgccatgtgcgcgagcagttggcctcccagaccgggctggacatgcgtgtagtgcaagtgtggttccaggtgggtgtgcggcacggcacggcattgaaaattcattttttgcgctttcttaagaatcgacgggccaaggacaaacgcttaaaggtaaaagcaatccatccatccatccattcatcaatttgcctaattaacctagttttgggactaatgaactaattggctttacggactaattgatcaattaattgattggggcggttgggcggtttttgacttttaagccgccaacaccaaaaaatattggcaagaccatgccaaaaaattattgcctccgattgtttcaacaattttttttttctatcatcgaggcccctttttttgcctggaaacccaagcatttgtcgtgtttttggagtcatcatccgtgtcagggatttttccggttttgaaaaatttgtgccggattttttgggatttggcgatagaagcattttttttcttatcatcgagacttttctttttacccagacatttgcaagggtttttggagtcaccgtgccagatttttgacagatttttcccgattctgaaaaattcgtgccgcaatttttttttggattttaacgattttctatcagtttcattgcccccagaaggacaacgagcgtcggttggctgccgcccatcaccagcaccaacatggcggcggtggcgcgggcgtcggtgccgacccgcaccaccggtccggcagcggttcgaccgtcagcagttctggcggcggcggctgcggtggcggtcccggctccgtgtccgggagcagtgggatgccaatgggcactggcgccatgctgtttggacgcagcgggggctccggcggcggcgcgctcggtgattccgactcgggcgcgtccaacgaagcggaaagtccattttacggtacgcggtaggcgagtttttacatggcattgcctactgtaatcgccctgtttgtaccagaatcccgagaattttggcaaaacccggtcctgtgtaccccagtacaaatcccctcatcagggatgccaatttaaaattttggccagacagaaactctgacaatattccctatccggcgttttttttagttcccattctcgaacccatgccacggcaccaattcccaaccctgcggagttctctgatcccggtcctaattgtcgtgccacggcacatattctgatcccggtccttattgcgtgccacggcacggcacatattttgatcccggtcctaattgtgtgccacggcacatattctgatcccggtcctaattgcgtgccacggcacatattctgatcctgattctacggggagtaaatcccgttaacaaatccccgggggcattttccggtcccgagcatcacaagtgacctgaggcgtctaaatcatcatcttattggggtggccaaaactaatttgttttttctgcccttggaccaaaaagtgatcagaattaaaaacaatttgtaacgaataattacttttctttttaaattattttttgtacgatttttttttaattaaaattttttttttacatttttttagcctacacaaaccccgaagcttcctccgatgttgatggtcattcgatgagcgaattttatg

SEQ ID NO: 45782 - DNA, 845 bp, Heterodera glycines
atggaggactcaaatgtacgttttttgtggagtcctttactttttttttattccacctcccgtcgcaaatgattaaaattttggtagcgggcgttaacaattttctgagccctttacaaaactactgtcagaatgggttgagtgagacccaggggactgcggtgttttttcctcctttctatcttttgattttaagctgaaggacaagatcagcgaggacgacaagaagaaggtgctggagaagtgcggtgaggtgctggcatggctcgacgccaaccaggcggcagagaaggaggaatttgagcaccagcagaaggaactcgaagggatctgtaatcccatcatcaccaagctctaccaagccggcggcgcaatgcccggcggtccaatgcctggcggagggatgcccggaggtggcggcgctgctggtgcgggaggagccggtggaccgaccatcgaggaagtggactaagcgagtcgatctcttcgcgatcatttttttgtttgatcgattatttaattttatttttttctcgcgtaaattgtttgacatataaattcattggttgcttacttacgaatctcaccgaacatgcccttctgctttaaaccgtatgttaaatgtaaaaagccaaagacaaattggttcgggaaatcattgataccttgtgtggttagtgatttataatcggaaattcaatattttaaaattcactttatgatcgtatctatatagaatgatattttttgatgtacaattgtttttgactatttttaggttattgcgatcaaattagaaacaaaattgggtaatggtgaagctggtgcccccccccctttttgga

SEQ ID NO: 45783 - DNA, 502 bp, Heterodera glycines
atggtccaacaatacaaattgtactattttgatttgcgcggtgtggttgaacccatccgcctgttgcttcactatgttggccaaccatttgaggacatccgctttaaagactttgaagaatgggagaaaacgtacaaaccgagtgagtaattaaaacatgtggcataatgccatagaaataaatgccaaattaaaaaaaacaaaaactttttcagaatttttctacggaaaagccccagttttggaggttgacgggaagccattggcacaaagctcggcaattttgcgctaccttgccgaaaaatttggtaaattaattataataattaattttatttgtttttaattataaatttaaatttaaggcttggccggcaaagatgaatgcgaaaaggcgaaggctaacgaaatcatcgactttcaaaaggatgctaactccgaattgatgccctatttgatggtcaaaattggacgccaagaaggcgatttggtgaaaaaataa

SEQ ID NO: 45784 - DNA, 516 bp, Heterodera glycines
taaaaggtaattatggcgcgaaacaataaattaatatgatatcgttgaatgaaggatcgccctgacgaatctatactgatctcatgactattagctgcacatggagatgacagtaagacccgtcagagaaactcttccattaagtaggcggaatgcacgcgaattccttgtgtggattagcccatttaagcaagaaaaaggttaccaggggaactgcctctcgctcccaaaactccacataagcaattcccttggaacgtcgcgtctttgtgtcggtaatcactcgaacatctctaacgtgtccaacacttgaaaaaaattcctccaagtcacgaggacgcgtttgacgagcaagcttaatcagaagaatttctcaataatcagaaaacgaagagccaacctggagaataaaaactgttcgctcatctctttcttcggaagtcatatccattcgagcatcacgcggcggtgatctccgaggcgtaaatggcatacttaaagaatcaaggctggaat

SEQ ID NO: 45785 - DNA, 1328 bp, Heterodera glycines
atggctgaagatgaggtagatgatcttcttgaagaagcattcaaaaatgttgacgaggttggcttttatagtgacactcataaacaatacataaattaggcagagaaaaatgggacaaagatggatgatgttatcaagaaaaaggcgaaggaagttggaatcaagtaaacatcacatttttaaattttaattgctgtttttttcttagaatgagtgacagtgaaggcaaacgtaaacgtagcagaagcggaagcagggagagaaagcgcagacgaagtcgcagtcgcgagaagaagaagaggtttctgacgccatttgacactttaattatttacttttagggattcgtcgcgagagcgaaggcggcgttctccgtcagagaacagcaaaagaaaacgtcggtctaggtgatcaagtttacgattggatttactattcggggttaggaagccggataagcacaaaatttgagtgagcgaactcaattgcctaaatatctccagatcttgacgtctgatcatattctcctttgtttgttgatgaagacgaagaacggcgtggaacgtgcgttaaagcagaaactcattcctctcatattccacaacctttcttttctttcgttcataaattcgttcgcgccatgccttcattaccctcccataaatttattaatttgctttccaggcacacagacacattgatttaatttttaaggcaaattgtgctttcctacatggaattaatctgtaattttagttctcgtgatcgtcgccgctctcgttctaggtctcgcgatcggcgtcgttctccaatctcacgtcggcgctcccgttcccgatcacctcttgagaaacgtcgttcgcctgccccgcgtcgtttacccgggcccgagcgccgggatgtgtgagtttagaggggggtcgcttcaactaaaagtacacatttatgctaattccagccttgattctttaagtatgccatttacgcctcggagatcaccgccgcgtgatgctcgaatggatatgacttccgaagaaagagatgagcgaacagtttttattctccaggttggctcttcgttttctgattattgagaaattcttctgattaagcttgctcgtcaaacgcgtcctcgtgacttggaggaatttttttcaagtgttggacacgttagagatgttcgagtgattaccgacacaaagacgcgacgttccaagggaattgcttatgtggagttttgggagcgagaggcagttcccctggtaacctttttcttgcttaaatgggctaatccacacaaggaattcgcgtgcattccgcctacttaa

SEQ ID NO: 45786 - DNA, 1721 bp, Heterodera glycines
atagaaaatattctgattgaccaacggaatgctcatgaaaagtccacgtacattctctgcgattttggcagctccacaacaaaagttctttctaaggaacattacacccatggtcattcaatcaatcattcattgtctctccaacttttcagttacttttcttttcagcctttatggaggaagagattcaacgttacaccactctcagttatcgagccccggaaatgattgatttgtattcgggcattccaattggttagcattagttattgtgattttttgaacaaaattcatatcaaaaagactatgtttttagatacaaagtccgacatttgggcgttgggcattttgctgtacaaactttgttacttctcacttccgtttggtgaatctgcgttggctattcaaaatggactgttcactttccccgaatctccgccaatctctgaccaaataaaggccataattagtgggtttattgttagtcatttctcttgaatgttatcttcgtcttcatagatcttctcctcactctgaatgccaaacacaggccaaatgtttaccaagcttcgtatttggcatttttcgctgccgatcgcaaatgtccagtgtataacatcgaagttatttcctctttttcgattttgtaaattttgttgttcagaaaagtttgcggatcgaactgagtgaagctgttcagattctgaaaatgcgcaataagcttggctccgattacgcgcgtttgtatgaaaaggcttttaacgactttgaggcacaacggcgaaggcacacggccccttcggttgggagagggccgggtgaagtcatcgaagaaaggcacagccgagacggaatgcagcgaacattcgtcgcagggataaaaccgtcagaactccccgggcaccgaacggacgactgttcggccgtttgtagcagctcttcggcccttttagcagcatcagaaggaatgattgtgaacacagcctcttcacattgtaccgaaacgcatcgacgggccacaacaacatcagttaacccacggcttaggcccaaaccccaagcggtcctggtaaattccactccaatgtcgcagcgcaaagaaacggccgatgaaaggggggaaatgcctttgtccggacagcaacagctcaagcaacaaacagtggccaatgctgtgagaccattctgcctttttgatgccaatactttgcttgtttaatttgttaaggcagcacatgaaaatcacacgatttacgataacacacaaaaaagcgatgtttcaaatccgccgaagctaactcaaagcgcatttaggtgaagtttctttcgcgtgtctcttttcttataattttggcttaattaggccttatactctgacttatggccaacgtgagagtaattcttcggccgacgccaacaatttgaaccttacgcttcaaacattggctggaaatactttgttcgaatcgtccaatccgttcattcagccgtgtatgtccaccatcgaccatcacatggacgacaacgcttttggtgaatgcttcgatgaaatgcgacggagttgtgtcgtcgaacaacaatcggacttccaaagtgaaattaatcggccaaacattttgggtttggatttgacatcgatggagcaacagatcagcgatgatccgtttgggaatgcgccccctttactcccatatcagttttttcgcaaaccactggattaa

SEQ ID NO: 45787 - DNA, 1876 bp, Heterodera glycines
atgaacgagcgctttgacgttgatttctttcggcaattttctctcgttatgaacgctttggacaacaaaggtgtgaggaccgagttttttatgtaacaaaacaaaattcgtttttagccgctagaagtcacgcgaatagactctgtttggttgccggggttcctttgattgaaagcggttccgcgggttatctcggccaagttgcagtcatattgaaaggccgtactgaatgttatgactgcacaccgaagccgaaccaaaagacatatgcaagttgtaccatccgaaacacacccacggaaatgatccattgcgttgtttgggccaagagtttgttcaagtaagcgactcgaaaggcttattattaggatcacgtttaaacgcatagttcattttgttacgttctttcccttttacaattagtcaactttttggcgagagtgaccctgatgacgatgtttctcctgagacggtcacttccgatggaatgggcgaccaaaaaaactcacaaacaatggataatgatgggacgaccaccaatggaagtgttatttttgctgacaatgggaatagtagtgctaatgatgcgattacaaaaaatggaaaaatgagcacacggcaatttgcggaagcgacggattacggaccaaaacaaatttttgagaaggtttgtttaacaaagtaaaacattcttgttaagtttcagacttttagttgttctttgatgacattaattatttgctttcgatggccgatctttggaaggagcggaagaaaccaacgccaattcactttatgcaagttattgacgaaggttttcaattttttaaggtggatctctgattttaaaatggatttgtttaactaaaggacttggtgggagtcggccgaatgaggacgagaacgagcattggggcgtatcgaaatgggctgaactgtttgaggactctctttttgcgcttgcggaaagataccgaggagctgtcaaggaaaagcgaatgctcatctgggacaaggacgacgagccggcaatgcaatttgttgcggcctgtgccaatctacgggcttacatttttggaatcggcacaaaaccattgtttgacctgaaaggttttaattggtcgcgaaatgccttcaaaattagtttttagctatggctggcaacattatcccggctattgccacaaccaatgcctgtgttgctggaatgattgtcgtcgaggctctgaaaatcgtttctggtcagctgagcaaatgtcgaacggtaactttcgcttgtccaattaattcccttttcatttgtttagatttttatcaaacgcttaccaaatccgcaagggaaaattttggtggaccaggaacccagtgctccgttcccgaaatgttatgtctgttccggcaaaggagaggtgacacatacgacaccattactccaaaatattgcccattcttggttctttttcaggtgattgtacacgtcaatttaaatgaaatgttgctcagaacattccgtcaaaatgttttggtcggtgctttgaacatgttgaagcctgacgtgatggatctctgccaaaaccaccgaattttgctctccagtgaagaaggcgaaaccgactccattttggaccgttctcttggcttattgggagttttgaacggcacgcaattggagtgcgatgactatgcccagcaattgaacttcaagctgatccttttcaacgacaacacactgacgggcgaacagttcaaaaaagtcgaagatcaggcgacgaaaggggcgaaaagcatttctgacgacaaacagaaaagagaaaacgaaatagacgaggaggaaggagtgccagtgaaaaaggcgaagattctctgcgaaacctga

SEQ ID NO: 45788 - DNA, 1487 bp, Heterodera glycines; identical to SEQ ID NO: 23481

SEQ ID NO: 45789 - DNA, 3424 bp, Heterodera glycines
aaggtatgtgatttatttattgtgaacgctttaccagattgcaattgttacattgtaggtcaacgacacaatcccctcactcttcaaaggtcgcatgaagtcctatatcaaatgcaaaaatgtcgacttcggatcatctcgagaggaatgtttttatgatctccagttaaatgtcaagggaaagtcaaatggtttgtgttactgtctttgttatcgtcaataaattttaattattagtccttgaatcgttccgggattacattcaacttgaaattctcgatggagagaataaatatgacgcaggcggtatgttatttattttttactggataatctggcaatatgattacagattttggtctccagccagccgaaaagggactcaaattcctttctttcccacctgttcttcaccttcaactcatgcgttttcagtatgacccaatgatggattccaatgtgaaaataaatgatcggtaatgctattatcttttgttattttattttttgcttatggttttcaggtttgaattttctgaaattatggacttgaacgaatttgccgaatctgagggggatgatgaagctcagaagaacgactacacatatttgctttatgctgtgcttgtccattctggtgatttccacggcggacattacgtggcattcataaacacgaatttgaagggctctccgagggtttgtgttttatttttattatctcgaattttaatatttccctttagtggtgtaaattcgatgatgatgtcgtttcgcgtgtcacttcacgcgatgcggtgactgcaaattttggtggggagaatccagaaggagttggtcggagttttacgaatgcgtacatgttggtctacataaagaaaagtgcgactggtaactctttgaattgttttttcttaactgatcgttgtgattaaggcgaagtgctcggttctgtgtctgaagaggacattcccgaccatcttaaagttcgctttgaaagtgagaaaaaaagagaaatggaacgacgaatagagcgagaggaagcgaataattattgtgaaataactgtgagttttttaaaaatttattgactgtttttcttttttcttctcagcttattttggacgaagacatgaacgcacaccacgaattcgaattgtttgatgggcgaatgaccgagatccaggcacgaaaattgaaggtgcagaaatcgatgacttatatggagctttacaaatttgttgcaacaaatatggtaagtatagcactttcatattttaaatgagtttcaatttattccagggactgaaggaaagagaattccgtctttgggactttcaagaatcggacaacaaccaacgggaaatgatgcacagatttcgtgtggagaatacgcgacctcgttttttcatcgacccatttgagacatgcgacgaatatgatggtggcactgtccgctacgaccgaatggtttacttggaactgtgcagaggacatgttggagatgagctgggtttcccaaactacgacaaaaaccgtaatttttttttggcaaaaacagctcacattgatgatttagatgacgttttggccttcgttaaattcttcaccgctgagcgcaaagttcccgaattcaaaggaactttgatccttaccatgtcaagcgactttcctactattgcagctgccataaacaaagtgcttgggcagccccctgacactaaattaaatctttatgtggtaatgaaacatttcgatgctttaatttggtttattttctccaaaaggaaataaaaccggacaaaatcatacagctgcagtcggctacggtgaagaattcccagcaatacatgcagcaagatggagtgataataatagcagaattggaccaagtcagcgaggaagctagtgtcatgcaattcttcaaaacgctatacaacagaattgaggtaatctttaaaaaattactataaaacaaatgaagctatacataggtcgaggcgcatcttcaagaatttgggtctggcaaccatactgaacagcatgcaatttctccgttgagaggacagattggattggtaagataaatgcatgccgaagtttcaaaaagaacgtgtttttaggattggaagctgacgcgggtctgctcatggctgggttcagagctgaactatgatcccgcaaagatcatgctttataagagtgagtttgatttgtttctcgcgttttaagtttgcatttgttttatcagatgtgttacatggtgacaagcccggcatgtggataccggttagagtttttacattcaattaaaacctattcccaaaattaagcaccaacaattgttggaactgcaggttagccagatgctcaacctgaacacaggcagttacgacccacgttttcaacgcatcttcaaatttttctatgccaaattgccacttccaatggtcgactttgataatcatgcacatgtattgctgcacttgatgaatgaaaaattccagctaacggtggctttttttgcatcgttttttatatatagttgtttttaggaaatgagtatttttgtggataaaaacgcaagcgtgcaaacactcctggatgaggcgagaaaagagttcaggttctcgtcgatggggaccaaaactcttaggtaattttgtaaacaaaacaaagacatacaaaaatatttttcagacttgtgcaagcctcggccgacgggacttttagagtctatcaggtcctcaagaacgacattctttacaaggatatccaactccgaccatctttaatggtagtgcttatttagctatttttaaaaaatccggcgaattaagctgcgtgtggaagaaatcccgaaggatcagcttgaagttggcaccggcgaatatttgctgccagtggcccatttcgacagagagccgaatcggacattcggagtgccattcttcatcaaaatttgcaacggggagaaagtgagcagcataagggagagaatccgcgagatgttggacgtgcccaagaaagaatttgagaaggttttaagggtcggactactttaccaactttcccttccctttcagtacaaattttgcattgtgaggcagggccgagtgatgcgcgaattcgacaaccaggacgacgcagcagcagtcaatttgtcggaattatcccttgcccatataacttgtgtgtaggctgattatattcgagtacaaacgcactattgttttgtcatttcagatccgcagtcggcaccatttctggggattcaacacaattgccccaataaattggtggacttgccgaaaaaatcggtgatggcttttttgtgctgatgactttcgagaagatttccggaaaaatggccaataaacgtccgaaaaaccttcgactgaagccattggttctagtgcagaat

SEQ ID NO: 45790 - DNA, 1974 bp, Heterodera glycines
atgcttaaacgggccgcgttgggtcgcatggtaaaattgctgcgtcgacagaaatcaagttttgagtatcttgaacaagtccgtcaacatttgagccgactgccaagcattgacccgaacacgaggtcaggtgttaactaatgtcgcaaaagtcgtcacaaaaattgtaaaagaaggtttacatggctgacccccttcgcaaagattagttgagtatctcccctcccccatttttcacaaagattaccatcgaatgcaataaaaaaaacttctatttgtctccagttaaacaaaattatattaacttggttcgaatttaccgcggttttgcgaagatggaataaacccaaatatttctaccttttgttcagaactctcatactatgtgggtttccgaatgtcggcaagtcttcgttcatcaataaggtcactcgtgccgatgtcgaagttcagccatatgcttttacgacgaagtctctctatgttggccatttggactatcgttaccttcgttggcaagtgagcttttgttcacttttgaatgaatttactgttgcctttcaggtaattgacacccccggcattttggaccatcccttggagcaacggaataccatcgaaatgcaggccatcacggcattggcccatctgaaggcatccattttgtacatgatggacatcagcgagcagtgtggacggacactcgaagaacaaatccatctcttcgagagcattcagcctttgttcagcaacaaacccgtctttgtcggactcaacaaaatcgacttaatcactcgcaaagatttgatagccgagaaagaagcgattttacgagagaaattggaaactgcgggggttcccgtggtcgaattaagcacattgactcagcaaggcatcaccgaactgagagataaggtaaacggacgaacaatgaaaatggaggaagagagtctgaatattttcaaaccgaagcagaccctttcttatccagacaaagtttttggggaaggctaccgccacccgacggtctttttactccgttcctccaaaaattttcttttggttcgatttttaaaagtccgtgccccccttcccttcctcctgaacacgggctgaatcggattctatttttaggcctgtgatgctttattggctcagcgtgtcgaaaagaaattgcaagtgaaaggcattgcccagggagggtcggtgatcagtcgtctttttgtcgcttacccaactccacgtgacgacaaagttcgagctccgcacattcccgaaactgtactgaagagacatgccgaaatggaagtggaagacggggaaaagccgaaacgaaaattggaaagggaattggagttggagcaagggagggagtacaagttggacttgaacaagcactacctgctgaagaatgagggagagaagtacgacaccatcccggagatttgggaaggacacaacatcggtttttaatctcatttttaacaaaaaccctttcaatgtttaagccgacttcattgacccgaaaattgtcgaggtaaattccaaaacattcattttcaattttaaatttagaaattgctgaaactgagagacgaggagaagaaacgtgaagaagctgggttttatgacagtgacatggacgaagacgacgaagagaccaggaaattattgcgggaagcggagaaaataacacaaaaagagcaaatgcgaagaatggaattccgcgaaaagaaaagcacaaatcagccgaaaatgtcgaggaaaatcggacggaaacgggagcgaagcatggcgaggctggaggaggagttgggcgacttgggggtggacatcgccagcaagaaaatgcgccatttgagcgaggagcagaacagggaacagcggggcaagaaaattcgcgtgggtcggtcaccgtcagtcaaagcaccgcccaaaacgccgcgagacgtacagggcattcccgacaaaaag

SEQ ID NO: 45791 - DNA, 915 bp, Heterodera glycines
atgtccaagagtgacaaagtgttgttaagccatccatggcgttgctaattaatgaattattccctccacaattgtgtctttcccattttgcaatgattctctctcaattttaaggtgtccaaatggccggtgaatcctctcgagaaaatcgtgctggacctcggctcccttccgcccggaagtgtcgtcgccgacttgggctgtggcgacgcggaaattgctaagcgattgggcgaacggctccgagttcattcctttgacctggtggcttcaaatgagcgggttttggcagcggacatggccgatttgccgttggaggcggagtctgtggacgtttgcgtttactgtctgtcgttgatgggcaccaatttggcccaattcttccgagaagctcatcgagtgctcaaaactcagtgagaaatcacaatggagggaatgtttcaatacgcagactcagataaggcgtagaatttcgcacgggggagggtccgagacgatttcacaaattttcggagaaaccctaaaactagcacccccccccccccctatcctgtccatatataccgccggccccaaatccttgattttttaaattgtgaatgctcaaaaaggaacgcaaaagtttcttgttggagcaaaaaatttaagacgacatataaaaaagtcccgacgaattccccctcctccgctttatttgtttcgtcgccataaacgcacaaaaggggtgcgccgggcccctccccctgggggtgggggagaggaggtggtcgtagagtgatagcaaatggcaaggcaattataacgacttctactttaagcgggaagatcaaaattgccgagataacgagccgtcttcggagtgtctcactgtttgtgttggcgttggaaaaaatgggattccaattgaaacggaag

SEQ ID NO: 45792 - DNA, 264 bp, Heterodera glycines
ggcgtgtgcaccaacttcttggcggaccgtgccccgggcgtgtccaccgcgccggtgttcgtccgcaagtccacgctgcgcttgccccaccgggtgcagcagccggtgatcatggtcgggcccggcaccggcttcgcccccttccgcggcttcctccacgaccgattgtggcacaaacagcagggcaaggaggtgggcgagatgcacttgttcttcggctgtcgtcacccagaccatgaccacatttacaaggaggagatggag

SEQ ID NO: 45793 - DNA, 889 bp, Heterodera glycines
tgcgtttttcgtgcttatctgtgcgtattaagtgcgcaaaaagttagcatttgcctaaaaatcgcatccctactgaattgtctgatcaatttggtaatttcttttactgtaaaagaaattgaattgttttggcattaattaattatttaaatattaaaaaacaaaatgccaatatatcgttgaaaaaaaacgaattggcggtggcgggggcggcaaagacaattcttgtcctaactttaaaatcttttcatccataatttgagtgaaaatcttctttaattaagtttagtttaaacgggttggcgagagtaatgcttctttcgaaaatcccacctcctttttgtattgctttgcgcgccgcttccacaaatccgccggctcgtggcccaagtgtaaaaacctttgaaatttaccgctacaaccctgaaaagccggaacaaaaaccctttctccaggtttagccgattggattatgtctttggatttttgtgtttttttagaaatatgacgtggatttgaatcaatgcgggccgatggttttggacgcactgatcaaaattaaaaatgagatggatccaactttgacttttcgtcgttcttgtcgagaaggtcggttcattgaaagtcatttgtttttgtcatcagaaaacaaaaaaatcggaaattgctttggatggtgcccaaaaaacaatttccaatattttgtttaaatgccatttaaccattctattgaaacaattaataaaatcaccgaataattaaggaatttgcggttcgtgcgcaatgaacataggcggcgagaacactttggcatgcatttgcaacatcgaaaagaaaaccaaatattccaccaaaatttaccccctgccgcacatgtgagtgggtaaag

SEQ ID NO: 45794 - DNA, 872 bp, Heterodera glycines
cctcagaccgcagctgaacatcagaaggacatcaacgaatcgtcgtcgtcctcctcagattcctcctcttcgtcctcgtcttctgacagtgaaagcgacggcgacgagtcggacgcgggcgaaagaggcggtgccacagccgaagagcgccgacgcacgtcgcactcacacggaagcatgcagtcgttgaacttcacctccgtaaaacactccatttgcttacatatggtttatcttcggttatttttcagatctttaaaagtaagcgcaagcgccgtcgtccttcccactcgcgttcttccaccacggccaaagaggacattgagatgggcaaacagaggaaccgaggttggtggttgcctcgagtggtccaatccccgttcgaccacccacaacttctgcttagattgccaatgccttttagtgacaagtcgcagtacaccgataaaggagggcccaacgttgaaggccgttgatgaagacggtgctggtgctaaacaaaggaaaagcaaaggcagggagggccgtggcgtccgtgcacttgtcgcccattcgacgattggagcggcagcggtgccatcggcgaccaacagtgattgaggagcaattcgtttttactaatggaaaatctttaggtaccggtggaagtccgctgttgtcccatgctccgcttccactgaataacgcaattaaccacgcctggccaactccaaaaacttacggcgcaataaaccccgacggaaaatcgccacattttctcgtgggaagtgacgaaaacattggcgactcgtcaaacgaagctgcttattaccacccaacaacaacttttccgacgaggcacagacgaaaaaagacagtgctcagcgaaaatg

SEQ ID NO: 45795 - DNA, 799 bp, Heterodera glycines
tgcattttatggatgatagctttaaaatcaaatctcttcaaaataattttgccattgaaatgtgccattgtcagttatgcccaattacgaaatgatcaaagtggagagagtgggcgccgacgacgtcgtcgcactgatcactctgaaccgaccgaaggcactgaacgcattgtgcagccaattgatggacgaggttaacaataagtaacactcatttggtggtcccatcaattgcatttaccgctctttcaaattatttgatttttaccaaacaaaaaatgaatattttctttcattgtgccgtttctttcatagctcgcccattccctcacttatttggacaaagacgacggagtccatgccatcgttctcaccggcagtgaaagggctttcgcaggtgtccgttctatgcgtttctttcgctttttgtcgttgtaattttcttcaactttttagccggcgccgacattaaggaaatggtgccgaagaaatttgccgaggttttcggtggcggctttttggagaattggtcccaagttgcgactgtacgaaagccgacaattgcggcggtcaacggacacgctctcgggggtggatgtgaggtgaaagaaacccgggggggagggggagacttttcgccaatttggccgtttaaacatttgttatttagttggctatgatgtgcgatatcatttacgcgggagagaaggccatgtttggacagccggaaatcaaaatcgggacaatccctggtacttaattaggccaattttgttatataaaattatttcaggagccg

SEQ ID NO: 45796 - DNA, 252 bp, Heterodera glycines
agtctaaccctattaatgaaattgtcgatgttgatgaggacatgatgcgaatgatgggtttttctaattttgacacaactaaaaataaacatgtcgagggaaatgcctctggtgagtcgaagatcaaccgggcgcgcaaatatcgtcaatatatgaacaggaggggaggctttaatcgtccattggattatgttgcctaactgtacacgttgttttatgtaattgtttcacttttatatttcttttttgtga

SEQ ID NO: 45797 - DNA, 1256 bp, Heterodera glycines
tttaaatgtataatttataaaaactatttttttatggtctgtaaacgacattagtaccaaaaacagtgctttgacatgcagtaaaatgtaaaatgacaaaattacattttgaatgaaatgtgtcggtcgtattacgaaggcattcagcgaattctcgagtctgaccttttaattactaatactcaactaattacagtattagaagattggtacgacaatacggtaagaaaaatatcgactgtatttatgtggactttcggaaagcttttgattcccttcctataaacattttaataaataaacttcataacattggcattaagggaaaactgctaagttggttatctgaatttttaagggataggttttacagagttaaaattaacaataaatcttctaatttacatccgattcagtccggtgttccacagggttctgttcttggcccactgttatttttaatatacattaatgacctcccgcaggtaatcccttcgggagttagcatcaagctttttgctgatgatgtcaaaatttatgtctcttacaaaactcgtgatgaaagaagcaaattaaatattgcattagaaaatattggaaaatgggctaatgcatttggtttaaacatctcccaaaataaaacatttattttatttattggcaaaaataattcaaaacaacaatataaattatttaacaatattattaatgaggttgaatctattagtgatttgggcattttgattgataataaattaagattttctaatcattatactaaaattactaaagctgcttatttaaggattcgcaatattgccaaaattttaaaatcccgctctatacgtatttggaccaaagtttataagacatatattcgtcctcttttagaatatgcgcctgaaatttggaatccgacaaacaaaaaagatataaataaattagaaagatgccaaaaatattttacaaaaattgcattatttaaatgcagacttccttacataccttacaaacaaagacttgatttattcaaactttagaagaaaggagaaaaacaattgatttagttcaggcattcaaaatcattaatggtctcacttatcttaaaaaagacatattcccacaattttctggtcacatcccttataatcttagacgtaaagttgtgttaaaatcacaatccagtaaaacttcaaattcctttatcaacagaacggagttaatatggtgtagaatgaagaaagatataatagatg

SEQ ID NO: 45798 - DNA, 392 bp, Heterodera glycines
atgattgaaattactgtcaatgatcgtctgggcaaaaaagtgcgaattaaatgcaatccgacggacacaattggcgacctgaagaagctggtgtcagcccaaattggaacaaggtaaaaagtcatcgccaattggaaaaacttctgaattctctccccttttcaggtgggacaaactcatcctgaagaaatggtacaccacttacaaggtgagcaattgcgtaacacaccgttataaatatttaggccttattttcccatccttttgcttttcaggaccacatcactttgcaggactacgaaatccacgacggattcaattttgagctatattatcaatgacttgctgcgcgcgtgttcattacttttgtgatttacattacattttcccta

SEQ ID NO: 45799 - DNA, 812 bp, Heterodera glycines
atggaaagttatgcccgtgggtgcgaattgtgggtcagcggcaagttgcgcggtcagcgtgccaaggcgatgaagtttgtggacggagtgatgatccattcgggtaacccggtcaccgagtacatccaggaggcggttcgccacgtgcaaatgcgacagggtttgtgttttaaaatatggaaaaatattttgggatctatttgaaagatcgattaaaagggttttcgggtaccaaaaatacttttgagttagtttccaatgccatgcgatcccatttttctatttttttcgcctctttgttcaggcgttttgggcatcaaagtgaagatcatgttgccgcacgaccccaagggacagatgggaccgcgcaatccgttgcccgaccacatccaggtaaaatgttctacaaaaactgacacacggaaccgcataactcgggatggatacaagccggaggatctatttttgaaaaaaaaactccatacctttagattagagaaggacggagaatttgctattaaaaatctaaaattctggttttcctagacaaaaataaagttttgatacttttccctaaaattgttccttttccattacaggtcaaagagccaccgattgacgtcgcgccgaccacgccgtactcggagcaccgcgaaccgatgaccactggcatgccgccccagacacaaatgccgcccgcccatcagcagcagcagctgccgatggttggccaagtgccgtccccggcacagttttaattgtgaggaagaaccgctgatgatggtcatgatggaggagggggagatgttcaa

SEQ ID NO: 45800 - DNA, 1692 bp, Heterodera glycines
atgcgcaaagcttttaagtcctgcaacataatcgaccaacattcgctcgatcgtcagaccttgccgcagtctttgcttgaacaataccaaaattgcgaccctcctccacaactcaatcagttgaacccttatagggaggatgaaaaggaagccctttgctattacactgacccgagttacttcttcgaattgtggcgaaataaaactttgaaggaatgcgatgggggattggctgagaagaaaagggccggttggtgtgattttgtttttggcaccgaatgattcatttttaaggccgttcttcgaccagtccgtctcgacaacgacgacgtcaacagcaacaacaacacaattttccgcaacataatgatttgtctgcccaccacgtgtcttcccgttctacggattattcgcgttttgagccacaaattggccaccagaatggcaaatcccaacagcacaaactgcgccatgggtttggtccggctcatttctctgtctcttccgttgctgcggatgttttgcactttcccgcagaataccaagttcgttttctattcctttggtaatttctttatttttttagaccccacaaagtttgatgattggcaacagaattactcacaatcaacaccctccgcccggaatgtcaatggttacaacaaatgagggaactgtcacccaacaacatcacaagcaaataaagcctaacgagcactcaccatttaatttgtcctccaatcattcttctggcaatagcaatcagcagtttcgcgtgaaagaacggaccattgacggaaaagccgacgcaatgaacacgacacaaaccgataacacaagcaaaaatgacgcagcacatgctgtggcttcgaggatggacgtgatgtttctggatgatgaggacgatgaattgccaccgcctcctcaaaatattctgtcttccacagtgaacacaaggaacttccctcgaattgctccctccgtttcatcctcttctcccgtcgggtctacaaactcgtccttagccgctccgactaatgaaccgctgaaaagcaaattcgaattcatatcgaccaatggatcaacggaaacttcggagttagggacgacacggcacataacaaatgaacagcaatctattaatgttgctgttattgaacaacgtcctaaccaactccattccattcaacaagtaacagagggaacgattgttaaatgaaaagtaaatgtttagcaattgcttttcagatccctccgtctgtttgcaatgccccggcgcctcctccaccgcctccgccaccccctcccaatttttctctcaaaattgcaaacgaagggacgaaaactttcggtggacaaaatgagaatgaacagccgaaagatttacaacgcaaatcttcaaacacgagcggcgctcaagtaaaagaagaacggaaaaataataaaattaaaaaatccatgaaaattacatttgattttaaggacaatcgctcccttctgttgatgcaaatccaagagggcgtcaaactgaggaaagtccgtcagcaggaggaattggaggagaaacgagcggttgccacttcaaatgacgtggccgcaattttgcgaaagcgaatggagcattgtctgggcgattctgactcatcgtccgaaggaagtccatcccccgaggacaacgaatgggacgactga

SEQ ID NO: 45801 - DNA, 1008 bp, Heterodera glycines
atgtccgtttccgtcactcaaacgatcactcgaaatcggaaaagtgcggaaaagatttccgagggccaattcctttcaatggaagtggacgaattgcaagagttggaagaaaaggcgaaaaaggtaacacccaccgcttttggcattttggcacaaattaattggcacaatttaagacgcagttcaaaacccaaattgtgtggcgcaacgtgatcctgtacctcattttgcagaccggggcactgatcggagtttaccaattgttcacaagttcaaaatggctcaccgttttttggtgtaagtttttaatttcaacgattattacccaaaactttcgttacgaaatacttttaaatgcttttgtctttccttagctttgccaaatggccaattgtttaggccttttcctttggatggtcagcggagttggcattacagctgggccccaccggctgtggtcccacaaaagttacaaggccaagtggcccctgaaggcgttgctggtggccatgaattgcgtgtccttccaaaatgacatcatcgaatggtctcgggaccaccgatgccaccacaaatggacggacactgacgccgacccgtaagcattggcagcagaaaatgccaaaagcgaccaacaaacactccctcagacacaacatcaaccggggcttcttcttcgcccacatgggctggctgctggtcaaaaagcatccgctggtcaaagagaagggcgcctccctggacatgtccgacctcacctcggatccgttgctgatgttccagagaaagtcagtcgcttctccttgccgttttgatttggcatctcctctttgtttctgttcaggtactacttgcccttggtgggcatcttctgctttttgctgcccactgctatccccgtgtacctttggtctgagtccgtttgggtgtccttttgcacttccgcactgttccgctactgcttgaacaagcacgccacgtggttcatcaactcggccgcgcacactt

SEQ ID NO: 45802 - DNA, 3745 bp, Heterodera glycines
  unsure (1)..(3745): unsure at all n locations
gagggtcgagcaatgtgacggacaaggagtacatccggacatgtgttgtgaccagtctggaggacaaattcatgacggaggtgtccatgtgtttggtctgtggcagcatcggacgcggcactgaaggctcaatgatcacctgctcgtgttgtgcccaaagcttccacacctattgtgtgctaatgcacgacaaagtcggtggtgatcattcattcagtttaccatttgtaaatcggtgaacgttttttcattcaagctcgtatcaaaaaaaatttggaagggggaatccaaagactttttttgcccttcgagtcaaaaaaattttcttcagtgttattgtaaaaattttagcgccgaaaagcaaaaaaagaatttgtggccatttttcctcaataaaaggactaaattttgccattttctgaccaaatttaaaaaatagtgtaatggggtccggttgtgccgataggcgccgccgggatttttttggaatttaaagcatttagtcaagaaaattaaataaaatttttaaaccccctcctctcttgctacgggccttttattcgatagataattgtagatttaagttatgagagtgttgattttgtatatttgttaaaaccctcttgttccaattaaattggttaaaatcaaatttcatttctcagttgaatccgactgtgatgaagcggggatggcgctgtttggactgcactgtctgcgagggttgcggcagtggcgaggacgaaccgaatttgttgctttgcgacgaatgcgacatttcctaccacacttactgcttggaaccgcctttgggtatgtgtaaatgaaaatggctttttactctctttcgtactctaactttgcagattgtatcccgcgcggttcctggcgttgtaaatggtaagtgccaatttttcataatttaaattttagtaatttactcataaatctctgattttaaaaagactattccaattctttattactcaaaggtgcgcgacttgttctcgctgcggtgctcagattaaacttggctccgatatgcagcggttggaagggttctgcgaaatttgctattccctgcgcaaatgtgtgaagtgccaagcatcctacgaaattggagatttgatgttgaaatgcggacgctgtctcaggtgattaatctattaattgttagattggaagttaattatccttaaaattgaatttgaaaagcatcgcttccctcccgattttataggatgcacttcattcaccccccccccccccttctgaaaaatcttcaatataaatttcaaaaatcttacaattaggaaatttttcataaatttttagattttaggaaaaaaattttgattcgattttttattggaattatgaaaaaggggcgggggacgacgcgggggggaaactgataaccgggggagagggtcgaattgctctcaatttttactatattgtaaatgtgagaaatccgtcagatggcttcacgcccgctgtgagggccttacaacggaggaacaggcggaaaatgcggccgaaaatgcgtttcgctgttcattctgtcgacctcaaatattccgtaagttttgttttccacgcctgcaaactgttacaattttgtcccaaatccaagatgacgcttcaaatgtccccgttgtggttgacaatgtgatggtcagcaaatcgatggtcgaccaaattcagggcatttctaacattcgaaagcttgccggacttgccaattttggagagcatttcgggaacatagctcggtccgtctcatgtgaacaaggttgtttcgaattggctatgtcggttttttggttttcattcaatgtgttcgaatgaaatatggtgacatcgatcgtcggattaacacagtcttttctgtctgaaaaaccacaccaaaatggacacgggggagagtgtcactttcatactggaactgacaatgagacaattttgtgagaaaatcgtaaaaaactgtaagagtaatttttggacggcacacttttacacagttggcaaatggtttggtaaatgtaacacatattaaatctgataaaattatccatttctctgttatttaaaagatgacatggaattgagcgacgaattgcaagagcagttgatcgcctccgtttttgcgggccgaggccgtggctgtggcagcggtggtggacgcggcggtgggccgggccgacgaatgctcaaaatgggcgttggcggattttacgttcgcactccgaaaagccgacttccctttttgatgggcagcggtgccaatatgacaccgatgaactcaaccgaagacgaacaacagcaacaaatgatgggtgccaacatgttggaggaggacttgggcccaaatggaaagccgcggattcgcaggccaagaaaactgaaaaggccgctgctggaggatgcgtacccgccacaaattcaggtgggttgtgcatttgcttacttaatgtttgatatctctattttgcatttttttcgattctcgaatttcaaaactttctaaacattaaattgtcaggaatcgtttttcggtgttgcggcggttgacagccgaacactggcggaacaaactgtggatgagccaaccttgagcgactacaaaaaggtgttgccggtcgtcagcggcaccaaatttgccagcgaactgtccgaacattcggccgaactgttgcgcaccgagcaggagatggacatgttgggcgacattccgttggtggagaacatcatggacggattggacatggagggactcgacttctcggacctaattgttggagaggaggacgagccgatgaccgttgagagcagtagcaacacaatcgacccaattagcggtcattaattgccctcccccatatttggcacattatttccatgtgttcttttcagatggttacaatgccggcagttcgtccaatttggttgcgcacagtgttgtctccgaggtgttctcgccctcgtcctgctcatcaatccgaacgcccagtcgagtgttcgagcccggaccaccgccaatggtggcggcgtcctcaacggcgacggctgtgttcttgcagaacaatgcaccaccacaaccacccattggacagcagcaacaagtgctttttggccaatgccatgttatttgtgttgcattctcactcatatttagacaattgacaatggggacggtggtgggaaaatggtggaccaacaacagaagcaaagtgcttcagctcttacaactgaacgttgggaagaagacgaacccttgggggacaaggcgacaaaagcggcggtgctttatgcaaatgtatttccctttttcggatgtttctgtttaaaatatttctttcgttttcctgttgaggtgcatcacacgtatttgaaggacaaattcccgatttggacggacagagttcgaatgatcagccgaatttggcgagacttgaaccccgagaagagacaagagttggtcaaccactcaacaagatgcacgcacattcatttctgttttcaattcagattcgttgaatgggcgaggaaaaaccgggccaattgtccaacaactcgacgacgaggaagacgaacagtttcgacagaagttgctcacaaccagcagcaacaaatggggcaacagggagcagtccaaaaccaacaaccaccaacgccaagaacagcatctctgttttgattggacaacaacagccggatgcaccctttcaaggnggagcagcaa

SEQ ID NO: 45803 - DNA, 973 bp, Heterodera glycines
atgccaccaacgagtaaaaaaacaggtattaataatgcaaattgaatttgactgtgttctttaatttaaaattttttaggaaaggctgtcgcaaaggctgtggaggccaagaagaagctggccaaaggccagcacattgtgcgcaaaaaaaacatgcgcacgtcggtgcacttttaccggcctcggacgctgaagctggcgcgttcgccgaagtttccgcgcaaagcggtgccgaaacggaacaaactcgactccttctccatcataaaacacccattgaccaccgaatcggcgatgaagaaaattgaggacacaaacacattggtgttcatcgtggacgtgaaggccaacaaacatcagatcaaaagtgcggtcaacaagctctacaacatcgaagcacagaaggtttgtccactctttgttttggtcaagaaaatcgagtatatgcaaattggatgagcgcaaaactgaatttttgggggccaaattttatttaagtttcaacttttcgaacaggcacttttaaaatagcgccgaaataccttttgctcacttcaattttatttattcgtatagatccgcattcgacttaggcgacatcaatgatatcttcaatttcttaggccataacttttttctttcttagtcaatgcctaattctgttgccaaccgaaaactttcccagtattttttaaacataagaaaaggacgacattggtaacaaaaaaaagctatagcataaaaaaactgaggatagtcattgattggacgtctaaaagtcgattgaatttcgcaattgtgagcataaatgggaaaacgtccggtcctctaacaaaaaatcagtatttcgtcatctgtattaattatgttggttgaataattaatttttaaatatttaatgactatcaaatatcagtcacaatcacttgtatgactatgtctaattctgtttaggctatcgtggcttgaaaaa

SEQ ID NO: 45804 - DNA, 1313 bp, Heterodera glycines
atggtcgacttggagccaacagtgatcggttgccatttgttgtttttcgttggattatccgctgttttagacgagatccgcactgggacttacaagcatctcttccaccctgaacagctcatcactggaaaagaagacgcggccaacaactacgctagaggacattacacagtcggcaaagaaatcatcgaccccgtcttggatcggattcgtcgcatcgcggataactgcaccggacttcaaggctttctcatcttccattcgttcggtggtggcactggctccgggttcacatcgctgcttatggaacgtctctctgttgactatgggaagaagtctaagctcgagttctccatctaccctgctcctcaagtgtccaccgctgtcgttgagccgtacaattcggtgcttactacgcacacgactctcgaacactctgactgtgcatttatggttgacaatgaggccatctacgatatttgtcgtcgaaatttggacgtggaacgaccttcttacaccaatttgaaccgtttgatttctcaagtgaagcaatagctaatgaatgaatctgaatctatcacattttttaggttgtctcttcgataaccgcttcacttcgatttgatggtgctttgaatgtcgatctcactgaattccaggttcttttgtagtctgctgtttcttggatatcaattattccattttagaccaatcttgttccttatcctcgaattcactttcctcttgcgacttattctccagttatctcagctgagaaggcctaccacgaatcattgtcggtttccgaaatcaccaacatgtgctttgagccgtccaaccaaatggtcaaatgcgatccacgtcacggcaaatacatggccgtgtgccttctctaccgaggtttatcaagcctttatacaagtcggaatgttatgtttttaggtgacgtcgtcccgaaggatgtaaatgcggccattgcttcgatcaaaacgaaccgttcaattcaattcgtggactggtgcccgaccggcttcaaggtcttgaagatgtctcgtaatctattagatattttattccaggttggtatcaattatcaacctccgactgttgttcccggcggtgacgttgccaaagtcccacgtgccgtgtgcatgttgtccaatactaccgcaattgctgaggcttggtctcgtttggaccataaatttgatttgatgtacgccaaaagggcatttgtgcattggtacgttggggagggcatggaggagggcgaattctccgaagcacgtgaggatttggctgccctggagaag

SEQ ID NO: 45805 - DNA, 186 bp, Heterodera glycines
ggacatgccgttggagacattcctggagttcgtttcaaagtagtcaaagttgccaacacgtcattgctcgcacttttccgtggaaagaaagagagacctcgttcatagaaactgacttcgcatgataaaggatttttcctttcattgtttttgttgattgcgattccgaaataaattgttgttgaa

SEQ ID NO: 45806 - DNA, 896 bp, Heterodera glycines
ggcgtacacaatgaattacaattggaaggatgcaattttttgagacagcacattgttttttcactactaactggtaggacaatcacaattacaaagattcggtcttacgacgacaatcctggactgaagggtaacaaatttatttggaaaattcgttgtcatgataattcgaaataaaaattttatttaaaacttttttcgggtttggggttcgaattgggtcaaaacagatgccagaatctgtttttccgacctcgaaaacccctaaaacaagtttattcatgaaaaaaaaattttgaaaatctggacgcagataacccacaagtacccttttttaaaccaaaaggaattttttttgttacttgttaattatctatcagattttcaaaaaaaaatcaaactttttcaaaataaacttctcttttcgggtttcagagtcggaaaaaccgatatctcgtgaaaaaaaagttagaattttttatttttgaaagtctgaaggtggctaattaatgggacctagtaaaaaaagaatttttaaaaaattgagaatttttcatttttctaggactaaatttattttaaatctttttaaaaaaacagttattttaataaaagttgagtacaagttgccccgataatcctttgatttcttaagaatttgagcgcatttttctttccatgatcaaaagattgacgaatggaactgagctcaaacttagtaaaaacggtcagtcctttgatttttgtcttaatagttttggctatgccatccatttgacaggtacggaactcagttttcggcctggtctaattcatggaggagaattggagttcgactgtggggttcaacgttgtatcagttactttttggagcctctcattctcatggcgccttt

SEQ ID NO: 45807 - DNA, 2713 bp, Heterodera glycines
atggcgcacccagccggagatgtggtgagcgattggtgcttttcattttctttttctatgtcatttcattttttcaatttttcagaccgacgcccaagtgctggagatgtcttccgaccaaattgacgaacgcgtacgacagctcgacgaagaaattcgcgtcatgagggacgaaatgcgcaaaattgcgtacaacatcaaaacaatgggaacgaagacgaaggagaacaacaaacagatgcagaaagtgagcaaacaaacaaaaggaggaacgacaaatttatgacgaaaagcattttcagtacatgaaaatgccgtggctggtggccaatgtcgtggaaattctggacctcgcggatgaccaagcggaaggagaagaaggctcgagcagcgacttggacgcgcgtcagaagaaaggcgcagtcatcaaaatatcgaagggactcgtcatgtttttgcctcgcattggtcgcgtcggcccagacgagctgaagccgggggacctggtcggcatcgacaacgacacttatcacatcatcgcaaaattgccgccccattttgaccgacgcgtcaaggccatggaagtggtggaaagaccgacggagacgtacagcgaaattggcggatgcgagacgcaaatcaaagagttgcaagaggccattgtacgtgtcaaaaaacaattttggatcaaaacttcccattttctcattttcaggtgcttccaatgaccaaaaaggagctgttcataaagattggcattcatccaccgaagggcgtgctcatgtatgggcctccaggtgtcgtttctcacaaatcaattcaaattttcattttttctgataggtggcggcaatttctctcttttttaaggaactggcaaaacattgctcgcccgtgccgttgcttctcaaacaaaggctacctttctgcgtttgtccggtactctgctgaaccaagtgggcctcggcgacggggcgaagatggtgcagaacgcattcgagttggccaaacagaaggcgccggctatcattttcattgacgaattggattcgattggtgcgcgcatttttgaatttgctttactgacattgtgtttattccttctgcaacgcaggcacgaaacgattcgacgcctctgacacgggggaccgagacattcagcggacgatgttggagttgctgaaccaactcgacggattccaacccaacgacgacatcaaagtgagtggtggagcaagccaatcaattcacattcattttgttttcatttaacgcaggtcattgctgcgacaaatcgtgttgatgtgctcgacccggcccttcttcgctccggacgttttgaccgcaaaatcgaattcccagcaccaaatgagaagggcagggaacaaattcttcgcattcattcgcgccggatgaacgtcgagtcggtgacagaattttaggaaaacaaattattcctcgttttcagcaaaaatgtcaactttgttgagctgtcgcgctgcattgaggacttcaatggagcacaatgtcgagcagtttgtgtggaagcggtgagcggataaacattttttgaggatatgcgtcagcttatctcatttttacagggaatggttgcacttcgtcgtgactccactaaaattctgcatgaggatttcatggacggaattttggaggtaattagtaacaatttgagaaattttggaggaataagccaaacttttcaggtgcaaggcttgaagaagaataatctggtgtattatggctgatgggcgtcttctccggcggaatttaactgatgtgccacggctgaacactgcccagcaatttgtattgacattgacccatttccatgtgatgccttatgccttgtagcctgtattgtactacatttcgtatatgtgtttttgccactgtatttcatgtacaaatgttctcgtttagtgaaattgttgtttgcgtgtgtttgtttatattatgtacataaattattcgcgcatatagagaagtacccgatagcaaactgtaaccgtataagtgagcaggaatttcgtcactgaataatacatttgaaactcataattaatatttttaggtcctaaaaaacagaataattgctaaaaacgagaaaaagtgccaaaaaaactaaaatttagggggtgtaaaatgacaaaattttattccaaaagcttgagttaaattatttttaaaattacaaatagttcatatcaaaaaatataataataactagggtgcggattcttaggtttttacttattttttctgcggctttaactcgacgagaaatgcacgaaaaacacattttttgttcggaaattcttcgttttaacgtccctatccgaccctaggaatccctattttggatattcgcccctaaaaatccctattttgagtgttcgcccctaaaataagtttttatccctattttggcgtttcgcccctattttcgcccctatttcgcgaattttttgcccctatttaggtccctaaattggaatttttcgcccctaaaaatccgcaccctaataataactttaaatttatgaatgattgcaaaaattcaatttattttatttaagaaaataattagcaaaaacttcgcccaatcagtgacactttttgcagcccttcgaattgtcctcagacaaatcgcaaaagccatctttgcaacggtcacagctgaacaaattaacga

SEQ ID NO: 45808 - DNA, 1615 bp, Heterodera glycines
atgcatccatttaaatcatttttgtggcttttaccgcggcacgtgtccattgcattcgcattcgccacgctctttggactgctcgccgctgccggggcgccacggcaaatcgttgtacaaatccttcaaattggcattattttgaaaggacatttgaaacaaatgtatgtacgttaattcacttggcactgttcacaattcaacccttttgtgttgtgtttgcattcgtaaatgtcatggacaacctcataagaacggctttaaatcaacaaaataataataattaatcaaattgaaaattgtggcacattgccgcgcctggcatggtggccgtactcatattttgtgtatcatcgtgctgaattaagatttaatttgaaaaatattcaaaataggaaactctcgcacattttggcgcactgcaactgcacacaatgcaaaaaaaacgtccaaaattgtgtataaaagtcgctgttgtgatgcatttttctcatattttactaacggggcgtaacacaacgagaagatggcgcacccagccggagatgtggtgagcgattggtgcttttcattttcttctatgtcatttcattttttcaatttttcagaccgacgcccaagtgctggagatgtcttccgaccaaattgacgaacgcgtacgacagacagctcgacgaagaaattcgcgtcatgagggacgaaatgcgcaaaattgcgtacaacatcaaaacaatgggaacgaagacgaaggagaacaacaaacagatgcagaaagtgagcaaacaaacaaaaggaggaacgacaaatttatgacgaaaagcattttcagtacatgaaaatgccgtggctggtggccaatgtcgtggaaattctggacctcgcggatgaccaagcggaaggagaagaaggctcgagcagcgacttggacgcgcgtcagaagaaaggcgcagtcatcaaaatatcgaagggactcgtcatgtttttgcctcgcattggtctcgtcggcccagacgagctgaagccgggggacctggtcggcatcgacaacgacacttatcacatcatcgcaaaattgccgccccattttgaccgacgcgtcaaggccatggaagtggtggaaagagcgacggagacgtacagcgaaattggcggatgcgagacgcaaatcaaagagttgcaagaggccattgtacgtgtcaaaaaacaattttggatcaaaacttcccattttctcattttcaggtgcttccaatgaccaaaaaggagctgttcataaagattggcattcatccaccgaagggcgtgctcatgtatgggcctccaggtgtcgtttctcacaaagcaattcaaattttcattttttctgataggtggcggcaatttctctcttttttaaggaactggcaaaacattgctcgcccgtgccgttgcttctcaaacaaaggctacctttctgcgtttgtccggtactctgctgaaccaagtgggcctcggcgacggggcgaagatggtgcagaacgcattcgagttgtccaaacagaaggcgccgactatcagtttcattgtcgaattggatacgatgggtgcgcgcattggagaatttgatgctagatga

SEQ ID NO: 45809 - DNA, 427 bp, Heterodera glycines
atgtctggtggtggcaaagatcggattgcagtttttccgtcacggatgtgagttttcgcttacactttataataaatccataccaaaaataatcattaagggctcaaactgtgatgaaaacgaggctgaaaggcgctcaaaaagggcatagtttactgaagaaaaaggcggatgcgttgaatatgcgatttcgtgaaattctgaagaaaatcactgaagtgagttatttacaacaacaaatgctgccaatgtgtggaattgcggtccctacgaaaaataaatttaaagtttttgttttatttttttctagggtaaaaaatgtgctgatagcgaatatgagaacccgggggttttcagggcctctgatcacgaatctgatatcagatttgcaaaaatcattgattttgaaaatcatagattttcgtaa

SEQ ID NO: 45810 - DNA, 4005 bp, Heterodera glycines
aaaatttacgaaaatctatgattttcaaaatcaatgatttttgcaaatctgatatcagattcgtgatcagaggccctgaaaacccccgggttctcatattcgctatcagcacattttttaccctagaaaaaaataaaacaaaaactttaaatttatttttcgtagggaccgcaattccacacattggcagcatttgttgttgtaaataactcacttcagtgattttcttcagaatttcacgaaatcgcatattcaacgcatccgcctttttcttcagtaaactatgccctttttgagcgcctttcagcctcgttttcatcacagtttgagcccttaatgattatttttggtatggatttattataaagtgtaagcgaaaactcacatccgtgacggaaaaactgcaatccgatctttgccaccaccagacatgtttaaaaaaaattatttaatcttattgtaaatcacttaaaaaatgtacattcattagacaattcgcttctttccgagcgagactaaaaatcatattcaaaattcacttttttgcgccaacaacaaatctaattttaaatctgccaacttcattcaaaatttgacttttttcgtgaattttttgcaatttttttatgactttttcgagattttcgtgatttaagacctaaatttcatttagaataattattttcaaattttggatgctaccgggtagcaccaacacagctccatcgggccttgccaacgcgttaacaaacgagtttggaggtaataaacgcggaggtttcatttgtcatacaagcattagtataaaatcgctgaagagaaaaaaacaagccaaccttcaattgttaagccccataattatttgatttcttggtaatggtccgtaataaattaaacatcagttcgggtggtttcattttttaaattgtccagttccagtgagcttatcccaatgcttatgctcatgacatgacaattggtcttccaaattgtttatagaagacttggccaccgcggtgttcagtgaggacatacaggaagaagcgaactcatattttcaacaggtttcattttccctcaactttatttgattaaattttcctctttttgtgtccatagatttatgctccagatggtcgtgtctctgtcaatgatttcatcgcaaaactcaaaggttttcggcattctggaaacatcaaagagcgcgtgagtgttttgtcaaccaacgaacgataattccttctcccgtctgatagaaattttttaaactatttttttttaatttttaacaaaaaactttttcaaagaaaatttacatctctttctaggaattgctgctgtgtgtggtgaagaacttgtttgatgagtatcgcttttttcgcgaatatccggagagggaacttcgcaccacggccgaagtttatggaggaatcattcgggaagagataattttgtatatatatatataattttttactttttgaattcatcgctttcaggcagccattagttaaaccattcatttaggaatatccaatttgcgactgccattcgacgtgtaattgaatcgctgaatgacgagccgggcagcgtactttggacgtttggcattgtggcactgagtgcatgtcgcgcatgtctctacaaatatcccaaagtgtgccatatgatcatcaacacgaacagctatggccggttcccgcccggtctgaaggactacgtcagtgccggtgcgctgggccaactgccaatgaatcactcagcggcacatgacgtcggcctattttcgtccaaccaacaaccacagccgttctttccgccatcctctgttgaattcagcgtcccaattctgccgatggcgaaaatgtccatgccgggccttggtgccgccgctgcgaacatgcgatttaccacgcccagttgggggacgagcacggtcctccaaacaacaaaaaacacgggttttttctgatatttatatatttagggaaattcaattttgaatgtgaccaacgtggacacgctgatctcggccaccgaacgcgagggcaaccaagtgaaacagccgccacaacaactgttcgagaaagttgcattcacctgcaacaatttgtgcgcgaacaatttactcgacaaagtcagtctgtgtcgtgatttgttgacaacggatggatgatttattcaacattttgtttgttcgttcagactcaagaattgactcaactgatccgcgaaaacggtgacgagttcttggaatggtttgcccaatatttggtgatgaagcgcgtcactgtggagcacaattaccaacaactgtacaacagcttcctggtgttgatcaacaacacctcgttggacaactacgtgaagaaggagacgtaccgcaacatcaacattctgctcaaaagtgataagcaacagtcggtgtccaattttggtgaccgccaactgctgaagaatttgggccattggattggcattattaccattggacgagatcgaccaattctgaacaaggacttggacatgaaatatctgctctttgaggccttctacaagggtcagcatgaactgctgtacattgtgccgtttgtggtcaaatgcatcactgcaagtgccaagagtcaactgttcgggccccactgtggttgggtgtacgccattctgaaggtgctcgccgaaatacacaacgaaccggacctgaagctgaacttgcgttttgaaattgaagttctctgcaaggagctgaacgttaacctgggaagcattgaggttggcagctacctgaaggagcagcgacgtttggtcagtgtgaaacaaaagaaaattccgatgattgagcaaaatctcctttaagcccagattggtgccgccctccaaactcggcacagccgcagcatcttcaacattggcacaatgtcagttgccgccaatccaaccaccgcacattggcgctgggatttcgtcacacagcacggcagattatacgccaactgacatagcgaacatcctcgctgaaatgagcatctcccggaaatattcgccggccagttatacgcccggcggatcgcaacaacaagtttcatcaataacagcccatcagactctgcccaccttcaactacgcggacattgctttgcaatctggtacatatttatccattatttaattattactaattttactttttaaggaattttgcaaatcatcgtcattcctccgcatttgatgcttttccaagttcatccacagcttaaaacaacatgcaaaatcgctattaatcatgcaatcaaagatgtctatggtaattaattcatcgtaatacattgaaatgtactaatttattatttatttattttttgggtggcgtcgctgaccgcgcaattagcgttgcaatcgctgccactgaacaaatttgtcgcaaggacttcagcctggactcgaatgaacaaaatttacgtcgtggagcccaccaaatgatgcgttcaatgactgccgctatcgcgtcaattacgtgccgtgaaccgttgtcacagcaaatgaacagcattctgagaatgtatctgaccgacgcgatgggaaatgttgtgcctggaagcgaccaggccaaaatggtggaagaagcggccaccgctgtgacggacacgaacataaacatcgccacaaatttcgtcgtgaaaaacgcatgcgaaaaagcggttgccgacattgagaaaggacttgagtcggaatatatgtcgcgcaaaactgcttcagacgaccgtccgttccaagttgacgcggacatggccgagatgagtgaaaaaattccggaaatgatcagactaaaggaggggccgatcagtgaggcgatgctgaaggtgtacgacgacttttcatcgtaatgaaattttaatgattcatttcgtccccattttttaatattttattggaaaaattgtaggaaaatctgtggcttcaaaccattcgcacccgaggacagatttatcggattcacaaagcctg

SEQ ID NO: 45811 - DNA, 2296 bp, Heterodera glycines
  unsure (1)..(2296): unsure at all n locations
tttgtgttggcgaagggtcgttgttggtgtccagagcattttgtgtgcgctaattctggtagttattattagctaattagtattcaaaaaatcccccaatttttcatcctcaaataataattattattgtatacagcatgtggtcgacgcttattggagagtggctttgttgaagagccgcagggccgtaaaaattattgtcccatttgctatgaatgtttgatggcgcctgtgtgccgtaaatgcttcttgccgttgatggaggtggcacaacattgggattacaaattaaaaacaaaaaaagattttggtatcggaattgggatgtattggcaattttttngaaacccatacccccccccccctcccgccgcttgtacaatttcaacgggttaattgcaagtcgtacaacaaatttttttaaatctaaaattgaactttttgttaaaaattttaaaaagaaaaaacttgaaaattaaaattttcaatagattttaaattgtaaaattagcaaaaataatcctttaaaaatttttgaatttttcttttaaaaaaattattgtactagcgtaaaaatgattttttgccagaattgtctgaacgcgctgggcgacaaatggcacaacgaatgcttcacttgtacccattgtcgtaaaccgtttggcactctctcattctttgtcgaggacggcaaaccctactgtgaagagggtgaacacttttggggaattttttaaaattattttctttgtagtattaattccttttttttataatccatataatgcagggctaccctttgtacttatttgtaagtattgtacttatttcagctcaaggtacttattttgtacttatttttggaactcaaaggaaattccgatttttatagcaatatttgaaagaaaaattatgttttgaagcgaatgttaaatacaaaatcgtaacaagattcgctaaatattctaaatttcgaaagaaagttctatgatcacattttttagagtttaaattattaattatttacgttaatggctccaccaaaccgcaaatataaatttcacgctgattatgagcgtgaatttcaaggcataaaaaggagcaaaaagggggatttttgaatatatttttttaacaaaattcatgaaaaagcccaaaaaaaatttttcccgtcggcgcctatcggcgccgcagtgccgcaaatttccgctgagatttcaaaaattgacctaaaattttccatgcaaaaattggcctttttggtgaaaatttgttaccagtcgcgctaaattacaaaattttttccggcggcgcctaccggcactgccggaccccatcccatcgcccattcctcaaaattttttggaaaaagcacaccgcaaaaaattgttaaaaatctgattttttgatcccgaatgaactataattatttacaaattgcttatgttttaaacaaaattattaaattcattttcgaaaatgtataaatttctcatttctaagccggaattgctcagaaaaatagttggcggcgagaaatatgttgttaatgcttgattttgttgaataaaaatgtgatttaaagtttggaagcatttgaaaaaatgtacttattttgacccttaaaacttatttttgaccagcgaaatacttattttgggaaattttcaagggtagccctgatataatgggatgatgaggatcactaattacccttactaattactggaactgttcgctgcctccctccctccgagaaaatttatattgtaaaacaagttcttgttttccaactttcttaaaagtttttttcccataaaaatgtttttttttcaaaaatagatttctttctaaatttttttacaggaaaaactaagaaaaataaaacaattttttcgcggaggaaaatgtaatgcaaaacccaaaaataccaaggacgtaaattcattttaatatacaatgaaattgattctatgtacagattggaatttgctgttcaccacgaagtgttcggactgtctaaaaccaattaaagtgggccaaaaatggctggaagcactcggaggccaattccacgcggactgcttcaaatgcgcggtagctttaagtttttctgctccattttagcacctttcttgtcggaggcttaaaattttattatttttccccaaatttctgtttgtcggaggctctaaatttgttttgcttttccttcctgccccagacttgtggcactggacttgaaggtaaaacatacttcgaacgtgaccaacaaccattttgtcgtgtccatgcc

SEQ ID NO: 45812 - DNA, 1327 bp, Heterodera glycines
atgggtgctgaagttgtttcttcggtgttgaccaagtgcttcagtgattctgccgcggacgaggccaacgcgtggcacggcgggtgtttggcattggctgagctctgtcgtcgggggtgccttttgccgtgccaagttccaatggttgtttttgctttgtttccatttggcactttctcacttctctaaggtcattgtcgacctccttccccgtgccctcacttttgagcagttccaacttggctttatgcaggcggtcaatgtgcgtgatgccgcttgttacatttgttgggcctttgcccgcgcttatgaggtttcttttctcgctttcccctacccttcccgtggctcagtgcatttctcctccatttccgttggttctcccccaccctgcgatttgtcttatttgcgttaaatgatgacaattgttcttctttccccgactgagtttgtcgctgctgacatccatccgctaaaatctttctgataacgcaccgatttctcctcactttttttcattgttactttttctctttttggcacattttctctgatattttttccaggcccaacttctccgtgaccatttgccctctttggccggtgttttactttcggttgcgctgtttgaccgcgaagtgaatgttcgaagggcggcaagtgccgctttccaagtgccccccccccttttgagcccttttcattgcccatttaggagaatgtcggccgcaatgattcttttccgcatggcatcgccgttctgacattggtcgattttgtggaggtggcgcgcataaaacactgctacaccgatttggctgttcaggtggcttttcttttttttccagcggatttatttatttttcggttgcccaattcggcgaatacatccgtccgatgatggaccatttgtgcgaattgaaaagcattcattgggacgaaatggtgcgcaaattggcggcggatgccattcaacggatcgcttcttttgacttggattatgcttatgaaaaagtgagtgtcctatcattttcaatcaatttaattaacaaaactcgaaaagaaaattaacaaacttttataagaaattacagtatttcttatattttttttttattccggggattttcccctcgcctatgggcgtacccaattttaccaaactttggctatctttctttctttccctccctcttttcatttatgttatttcttcagattttccccgttttctgtgcccgtctccgttcttcggactccgtcgtcaaacatggcgctttcctcggcgtttctgcgcttcttttcgctctcaacggaacgcacgacg

SEQ ID NO: 45813 - DNA, 2041 bp, Heterodera glycines
ctttaccctgttgtgttagatggcgattttgttggttttatccctcgcaaaaaagctgcgtttattgaacgtcaattgcgcgcaatgaaagtcgcttctcatgatgatcgtgtgccagcatttacggaacttacgcttatcagacattcacccgactctgagaatattcaaatgcaattcgccgcgttttttatttacagcggccttggaagattgatgagaccagttaggaaccttttatttgatcaaatcgagcaaataggttaactgatttaaacttacccttttgaacttaattacatttaggaatttttgaacaagtttacctttccattataattgaccccgaagaggcagaaccgggcgtaacaatgcaccaagaagttagaaagtgcccatgggttggatgagcgtccaacaatttttagcttcatccctcgtctctgttctcattcgctggcaatttgattccttttcccgatcacaaccaatcgcctcgaaatgtgtatcaatgtcaaatgggaaaacagacaatgggggtgattgtggaagggcgctattcaatacaaacatccccttttgcttattgtcaggtcccagtccacgcttggcagacgcgtacggacaacaaaatgtacaaattgcaaactgcgcaaaaacctttactcaaattggaggcccatgacaaatacgaaatggacgaataccctctaggcacaaatgcgtgtgtggccgttatttcgtacactggtcagttgggaagggttaatgggtaaggcgttttacacaatgtgtctggtcaggatacgacatggaagatgcaatggtgatcaacaaggctggtttattgcattgcctttgtcccgttcaacctcaaaaacccgttttaaggcttcgtatcagcgtggctttgcacatggaactgtcgttaaagtgcagaggtatgaattttttgagttttataaacaaaattgcttcaaggatcagtttggttgatcgctccaccggtggttttggtcagagcaaaaatgcggaaatggtctttttggggaagccgaacgaacgcaattacggcatcggtgcggacggcctgcccattgaaggccgtctctaccagcagggcgactgctattacggcactttcagttgagtgtccccggggtgtttaatgcttttgacaattttcagatttggtcagcggacaattcaacgagcacaaattcacgaacagtgagcccgcttattgcgggttggtccgaattgtgcaggaggcggaccacaaaaacaaaaacgtggtaattcattcgcgccgtgcagcgatttttgcctattttcattttgaacattttgtcccttttccatgccatcagcacgtgttaatccaatggcgaatccaacggaatccgatcatcggcgacaaatttgcttcacgtcatggccaaaagggcatcaattcattcctttggccccccgagtcgatgcccttttccgagtcgggaatggtccccgacattatttttaaccctcacgggtaattgctgttctttttgaatatgaatttaaatgagtcactaatttgaatggtctgcagttttccctcccgtatgaccattggaatgatgatcgaaagtatggccggaaaggccgcagcaatgcacggcacttcttacgatgcatcgccctttgttttcaagtgatttttaaaaaatcacttgaaaacccttcaaaattaagtgagcaaaatacggccattgaacacttcgggaaactcctggccaaatccggatacaattattacggcaatgaaacgatgtattcggggatcgatggacgagaaatgaaggttcagaatggaaggaaaatgggctctttgattgacaaatctccaggtaaaaattttcttcggcattgtctattaccaacggttacggcatatgatagcggacaaattccaagtacgctagagggggcccgtcgatccaagtgagtgaatcaatgatcataagaaactaattaaaaacaatttgcttgtttacagtta

SEQ ID NO: 45814 - DNA, 1302 bp, Heterodera glycines
atgaaggttgaaatcaatggtgcttcaaccacaggatttgccttttctgatcttacaacaaagcttcataaaaatgtcctttcaaatttgggtttgaatatggcaaaccatgtagaaagcgacacaatttcattgactgtcgatgcattgtactatgcttggtaaaagtctttattaaatcaattaattaattattttacaaaaaattttgaggcaaaaatttgctgatactaaagcaattgtgctgataattgtcgccaaaaataggccaaattactatgaatcgtggatcataaagaagaaattgcatgataaatatgcaattaattcggttgtattaagtttattccaatgtgccaaaatgtatgaaaattaagtaattatgaaaaaacaattaattaatttttaggctaacgcttaatatcaaagatttttcattacggttaaacaagcaaattgttgttgctgttgtgtttaatcagcaaactatgctcaacgaaaatacatatcaaatgaaagctcgactgatcattgaacgttccacagcaatcgtaaaaaaaattagatattttcgcaataatattttattttaatattttttttcagaaagcaccatcgcttattgcagtacttgcatattcaaagaaaatccaacaggtcatccccataaaactattttgggatacagtatggtcacctccccccataaaaaaaataaacaaattatatttatcaattaattcgtctcgaggagtaaagcatgaaaaataatgctaatccgttcgctgttctgatttcgatcatcaaaaggcaatttttttgagattttatgactttggcattctgtctaattatttaaataaacagaaaatcttaaaataattcaacaaatgacaataaaaattcattttaagccagttcaatattaaatttaaactcatttccgcaaatggatatctattttcatgcttacttagatccacgatacgaatcgattagtaatataagttgtgccatttttttgtgttgggattgactatagttatgccatattttgtattagccaataatactgattaaaagggcttttaacatttcgtaacttagcactaataaattattaggctctcgcccagcctggcatggttgaacgttttttccctaatcctgaagaagcgccactaatcaaagctatccgagacactgaagcgaaaatatggaccatcgaacgggacaatgataaatttgctgaaatgatgaaagtaaaaaatttcgaatttaaataaatttacaaaaaataaa

SEQ ID NO: 45815 - DNA, 6231 bp, Heterodera glycines
ctggactgatcagtggtgtgccgccacaacagcaggtgctgtcgccggcacaataccaacagatgggctattattacaaagggcctggcccgccgccggggatgatgccgctgggccatgccgaaatgatggtcagtcaatcgtcagcacttcacttgctgcactcttgctacctatttgttgattagctggaaaatttggagaatccgggatggattgaatgttatattttgtagcagggaatgtgccgatgccctaaaaaatatcggaattcggcatttaaggggagggggcctttttcaacaaaaaaatggcttaaaaaatttggctaaatttatggattttgttctttttttagtccgcttctgctcacagcagggaagagcaacaacaacaacaaaagcagcaacattttcaacaggcacagcaacagcagcaaatgttccagcatcaacactatttgttgcaacaacagcaacaacaacaaccgccgccccagggcatcttgtacacgtcacagcaacagggcacaaccgttgctgctgccggagcgcaggtgccgcagattttggacgaaatgaaaaatttaaacaaatttgccgacgttagcctatctcggcatgattgccagccctggcactaattttcacttgaatttttctaaaattgcggcccaaaatccgcaaaattggccattttctggctcaaatcagggtcggtgcattttgcttgcttcaagagttacatggtgtcaaaaatcggaaatttgctcattctcgacaggagggaaagggcgaacctaataataaagtggtcaattaaagataatatttaaatttaattatttaaatttaattttatttgcagaatacgacaaaggtttctttctctattaatctgttcagtttcaaacagttttaaaaactttcaaaataattaaggacaaaattaagtttgatcattattctgcaaatgaaattattgtaaataataattaaatttaaatattactttcattagtaccttttttagaaatttcgccacattttattaaattttttattaaatcaaattttataattttgtaaaattagtttttgttcgagttaaagttaggggtccagaattgggctaaaatgaatgtcaaattcttgatcagcggacccaaaaagcccgagaaatattaaaaaaaattttttttttttttgcaggcagacggatttgaacccatggctaaaaaaatccaattttaactaaccctgcattccttcaataaacaaatttccaatttgtacccaaaagtagaactagcataaacttaattgggcccacaaaaagatgggcatattatttttatttttaaaatttattggtaaatttttcaaaaacgatcatttaccgtatacagcagcagtcgaattttggtgccgggtacggtatgcagcaacaacaacagcaacaggcaaagcaggcggcaagcgcagcgaaggcagccgctgcggcacaacaaatgatcaaaagcggcggaggatccgcgacggcgccgggtgccggaggcggtggccaatctgcagcggcggcacaaccgtacaaccagcaacaacaacagccaatgttctacaacacgggccagcaaccgcagccataccaagcccaacaaccgcaacaacaacaacaacagcagcaggctgctgctgctggacaatatgtggggcaaggggtttaaatgccccctcccctcgggggtcgttttcccttcggtcaccccccacccgtctgggaaatttacaaaaaattcaaaaagaaaaactgggcgcctggatttcttcttcgggtcactttcccccgggagcagtttcgttttccattccccccgaaaatcaaaaaaacaaaaaagtttcatgcagaaattttcaaaaaaaaaaaaaagtttataaaattttctaagaaaatttcaagaaaaaataaataagaaccattttccagagaatttttcataattttaagatgaatttgtaagttgtttttttttcaactaatctaagtttgaattgtttattctaatctaatacaaaatttaataattgggcatatttaagccgatgatgggcatgccttcccaaccatctgctgctggctatccccaaatgcaatatccaacgtccgctgattacacccaacagatggccatgcaacggcagggtaaaaaaatttgtaaaatttgttggccctttttggcattttccaacaattttttatattttggcattttggacaattttactttgttttcgcgttctgacgccctgtgtttttaatcgtgttgccctagcttttaaatgcaaaacaaaattcttcaatgttttaacagttttcgtcgccgtggaaaaaaaagcagaattgtagccatttttcgccaaaaaatgaccaatttttgccattttggtgtcaaattatttttccacttttcttacaattaaaagtttaattttcattttcgtttttttttgatttttgatcggctaattccaaaattgcgcgaattcaccgttctttgaaattgcaaaatgaatattaaaataaaattgcgcaaaaaaaaaaaatttctgtcgcgagaattgacactttctcaaatcggaatcgtcacagtcacctcacttttttatggaatgattgtgtgatgatcattgacttcacttccgttaatttagggttttttttattatttttaattattaatttgacaatttaatcatttaccggtgatcattatttatcttaatgagtgtgttgaataattaattaagcaattactaatcatcttgttttcgaaaatctgctgctgtaacatttaattttttttaatggttccgttgctccatttcataatttgctaaattattaaaatggactgccctttgccccggataaatcactttttgggggtttttgaaattttttcacagagttttggttgtttttcaaaaatttttattataccatttaaatattttttgtacaaaagtgaattcgggacacaaaaatgggaacaataagtcaattttttcctcggtggccctgtctgtcggtgccaaaaatttgaaaaaagcgtgccgcaaaaattggtgctcgcggacgaaaaaccaaaattttgtgcaatagttgcacaatttcaaaatttgtgccatgcccttccccctaaaaatgccatgccattgtttcagcatactacttgcaacagcagcaacaaatgctggccgctgctgctgccggtggtggtggcggtggcaccgctgtgccgtcctccgccgctgccgctgcgcacattgccggaggcggcggtgccggtgccggaggcgcaccgacgacggcattttaccatcaaagttacatgaatcctcagcaacaccaccagcaacaacagtacatgatgcaacagcagcagcaacaattttaccgtgaactttacgagtgtgatcagcaactgaatgcgttgttgccccaggcccaacaaaacgcggaggcggcaatgcgcgtggaaaaattgcaggcaattctttggcatttataatagaatgccaattttaaattaaatttttaataaaaaaatgccccaattttaattgtttttttttgtagatgcaccgcagctacttgcaagggcacctcattcagctgcagcaacaagccgctgcggttgctgcgtcgatggcatcatcgtccaacattgtgccaccatcattgtccaccgctggcatggttccaatgcagcaacaacagccaaccgcaacatccgctggtgctgacatcattgcatcaccgtccaacgcgtccagccgtgaacaaccgccgcaacaacagtttatgggcgcgcaaccgaccgctgctggcacacaatacgctgctccatcttcggcatatggcatcgctgcgcaaccgccgcaacagcaacaaccgcagcatggacactttcctggtgccactggacaacagcaacaacaacctgttgctgccggtcaaattcctgtgcaacaaaagttgcaaccgtcaagcaaccaacaaccaacctcggcaccgcaacatcaatttggtggtggcacatcgtccgcaccatcgtcgtacatgccaccaactccgcagacggtggtaggggcagctgcagggtacagctcgccggcggcgggcggcggcacgccgcaacagcaacatcaacaaccgacatcggttggcatggttgtgccacaacaacagcaacaaccccagggcattactgcttcccaccagcagcaacaacaacaagcgccgcagccgcagttcacgcaacagcatttggcaccaccgtctgttgcagtgatgtccgcatccagccaagtgcaggtgagttgggcacggtgcatgcggtactacgtcccctccccgggcgtttttatgagaaaatttcaaaaaaaaaatacaagaaaatttccagcgattttttggaaattttttttttttgagaaaacagtaattcattatgaaactgaaaaaattcgctggataatttttttaaaattttttcttgacaaattgaaatttctcataaaaatttttaagattttttgaaaaaatttcaaatttcgaaaatttggcggagtgaaatcagctgtctcccagttgggcaacatgaattctatatgaaaagttggtgcccgggactttgatcagttcccagtcatcctcccaacgcttatgccctgttttgtgtttttaggttaatatccgtcctgaaatgccgggccgaacgctgatcagcgtgtaccacagccaggacatggcaccgccaacagttgtgagcagttcagcagcgccggtggcatcattacaccagcaacaaccgcaacaacacgccgcaacatattcattgtcatcgacggcagatgcttcctctgcagctgcttcagcaattatggcacaaaatttggcaatggctgctgctgcggcggcggttaaggactccattccaccggagcccgtgccgtccaacattgtgcaggagcagaagcggcgccagcaacagatgctattgttgcagcaacgggaagaggaggaccagcaacagcagcagcaacaacaacttgagcaacagcaactgcagaaattcaaacagtaccagcagcaacaacagcaacaacaacagaagcagcaatctttcaatttgggtgcatcaacgatgccaacaaaggtgacatttggcatgggttagataattagatggcacaccacaattgaacattccatcatattttcgcatccctaaatattttgtgaattcgacagagattatgcaacattttttgacggcattttggcaatctaaaaatagttgaaaatgaatagtgtattatagtaattgaattttgggtcagtagaactttaccatttctacaactaaaatttgaggcctcgccagaaaaaaaaaataaattcttaccatttttaacagatttttaccaaaaaattgctaattttgtgggttttttgggaaaatttagcggaaatttattaaacctacaaaattaaaataaaataaactaattaattttccacagacttcgtcactttccacatcaccgccacccaatgcgccaatttcacctgcaaccaaagcacgtgacaatgaagcagttcagcaggatgcagcacaacatcgcttccggagtgccagttctacccaaatggcaccgtcggcggcgccatttcggcaccgttctcatacgtctgcaatggtgccgcaaccggaaattgctgttgaacagctccagcagcaacgacaacattcccagcaaaagtcgccatcaccatactggtcttcgtcgtcacaacagcagcgcgcaaccacaccgcctgaatttaccatgccgtcgtcacatggacatgctcgtcatcgccagcagcaatcttatgccggtggtggtgggtccaccatgtttggcaacagcagcaaagtgccaacacctccgtcacctgcggttgttgtacgtgctccaccaccaccaccaccgctattaccacctgcagtggtcgtcgtacaaaatgccaaagtggcgcttcattttgttgcaaagcatgctgcatcgtcattcgcttcgtgtgccaccgtacgacgaattgttgcacgtgaatcggtggctggaacggtcaaaattgtgccaagaaagccgccgccggaagtgaaaaaggatgcagcaaaag

SEQ ID NO: 45816 - DNA, 517 bp, Heterodera glycines
atgaatagcctgtatttcgaggatttgttcaccgtcaaaaacattgaccccgatgggaaaaagttcgacagagtcagtcgtctcttttgtgacagcgaatcattcaaaatggacctcattttggatgtgaacacccaactctacgccatgggaatcaacgacaaattccggttgatgctttgcacttcgattcgggacgacggactcaccgaagagggcgaatacgacaaatcagtgggtggtcggcttatgagggctgagtattttcggaagacatgcttatttcgcttgtcattttcagatagaaaacattccccgggttcgaatgttcgaatatgtgatgtacggcaaaatttaccggattgagaacgacgagggcaccgcagaaacgagtcgactgaccgcatacgcttctttcggagggcttctgatgcgaattcagggggaggcgaacaatttgaccggatttgagcaggacaaaaacatttatttgttgttaaagaaagttcctaattga

SEQ ID NO: 45817 - DNA, 1771 bp, Heterodera glycines
  unsure (1)..(1771): unsure at all n locations
atgaatattgaaaatgtttttccacaaattcttttgattttaattttgggtattcgttttttggactcggcacctcccaaaaatgaatccgctggaaagtacattagttcgtcaagttcaggtgattatcgaataaaaatttaattaaagtccataatattaatttatttttaattattattttccgtaacaataaagtatttcacaatttgttacggaaaatatcgttaacaatgtgtaaatttattttgtgtgatttgccttatggcttattaattaatcagtgttaaaaaaccaacacaattttcttaaataaattatttatttttatcatacaaaaattgcttaacttaaggaaaatatacggtaaatgcttatatgggcgacatagaaaaacaattaaacacatttcaaactgagaagctaattgatgaagtgaaacgatgggcagaaaatatgggacttaagattaaactttttgatcaaaggtaaggttgatcgaactcgagattgggttttttgttaaaatttttgtaagattttgttctgaatttcaacatttgaaatatattgagtcatatttttgaaattcgcattaagacaaataatttccatttagttataataaaaactaaggattggaaataatgggatcgagaatttgattaggagaaagcctggattccactcggctaactccaatggttttttgaaatgtgaaagggcaactaagcttcattcatttagtgctatgttacaagtggcaccatttacgctttttccgtcgccattttctggaacatattttgatcaagcgtacaatgctcaaacagtaatatatttatttatttattataattttaattattaacataacttattcaataagcccttcattttttaaacgatttaataatttttcataaaaaaatatttaaaatttttgataattcaatgcatttttttgtttacaagaactgaattttggaaaacaaaacaattttccaaaaagaattattcactgattgcagttacaaatgagatacatttcaattttttcgggagtaaaagacatacgattgtcggctaaaaatgatttgtaaacggaaaaagatcgttttcacgtcgcaacatgtcagaggagcaaaaataaatttgggagactaaaattttatgaaaatttntcatctcttatgtgtctatttttgaaaattgtagggtcgattcttaggaatatatttttctaattttttttgagtcgcttcttaggacaaaacgccaaaatgtgggcaaaaacttattttaagggtgaacactcaaaataaggattcctaaggtcgaataaaatcgataaaactcaaaatttttgaacaaaaaatttgtttttcgtgcatttcaaacgagctaaacctgcataaaaatccgggccctacctaaaacacacgagcaattaatttatcactggttgcagttcaaataaggcacatttttaggaggtttttgaatgcatttgaatacaaaaaagttcgaaaaaatcaaaatttaatggccaatgcagattcgaaagtattctttatttttaggcatttaatttgttgtatttccgaataatgcgcgattacgaatttttgcgggaagtttaccaaggcctaattgggcatgacgaaattatatcatcagcttttgacataatggatcaagttcattctgatggcattaaacaaccactcactttgcttttccaacgagcagtaaatttataaaaaataaa

SEQ ID NO: 45818 - DNA, 1034 bp, Heterodera glycines
atggcatacaaaacttatctttctcatgaactttcgcaatcacttgaagctaaagtttcgcatttaactgctgctggatacgaccgtgaagatgctagcaatctacaaaacgcaaattccgaagggttcaaaagtagaagacaacggtatttgggaggtcgaacagcacaatacattgcaaaaatcgatgccgatcttttcaatgtaccccaatatttgattaatcattgtgaaattgacataacgatacaaccccatgatgacaattttttgttaattgacaccttagacccccctggtcagccatatagccttgagcttgttggattgaaactctactgcaaaaaagtcagtcttatggatggtttggctcttgagttggcgaaaaaattggaaatgaaaccagcacggtatgctgtacgaaagacgatgatgaaagcactgttcataagcccgggacgctatgaatttaatgcaaacttgttcatggaccaagttccacgtcgcgtaacaatgggacttgtcgcaaattcagattatgtggggaacatcaaaaggagtccattcaactttcagcactttaatgtacgggagttaagtgttgtggccaatggtcgctcctatccccaggccccgtatgacattgactatgaaaattggaaatttgttcgaccctacaatgacacgcaggaggcgcttggttttgccaactctacatatggaaatggaattgattacttttcgtttttgcacactcactgtatttatgtgtttaatatgacaaacagcggagacgatcatggcggtttatttgatctaatcaaaaaaggctgtacagcagtgaacattaaattcaaaaaaccagtacccgatggtggaataacgcttattgtgatgggtgaagcggactctatttactttttggataaaaaccgaacaattgcaaccgatacaaccatttgataaaaatgtaccaaattttacttgcttccttattgtttcaaccaattgtttcattgatagttgaagaagga

SEQ ID NO: 45819 - DNA, 1262 bp, Heterodera glycines
  unsure (1)..(1262): unsure at all n locations
atgacctttcacaaaattgacgcgagtagcatcgattcgattaccaatgccgttgattttttcagtatacccccgacaaatgttaccgtatcatcgtcaaaggttttcgagattttgccgagtaatccactcaccgacactccttatcattttaaaatacactcgagccaaaactacattgacctgtcaaagtgttaccttttgaccgaatttcgaatgcgaaaattgacacccccaaatggtgaatggggacatttggatgctactgatcaggttgttccaatacaattgattgggcacaccttcatgcgggacctgaaaattgcaataaacggtcgtgaaattttcaattctaattcactgatggcatacaaaacttatctttctcatgaactttcgcaatcacttgaagctaaagtttcgcatttaactgctgctggatacgaccgtgaagatgctagtaatctacaaaacgcaaattccgaagggttcaaaagtagaagacaacggtatttgggaggtcgaacagcacaatacattgcaaaaattgatgccgatcttttcaatgtaccccaatatttgattaatcattgtgaaattgatataacgatacaaccccatgacgacaattttttgttaattgacaccttagaccccctggtcaaccatatagccttgagcttgttggattgaaactctactgtaaaaaagtcagtcttatggatggtttggctcttgagttggcgaaaaaattggaaatgaaaccagcacggtatgctgtacgaaagacaatgatgaaagcattgttcataagcccaggacgctatgaatttaatgcaaacttgttcatggaccaagttccacgccgcgtgacaatgggacttgtcgcaaattcagattatgtggggaacatcaaaagtagcccattcaactttcagcactttaatgtacgggagttaagtgttgtggccaatggtcgctcctatccccaggcaccgtatgacattgactatgaaaattggaaatttgttcgtccctacaatgacacgcaggaggcgcttggttttgccaactctacatatggaaatggaattgattacttttcttttttgcacactcactgtatttatgtgtttaatatgacaaacagcggcgacgatcatggcggtttatttgatctaatcaaaaaaggctgtaaagcagtgaacattnaattcaaaaaacagtacccgatggtggaatacacttattgtgatgngtga

SEQ ID NO: 45820 - DNA, 1690 bp, Heterodera glycines
ctcccctcttggatcttctgcactcgctattccgacaggccaagttcaggtcgggttttggcttcttcttctttgttctgttgcgttggattcctttgccttttccattttaagggccaaggacaaggaaaagcaaaaggcgcgaattgacggaggaggaaaagcggccgaggacggcattcacaacggaacagttggaacggctgaaaacgcaattcgtgcacagtcgctacctgacggagaagaaacggcaggaattggcacacgaattgggactgaatgagtgccaaatcaaaatttggtttcaggtaagccaaagggggggggggcaaagagtaaattttgccaattccctaagctttttccgactaccgtattcaattacaccctttgttgtgtgttttagtttgacttgagctaacaacttttgcgatgtctctttcgagagttgagactcgggtcgagttcgaccttttccctctttctctctccccccccccccccctctctctccgtcctttcgttcattcgtccctctcattttattgcctctgtccgtctgtgtgtctgtctgtctctttcttatgacctctctccccactcgtgcaaatgtgcgcatcatttaccgcttgtcggcaaaagatggatggcgggggagggggagggagtagcgaagcgaggcgcgatgatattatcgctcaaagcgatttgatttgattgagtttgttcgctggagggagagaatggggggggggaaagactgttgttgtaaaacaaaactaatgtaactgaataatggaagagtctgacgtccctccccccccccctcccgtaatttgaattcgtccgtctcgaatcagccaattagagaagagaatatttattagtcattatgcttggtgattgttgccatcttatagccaattaccacggcttttccttctgccttttccccatctttctcgctttttgccgtttcttcgctcgtaaattgacacgttttgattaataatgatcgtcttaatctgatcgtttatcctccttttgtgaccttcgccccttaaaacagaatcatttgaataaatgggttcagatgctcacttttcgactcattcacaaatcagcgtaataaaacggagaaagaacacggttatttttaattaccactttttcaaaatgaattgggaaaatgagtgcccattttaaaggtttccttttgatcggattgacttttgattgagttttctcctaccaatgccaacaattaccctccattctccctttttttcattcatttccccgctaattacaaccgcttttagcgcaaacgtagcaaatgaattgactgactgtccctagtgaaaagaaaaatttgaattgacagccgccctcccccccccccccgacacatttatttggcggacacaacgcactcactcacttacatatgtatttatttacactcttcgtcgtttttatgataaaaatctccgcttttaatgattccatcggaattttgattgaggggcattttgcgaggcgggaaaatttcgaagattcaaaaacaaatgcattttttcttttcattttgccgcttcagaacaaacgggccaagctgaagaagtccgcacaaagagtgaatcaacaattggcgaccccgcacggactgcttgagcaaccgttgtttaaa

SEQ ID NO: 45821 - DNA, 890 bp, Heterodera glycines
atgcgaaaatccaagcagaagttggaggccgggccttcctctgaagttgccgctgttcagcacgtcgtccgactgagacacattccgtacggattttttgagaagcaaattcatggctatttcaggtacggtttggttgtgttctacttttatttatttttgaattggtttcagtcagttcggcgatgtgaagcgcgttcgggtgatgcgcaacaaaaaggtgcggttgatttctctaattttgtcggatagtgccaatcgccattcgattctcatttgtcagggaggtcacaacggcacggcatttgtcgagttcaaagaggcagcggtggcgaaaatcgcggcgcgcgcaatggacaattatttgctggcagagaatcggctcagatgcaaagtgttaggccaagaggaagtgccgaaatgcattcggaagggccggtgcttcgtcaaaattccaaagatcgccgagaagcgtaagtcaaaaatggaacctcaacgaaagaaaaattaatcatcgagtttgccatatttaaggcgttaaacaggcgaaagaacaaaatgagcaacgaacgccggagaaggaaaagcgacgaatggtgggaaaattgagaaaataatgcaaatggaaattgcaaatttaaggagagatttgtgggggaattgcgaaagagaatggcgaaactgcgcgaaattggcattgaatatgagttcgactttgagaagaaatacaacgagtttttaaattctcaaaataccgagtgatttttgcctccgttgttttatttttttataaattttgttggttcttttgcggaatacggtggaccaatgagaatgtactgtatttgccattacttaaaaaaccaaaagggcaaacggcgaaaaataaa

SEQ ID NO: 45822 - DNA, 1504 bp, Heterodera glycines
caatattcttacataattcctttcattcgattaactcaccaaatcctcatcagctgttccgtgctctgttttggcactttctgatagcagccgcgtagcggtgctcgccttacacaacaattaccgctcacaactggccaaaggcactgcagcaaatttgaccggcacaatgccggcaggcagcaatctaattcaacaaaaatataatacgagcattgagtcggtagcgcagaattgggccaacggatgctcaatgtcccactcgagttcatcagggatgggagagaatttgtacatgaccagttcgtcgacaatttcggaaggtttaattgaagtgcccatttttaacaaattaggtcgtaaattccaaggggcagcggcaaaacttttcagtttctgtttgtatgttaattggctattaattgaccataaattcattattttcctgggcctacattaagcatagatattaggttaattgaagaagacaatttgcagctgatgcgctgaaacaagcttgcgacatgtggtgggcggagctgaagcagtacggcttccagtcgagtcttgtgctggacatggatcagttcaacaagggcatcggacattggagccaggcaactgaatgaataatagttgtagctatcaaattaaacttgttctttcagcaagcgtgggccaacactgctcaaattggctgtgccatggcacgctgtccctcctcgacctggaagacatgggttgtgtgcaactacaaggaagcgtaagcaaaatggaattttcttagctttataactaggatagcaatttttagttacgaaaaatatcgaaaatttaatgtaaaatagtgaggaaaaatgccaaaataaaaacaaaataatgaaaaaaagtccgaaatagtgacgaatagtgacaaaaaattttcagccaaaaattgagcaaaaataatttttattttcaatttcccccccccccccccgtttaggcgcgtaaaatgacaaaattttatttttaaaaagtaacaaattaagccaaacttgtattgagaaaaaaaaaattttaaaatcaaaaatttcttgtcaacaaataaattgttgagatgaatttttgaaaatttaaaaataatgggcaaaacgccaaattagttaatttcaaatattttagtgacgaagcgccaaagtagtgacggatagtgagccgaatcaaaaatttcaaatagaaatgcgtttttgagctcctttcttcaaaacaattgagcaaaaaaaaaaaataggcaaaaacctaaaaataaaaagagccgatttaatggttttttgtttgtttgccttttcctttggcttattttctgattattatatatttttttacattaatctaattcattaatctcaacagtggcaactatttgaaccagctcgtctacaaaaaaggaaccgcgtgcagtcagtgttcggattacaatggggcgtcctgcaacagcaccggcggactgtgcgtattgcca

SEQ ID NO: 45823 - DNA, 1433 bp, Heterodera glycines
  unsure (1)..(1433): unsure at all n locations
tttaaaaaattgattttcacaaatactttttatggtaatggggaataccaaaagcaaaattggcgagcttcaattatggaagggccgcgcaccgttcagcccccaacaattggacgaataccaggtgacagctaaacgaatcagctaatttttccgggcgcctattacaaatttgttctttaaaatttaaaaatgaactcaaaaatttgaagtctccccattaaaatagtcgaattcattgaaaaaaaatgataaaatctttttcgaaaaaaaaacttttatcattcacaatatcaaattcccaagtcaaaacgaattggtcgggaaaaagtggaatttgaagaaatgaattgtgtttttttatttcctttttttcaataatttatgacccctttttgcatctttgccttattttttcaaatatgacaaatttttatttttctaagataaaataactttattttgttttccaactgtgtatgactcccgagttttgcgtcattttgggctgcttcggattccagctctattttataaatgtttatttttgatattcataggattgcacatttttcacgcgaaaagacattctgcgcctgtacaagcgcttccatcagttggactcgcgcattgtgccagcaaatattcaaggcggacaagcgcaaacggtagatggatacaatgttttttaaattgatttaataaatattttcgattaaatcttagcattaataatcgctctttaatttaacatgtttaaatgatttaatttttctaattgtttcctgttcctcatactgtaggtcaaactgtccatggagcagatcagtcaaatgccggagctgcgcgagaatccgttcaaggagcgaatttgtcaggtccggcggacataggacgggtcattttgcgacaaatgctttaacattttatttgttacataatataaagaaaaattaatatggtataaaggcactttgtagctccatttgaatgcaaaattataaaaaattactataattaaaaagacatcaccaaaaatctctaaaattttacttttttttatcattttggccctgcgggtaatattttggttgtaacttaatattatttttaaaattggcagcctaatagaaaacattttaaatctatcgaatgatcccagaaaaatccgggttccatttcttgtcattttcaaaatatttcattttaatttgttgcataaaattaataaaataataattaagtctaaatatattgttcgatttttttaatggactgcatctgcccagtttaaacataattgtcctattttcaggtgttttcagaggatggccagngcaatttgagctttgatgacttcttggacatgttttcagtgttcagcgaaatggcaccgcttcagctgaagctgaaatatgcattccaaatatacg

SEQ ID NO: 45824 - DNA, 1173 bp, Heterodera glycines
atgtccctgtcagaaaaaagtcagttcgaagtaacggcgttgttgaagagcaaatcggttggggatgtcattgagctgctgatcagtcggaatgttgctgaagagccaaaacaaatgaacgcaaagaatgaaaaagaggacactttggaacatcatcagtcgtccgatttgatttttgacagtttaaatgcacacttttcgggaagcaccgatttggaattgcattgtttggaaattcctctcaatgacacgcccggtgctggcttgggactctcactgaaagcacagcgagttggcgccacggatgcgggccttttcattcgtagtgtgagttaatagtcatgaataaaaggaatacaaatttgattacgatatcccattcttattgttagatcctccacggttccgcagccttcaaagacgggcgcttgcaagtcaacgaccgtttggttggcatcgaaacccaaaatttgcttaactatgaactgaatggggaagctttggaggcatttatgcggaccatttctcagttgcctcaatcgaaacattcactacggtgagataatgctaattttttgatttatttatttttgcattatgtaagactattcgtgctgcgtaaaatgcatcaatcgcgcgattcgaagccattcggtggtggcgcaagacgtggcagtgacagtgatttgagtcagctgtcaaatttcgaccgtgaagcgccttcacggaggtctttaaattaaaaaacgatcgattcatggacgaatccttttcaatcataatcctaattactttggcacatttactctattagttttcctttttttcgtttaggtcgatctctgaaaaacggtcgctggtcacccgcagggacccctctcagctcagaacctatcaaggaattgtccatcaacgccaaatcagcggtaagcaatgagaaaaccttctttttcactctgttacttctcagctcctgcactgtcctcaacggcggttgccaattcgactcgctctcgacgttcactttacgatgaacttcgaagggtccgttccacgcattccgggccaagcgccaaaaaacaacggccaaaaacaatgttttatgtggacgagtcgggcgctgcagtgacatcggaatcgagtctgataccaaactttatcgtcacaaattaa

SEQ ID NO: 45825 - DNA, 676 bp, Heterodera glycines
tatatttatttgctgaatgattaaaaacttcagaatccaaagacaatgtgtcggaagtgctaacgcaaatatccaaaatcgaccccgaattcgacaagtcggaatggctccgtttttgcgaaaaagaaatgatcccgaacattcttgaatcaacttaccaaatgaacttcgaaatccttcgtgattggtgttacgagaaagtgagtgattcgttgaatcataatcaatttgtaatttattcatgcttcaaaaggcgttcaatttaatcgcaaattctatcaaagaatacgaaaagattggcttcaacacgagggattctcgcattatcgatgttagcaaagtggaggtactttttagggatgtcttcttcaaccttttcgtcgagttttagttggtcacggggaatatgaccgaccaagggccgactttggtcatccaattccaagtattcatgacaaatgtggtgaagaacagcgaggggaaaattgtccaaggtgaccctgaaaaagcggttcgagtgagacacatttgggtgagtaattaatgggtggggcgaacggaagagggagacgaagcagtgattgtttaggtaatatgccgagacatggaggagttcaacccggcaacagcttggaaactgcttgagctgcacatgataaaggaggatttatttgtt

SEQ ID NO: 45826 - DNA, 690 bp, Heterodera glycines
aaaacttttgtacttcatttggggaataaaaaccccaaagaaatatataaaattgatggaaatataataaatgttgtggatacaattagggatttaggcataaatattgataataaattgcaattttccaatcatgtcacacaaataataaagaatgcatatttacgtatgcgttctttatttcgggttattaaatcaaaatctactaggatttggattattttgtacaaaacttatgttagaccgttattggaatatgctcctgaggtttggaatccatctcttctaaaaaatattaaaaaaattgaaaaatgtcaaaaatatttcaccaaaagagttctttttaaatgcagccttccacccattccataccaacaaagattagaataccttcaactgccgacacttgaaagcaggcgaaagctgtctgatctgttcatggctcataaaataatttatggccgaacagatcttaatccctttgaaatattcaaaccttctgaacgctttaacattcccttttatagacttaactcgaaatataaattaggcaaaaaatttataccttttgcggggcgggtaactaaaatttggaaccaactcgataaaaggctcattgaaataaactcattaaattaatttaaaaataaaattaaaactatctctattcccgtaaaatagaccggaaaa

SEQ ID NO: 45827 - DNA, 1393 bp, Heterodera glycines
aaaagcactctccgcccggttgcctttgcagccgtggtgttcagtacggtggccatttcgtcctgtctgctcacctttccgctcgtcttccattacgtccaaactctccaggcgacggttcaggtcggtccctcctttgatttgtctccttctctcaccgacgcgcaacaaaaaaataaagggcgaagtggaatattgcaaatcccgctcccgggacatgtggcgtgaaatggtcgatgtggagatggcaacgctggacacagaggacgaagtgggcggcacaccatcgaagaggggtgccgaggaggaagtgatggtgacggaactgctcggaatggcacgtcgccaacggcgtcaagccgaagacgaaactttgtgctgcacctgccaacagggaccaccagggcccgacggtgataaacacagcaaaaccaagtcaacgcgacgcattaactaactaaattcattcaggagcacccggcgaagctggttaccaattttactcaacaaaatatttcaaaaccggcgaatttaggaaaggatggagccccgggagaaggccctggcccccctggggcaccgggagtcgatgccgaactgcacgaccgagtgctgcccgtcccgccccaatgtccatgccaagcaccacccggacccccgggaccacctggtgaggaagggaaaattgaagggctattagtcacaccattaaaggaccccccggcaacgacggcctccccggtggaccgggaagaagtgagtaaccgagagaaagtgacaatgattattaattatggccacagatggagaagacggagccacagggccaattggacccgcaggtccagtgggaccgccaggacagccgggaccaccaggtggagaaggacgaacggaaggacaaacgaagccaaaacctttcaaacaatttaaggacagcgaggtcccccgggagaaccaggacagctaattcctggagaaaagccaccgccaggtgagaaatgagaagtcacaaaagaaaaagaccatttttaaggaccaccgggacagccgggaagacccgtaagttaaagagagaaaggacgaaatgccaatggatcgattcgttaagggaccgccgggtccgccaggaaagccgggacaggtaaatcccgagaagaggggggaaataatgtgcgaattcaggtgggcaaagacggagagaatggaccccccgggccgccaggagagccgggacagcggggtaagaggaaaaagcattgtatgagtcaccgtgtcatttgcaggaccacccgggccaagcggacctccaggactaccaggccaagtcggacaggccggcgcaggagggtcgtgcgaccattgtccaacgccaagattggcaccaggatat

SEQ ID NO: 45828 - DNA, 1547 bp, Heterodera glycines
cctgaattgatcgcttattggggttatccagtggaggtgcacacagtgaccacagaagacggatatgtgctgcaattgcaccgaattccctacggcagaagtggcaacggtgtgattgaatttgctatttttcggcaaaattcccccccccccccaaaaaaaatgtcaatctttaggccactccgccgtgccttcctcgccccgtccagttttcttccttcagcacggtctcattgcttccagtgctgattgggtgactaatttgcccagccaatccttggcatttattttggctgatgccggcttcgatgtttggatgggaaatgtgcgtggaaatttttactccgacgcgcatatcaattggacgaaattggagaaaaaattttgggaatttacgtgagtgagccaaacaaagcaatggtcggaagaagaacaatttgagatgggacgaaatggcattcaaagatttgccggcaatggtcgaaaagtccttaaacattagtggccaaccatttctttattacgttggccatagccaagggacttcgattattttcgccaaattggcatcggaaaacgaaacattcgccaaaaaggtgttacttttttgtttgggaagcaattgaacggctttttcttcagattcgaaaggtttttgctcttgcgccggtcgcttcggtgaaaaacatcgatggtttaatcgcctttttgggccgttatttcgggaggaatctttgggcgagtgccgccgtctctctccgattgtttcaatatttctttgctcctccttaggcgcttcgcttcgttttcggcactcatgacttcctcccccacaattggatgagcataatgttcgccaaaatcatttgcggaatgagttggcgaaatgttttgtgcgaaaatgtcgcctttcaaattgccggccccgaaagcaatcagatgaatcaggtgggaaaaggaaaagcggaaggaaaagctaagctaactaacgcagagtcggctgatggtttatgcggagcatatccccgccggcacttccacttggaatatcatccattgggttggcctaattaacaaaaacaggaagtaattaatgatgggcaaacatcccaaggcacaaatgcgcaactcgggaaagatgcaaatgttcgactttggagacaaacgaatcaatcggaaacactacggacaggcaaatcgcagattaatcccagcaaagtcaaatccgatgacattttgcaggactctccgccgctttacaatttgagtcgcatttccgtgccgatttatttgtattacagtgacacggattggctggcggatgctcgcgacattgaggtgagaaattggaagaattgggaggaaattgcgacggacgccccctccaacaaaaggaaacgattctccgctcggtccgtccccaattcatcaaaagggcactgaaagtgaccaagtttaatcacttcgacttcgtttggggactgttggcaccggaaaaaatatacaaagaaattattggaacggtgaaaaggcacgaaaaagcgatt

SEQ ID NO: 45829 - DNA, 1893 bp, Heterodera glycines
atggccgacgaaagtgccacgaatgcaggaggagccggcgccgctggtggcgctcagcccgccgagtacatcaaactgaaggtggttggccaggtctgttttttgcattgtgtgatggcgcaaccacttaattgtccgtttttaggactcaaatgaagtgcatttccgggtcaaatacggcacatccatgggcaagctgaagaaggcgtacgcggagcggactggcgtccaggtttgccagacttgggattgggggttgggtagggcaaaatttttgttgggtctttgactgacaaaatcacgtacgagttcagtcgggaccttgttaggtgttcggaaaaaaacaggatttttgaacgggccaatgcgcaatacctatcgaaccggtactaatgtcgtttacagaccataaaaaaaatagttttaataaatcatacatttaaacatttctggggggttttcggggtcgctgatcacgaatttgatacacatttcgaccaattccgaaccccggacctgaattctgttcagattctaacataaaaatgaactttgatgaaaaattaattttcggcttctgttcgaattcgggtccggggttcgaaattattctaaatggatgtcagattcgtgatcagcgatcccgaaaaccccccagaaatgtttaaatgtatgatttattaaaactatttttttatggtctgtaaacgacattagtaccattattttacacaaagattaagaaatatttttgcttcttgtgagccgccttcatatgtctatatcatttttacggaagaaaaaagtgaaatttaacgtcgagctttgtgttctgaaactgacagacattccacttttaaatgcaattatttttgcaaaggtacaataaaattttaacttgcggaaaacgatcttgtcaggtccgtctgttggattgcggctcttttgcgggtatcacattgcataaacctgtctgttcacatgaggtggacttcacgacgagtccgtcctcctcttttggtcatcaaaatgaattagaaaatgtgcaaattcgcgctaaaactttggatctcccaagtatatcacagcaaaatggtggcgttcacaggtaaatgagatttaaaattaagcaccaaaatcatttttcaggcatagtgtgacttgctttgctacggaacaactccctttgccaggacggcggaattcactttctgaggaaagcaatcggacaatttcgaagccacaacaaacgcaccaattgggactagtcgaaaacaacggcaaccaaaggggtgaatatgatgacgaacaggaggaggagaatgaggaacggctgctgggcagcaatgaggttggaccaaatggagaggcaacaaatgagtgatttagaaagagttggttcgtttctttcaggtcggaaatggtggtcacgatgagggtggtcaaattggttttgtcgagaaggacccgcaaccattcaaattcagttgttgcattccgtttgactcaaaacagactggaatgttggaggttgtagttaaaaccagaaatattcaatgaattttattttcaggcatgtcgttttaaaatttctctcaggaaagtccgttttcatggcagataaagcaattatttgtctcatattattcaggaggaccgtgcgggccgaactccgcaaaagcttggctttgttattctgaatttgacagaatttgcctacagcggtgctaaaggcataacgaggtcatatttggtggacggatacgacaacaatcagcgcgcggacaactcacgagtgtacgtctttgtcagaatgcagcacaactcggccgaccctctcttcaaaatgtcatcaatttagagaaatctaagaaaaattttcactcaaataaa

SEQ ID NO: 45830 - DNA, 1216 bp, Heterodera glycines
atgcaaccatttgtccattggtcgaaatgcatattcaaacgtccattttctaattcttcaaaattattttcgtcgtcattttcaatggggtttaattttggtaagttttatgcatactaactaatacttcatatcacattttcaattcttaaaaatcatattgtattaattttcagaatttaccgaagaacaaaaacaactccaagcggctgtaaagaaatttactcaagatgaaatcattcctaaagcgtcacattatgataagacaatggagtttccatgggaagtgataaagaaagcacacgccaatggatttatgaacgttgacattccgtcggattgcggtaaatattttggtacaatgtgaatgcaatttgtaaatgtttatatttaaagggggtcttgacttggaacttgtaagcaacgtgctgatcagtgaggtcattgggtatggatgcaccggaattggaacggcaattttgggaaatgacttagccgcgactcctctggtcattggtgccaaagaagaagtcaaaaagaaatttttatcccgtttgattgatgagccaataatggctgtgagttttttttgtgcgctttttatacctttctaatttagtcttattgtgtgactgaaccaggcgccggttctgacgttgccgcgcttaaaacgaaggcggagaaaaagggcgacgaatgggtcattaacggatcgaaggtaggcgatattccccttaaagtcaatcttcgattttagatgtggataactaatggtggagttgccagttggtattttgtccttgcaaggactgacccggacccgaaggcttcgacgggaaaagcatttactgcatttgttgttgacgggaatactcctggaattgttaggggaaaaaaggtgggcaagccaactaaaacagatagatagaagatcactgacaacaaaccattgctatgtctaaaggaaatcaacatgggccagcgatgttccgacactcgtgccatcagttttgaggatgttgtcgtcccaaatgcccaggtcatcggtgcgcccaatgaaggatttaaagttgccatgaaaacttttgacaaaacgcgcccaattgttgctgctttgtccgtgggacttgccgctcgagcgttggatgaggcgtcaaaatatgcacttgagcgcaaaacatttggtgtgccaattgcacaggtcgacaaatcctaa

SEQ ID NO: 45831 - DNA, 1185 bp, Heterodera glycines
atgccaccaacgagtaaaaaaacaggtattaataaagcaaattgaatttgactgggttctttaatttaaaaatttttaggaaaggctgtcgcaaaggctgtggaggccaagaagaagctggccaaaggccagcacattgtgcgcaagaaaaagatgcgcacgtcggtgcacttttaccggcctcggacgctgaagctggcgcgttcgccgaagtttccgcgcaaagcggtgccgaaacggaacaaactcgactccttctccatcataaaacacccattgaccaccgaatcggcgatgaagaaaattgaggacacaaacacattggtgttcatcgtggacgtgaaggccaacaaacatcagatcaaaagtgcggtcaacaagctctacaacatcgaagcacagaaggtttgtccactctttgttttggtcaagaaaatcgagtatatgcaaattggatgagcgcaaaactgaatttttggggccaaattttaattttaagtttcaacttttcgaacaggcacttttaaaatagcgccgaaataccttttgctcacttcaattttatttattcgtatagatccgcattcgacttaggcgacatcaatgatatcttcaatttcttaggccataacttttttctttcttagtcaatgcctaattctgttgccaaccgaaaactttcccagtattttttaaacataagaaaaggacgacattggtaacaaaaaaaagctatagcataaaaaaactgaggatagtcattgattggacgcctaaaagtcgattgaatttcgcaattgtgaccataaatgggaaaacgtccggtcctctaacaaaaaatcagtatttcgtcatctgtattaattatgttgcttgaataattatttttttttaaatatttaatgactatcaaatatcagtcacaatcacttgtatgactatgtctaattctgtttaggctatcgtgacttgaaaaaaaaataatttgaacctgatttttgacataggctcaaatgtcgggactttaagggaagggttattcggatagttaatacgctttatctcactgtttattcgtctaaggtcaacactttggtcacgcccgatcatacaaagaaggcgtatgttcgtctagccgccgattatgatgctttggacgtggccaacaagattggtattatctga

SEQ ID NO: 45832 - DNA, 2418 bp, Heterodera glycines
acatagttataaccgttaagcgtattttgtaatggccgctgataattttgacgctcaacgtattttgaacattttggccgagagagacaatttccaaagtaatgaactcgccgatcagttggccattgaccaccagcgactgatcggtgccatcaaaagtctgcaggtcaaagaaggggtgagcttttgtctgtttttatgcgtcatttattatcaaaattcattttatatcgtatctttacagaatgaccatgttttggtttttaaatagttaagtttaacaaccccgaaaacatttttaagagaaactttaaaaaaatttagaaattaatttctcaaaaaatgttcgagttcgggttagggattcggaattggtcgaaatggaggccggatttgttcacagcgccttaaaaaaacccctagaaaagtattagtattagaaaaattttcagaataaaaataaaataaaaattttcgggaccatgatcttcacaattccctttttagttggtttgcacttcggaagtcaaaatcaaacgcatcgaattgaccacggaaggcgaggaaattatccaaaagggctcccacgagttcaatgtgtacaaaatcgtcggagaaaagggcatttccaaatcagaaattgaagtaatcatgcaaaaaatagttataaacatttaatggatgcattctctgtcagaaaacatcctttggtcccatcggattgggcaaggccatgcaatgcgggtgggtgggcatggacaccacgcgacggagtgcctttggtggtgcggaaggtggcaaatgccgaggacggggccaaggagcaattgaaattggtgaagaacggaaagggcgaccaattgacggcccaatgcgtggcccaactgaaaaagcgcaaatggataatggaaaggtgcacaaaatgacattcagcgaaaagaaattgttttgcaaattttagcgcaattaaagccctttccgttgccaaagggccgaacttcacgacgactgtgcagaagcaggaattggatttgacttcggagatgattgcctcgtaaattgccaatgatgaccattttatttactcaatgtccatttcatgggttcgtggcgtggcaagcagttcaaacagtacaatttctccgcgatgggcgtgccgcccccctccggccatctccaccctttgctcaaagtgcgtgccgaatttcgcgacattttcttccaaatgggtttctctgaaatgccaacaaatcgctttgtggagagtccttctggaactttgacggtgagtaatttcgcttttccttacctccccttccctccctttagctttgttgcaaccccaacaacacccggcacgcgactcacatgacacctttttctttcacgtattgccccttttcttttacgttttttgctttttcttttatgttggtattctgaaataacctctttttccatttaggaccggcactttcaacagaattcccggaagattaccttgaaagtgtcagaaaagtgcattctgagggcggtttcggttctattgggtgggttttttcatacattttagtttttttacaattaattttcgctgattgttaagctatcgctacgattggaagttggaagaagcgcagaagaatttgctgaggacgcacaccaccgccgtttctgcccgtcagctttaccttctcgcgcaaaaagtgtcccttttcgatttccatcataatttctccgttgtttttctccgtccctccagcctttccaaccgtccaaaatgttcagaatcgaccgcgtgttccgcaacgaaacattggatgccgctcacttggccgaattccaccaagttgaaggcgttgtggcagaacgaaacctctcactggcgcatgtcatcggacttttcactgaattcttcaggaaatgcggtcaattagaaagattctttgtcttcctcatttgttactaattaaaattggaccatttaggaattgaaaatctccgcttcaaacccacttacaacccgtacaccgaaccatccatggaaatttacgcttttcacaccggactgaacaaatgggtggagattggcaattcgggcatgtttaggcaagaaatcattcattttatctatggctaattttgcatttaggcctgagatgttgcttccgatgggacttccggaagatgttgccgtggctgggttcggtctctctcgaacggtgggggttcggttcggcttaaatcagtctctaagcccccttttcaggccaaccatgatcagatacggcatttccaacataagagagctttttggccataaggcattcaccatttgctcactaacagataaattttttatattttcagattgatctcgaaatgatctacagaaaccctttgtgcaggttggagcag

SEQ ID NO: 45833 - DNA, 1403 bp, Heterodera glycines
ggaccaaccgccaacaaagggtaccgaccagacgaagcactcaggatcttcggctccaagctcactccttatgaacacacggagctgttcaactaccaacgggtgagccgggcaaagcgcgcctttgtcattggccttaaatactttggcatcacttttaggtatatttcgttggttcacaagccaagaaacgactttgcgttgcgggtggagccaacaactcaaattttgacgacgagaatggctcttatgcgttggtttcccacgatcacatcgcatatcggtacgaaattctcaaagtgatcggaaagggcagttttggacaggtaaaaatggaaattacacaatttgccattcaacaattttctgttcgtcaggtgataaaagcgtacgatcacaagcaccagcaatacgtcgcgctgaagcttgtccggaacgagaaacgcttccatagacaagcggaggaggaaattcggattttggaccatctgaagaaacaagacggggacgggtcgcacaatgtcatccatatgctcgaccacttcacttttcgaaatcacaaatgcatcactttcgagctgatgagcatcaatctgtacgaactgatcaagaaaaacaagttccaagggttcaatctcaccgtgagtgttcatcgccaattggtgacacctctgaattttgtctcttttttagcttgtcagaaaatttgcgcattccatgcttcaatgtctggaattgttgcacaggaaccacctcattcattgtgatttgaaaccggagaatgtcctactcaaaatgccaaaccgatcttcgatcaaagtgatcgacttcggctcctcttgttttgacgaccagcgtatttacacatacatccaatcgcgcttttatagggcgccagaaggcatttacacgcccattaggcagtgaattaaaaattcttttagtgatacttggcgcaaaatacggaatgccaattgacatgtggtcgctgggttgcattctggcggaattgctcacaggctacccattgttacctggcgaagatgaaaatgatcaggtcgattggtgaaaggaaatgcacaatgacatttcgatgtttaaatcagcaaattttttaaggtttacgtttggtccattttcagttagcattggtcatcgaacttttgggaatgccaaatccgaaactattggagggcgcaaagcgatctcggaacttcttttcatccaagggacacccgcgctattgccaagtcactcaggtgggacgggcaaatctccgtctaaattcggcatccttgcagcttatggacggcaccaccgttctgactgggggacgatcaaaaaggggcaaactgaggggaccgcccgggtcacgaacaatgcagagcgcactgaaaaatcag

SEQ ID NO: 45834 - DNA, 1999 bp, Heterodera glycines
  unsure (1)..(1999): unsure at all n locations
cggaaatggtaatgacagaaatcaagcccaaagtcaccaattaatgcagaaggacgagggcgaagaggaggaggaggaaaaagaaaaaggcggtggaagcgaagcagaaggggaggaaggaggggacgactgctcattcgaaaagggatacgtggccatttcgctgtactatttggacggaccgatgagcacggtcaatctgaaggcccaagtcaatcggaagagcaaaaacaaagcgagattaatgagtcccaaattggcacaggtgcgaattgccggggagaggcgcaatttggacgacaaacaaacgctgctcgaagaaagtgggcgatgttggcgatttacccattcgaaagtgtgcagggaacgctttgtcggtgttccgagggcacgaatgcgaactgtccttcaaagaccgggcacatctgacggagtacatccgccacaaaatcgggctgcccattcgcctctctctgctgctcgaaatggacgcgcaactcttccggacggacacttatctgaacgtcctttcgcccaccccttatcattcctttttgacagcaaattaccgggcccgaattggcagcaaagtttggaggaaacgatcaaacagaaagtgagtgagagagtgaaggctggtgagaggaaaagtagccaaggtacagggcgagaagtgcctcggatggccattctttggtggccggccacaaaaagttggacttggagacggtgttcatccatgtaatggggcaggagaatggccaaatgcggaggtgcagcgcatcgggccaacgaaatgccgaccccctcactgacgatggcattggaaaggaatcgggaaggactgagagtagagaaaagtcgacggacatcgaacatggcaaaagcactgtcgaagcaccccctctgaatgattcggctgaatttctgacgaattgccgacagaacaaacagtcgaatcgcccaccaactccttcttctgctggtgcgatcccaccaggcccttctgatttgttcaaaaaactattggtcgcttgctgtgatagctgcgagcgaagggcttcgctaatcacagttaggagaaacgccgaaattgagggagatttaatttggcaaattgaaagatggtcacaaaagcgaatgatgaggagggagaaacaaaaagagaggaaggggaaacggaagaggaggacagagagacggaagaggagaacaccttcgaatgcgacgaggaagccaaaacggaagtgcacgacactntggcaaatatgtgagagaaatgccggtggcatttttatgggcaaaaagcgaagcaatggcactcactgaccgatcagatcagtcaccaaattgaggtacttcaacacagttgtgttgcccgaaatggaatacgtggaggacttcgttgactttctgatcgacgccgaactcagtgatttgcccgtgctgaaaagagcctgcgaaagatacctttgcggagaattggactcggtcagtgagcagaagcaaagcaaatgaccaccggtcgaccaaagctcaattaaccaaatgaaaaatgcccccaggaaatttcctcccctcaagtcgaatttcagaaaaaggagctgatgacttcccttattctcgactttttcttcattgcgatggttttttcggttgttgaatttgtcaaaattgtttaaaatacatattttttcctctttatcttcccgttatgaaatcgatgactttgaccgaattgtgtgaccgatacgccgaattggaaattgtggacaaactgttggaacaagaggagtacaggtaaaaacagaaacaaatgaatgccaaatatgtaaaaaacaaaaaaagaaatgtggacaagcgaattcgccaaatatgcggcgaacggaatttgcacgatttggtggacgaatgcaaacgatttcgggagcaatgcacgagagtgaaaaaagtggagctaaacaaagaaaaagcgagcgaaaaagggggcgaaggagaa

SEQ ID NO: 45835 - DNA, 1783 bp, Heterodera glycines
atgccggagaagcgcgcggaggacgacgacgacgcggtgtcgcagagccctggaacagcgtcggcggagcgcaaggacagctacgacttggtctcactgagcgcaggcacacgcgtgagcggcggccgatggaccatcatcaaggagctggggcagggcgcgtttggcaccgtgtttctgtgcagcggcaacactgacgccgggcgacgagaagcggcaatgaaaacggagcgcgcggacgaggagccattcctgtggaaggaggtgcggtttatgcggggcgggggcggacgggagcagcagttctgtgtgattatcgaacgcgtctgatcagtgatcacgaatctgacgcatcgtccatttcaaccaatttcagaatcctggaacccgaattcgaatcactttttgctcaaaattccggagtctgacaaaaagtcgcaaaattaattttttgactgaattgagccagattggagttcgactttttgttcaaaacgatacgggattcgaaattggttgacatggacgtgtcagattggtgatcacactgatcagtacccacaatatgcgttgaactactcaaaacagcactacaaatcccccaaactgtgaaatttgaaaattgcttttttcgattgagtcccttaaattcgtaatttaccaatttggttattaatgtgtatccctcccccttttacaggccgaaattatgcgaaaagtgagcactgttcgggtgggccaaggctcggaacatttttgtcgctgttttgacgagggccgagacgttcaacgggacacacaaagcggagagctggtgacgttcaactacgtcgtgtaagtcgagtgccgtccgaatcgcgtcattaaaatgccaaaaattctaatttttcccccaactttcagtatgtcgctgatcggacgtggcctgtttgatctgctgagcaaggcgggcgacgtgttcagccctgggacggcaattggcgtttcgcttcaactgctcgatgcactgagggcgctgcacaaagttggctaccttcatctggatgtcaagccggagaatgccacaatcggacgcgcggagaccaatgagcgccgccgcatttttttgatcgactttggacttgcgcgccgttacatcagccaatccgtgagcagagattatccgcccattcctctctcataattaattttttccaatttttcacagggtcgattcaggcgagaaagatcaaagacgcacttccgcgggacgccaatgtacgcatccatcgcagcgcacgcgcgggccgactactgccgagcggacgacatcgagtcttggttctacacactggtcgacatgtacaccggcaagctgccatggacccatgtgacgagcgaacgccgcgtgagttttgtgggtcggaggggatttggcgcgggatttcaaatatccatttcccccttcattttcagacaggcaaaatgaaacgactccgtctaagccacaagccgaaggaagtgcaacaacgggccctgcatgcactgttgaagaaatgcccgccaatattctacgacatcttgttacacattgtgcgttttatgcgacattttgtgccgctttaattatactaattacccccccccccccctcttcccacaggacgacctggagttttaccagcggcccaaatacgaatggatagacagggttctgcgcgactacctcaacacgaatggcatccacgagttcccttacgactgggagaaagaagcgaatcgacgaacaaggagtgcaacctga

SEQ ID NO: 45836 - DNA, 796 bp, Heterodera glycines
caggtatgtggtcaaggatttggtgccggatatgactctgttttacgagcagtacgcttcggtgcagccgtggctgcaaaagaacaaaccgaccaaattaggcgaagccgaaaacttccaaagtcaggcggaacggaccaaattggtgggcattttcaaccaatgggagaagggctggtccatcaaattggtaatgttcgttcgctttgcttttgaggacggtctctacgagtgcattttgtgcgcctgctgcagcacttcgtgtccttcttattggtggaactccgacaaatatatggggccagccgcgcttctccaatcgtacaggtccaattggcaaatgcgtccaaacatatggaaaaaggggagggggtccagcggtgccgatagacgcctccgggagaaattttaagaatttcaacgaaatttgttaattgtaagaattagccaaatttctcttctggaatgctaattttttaatttaaagcgttttctttctttttgtcagatggattatcgactcgcgcgacgacaaagccaacgaaaggttggaacggctgaccgaccctttcagcgtgttcaaatgccacaccattctgaactgcaccaaaacgtgtcctaaggtgacggacggtccttttggtgtcgaataatttgtttttagcaccttaacccggcgaaggcaattggcgaaattaagaaattgttaaccgggatggagtaagaggaaaggcattaaaacaattgaaaattgaatcttttcagaacaaagccggcaccaaaacaggcgacaaac

SEQ ID NO: 45837 - DNA, 877 bp, Heterodera glycines
agcaacaaatgttcagtttcgaatgccaatccaagggggtcgatgcggctgaaatggtcgcggttggctgtgtgacgaacggcggagagcatcgacgaattggccaccaatggcaggtgggcccagcaaaacaatgacattttatggggaattaaagcgaaatgagtaaaaaaggaaatttaaatcaaaaaattaggaagttaaatgacaatttcattcaaataaaatccaattaatgtgatctatcgcttttcatgtttatttaatctttgaattagaaaaggaaaattcgtcgctgtaaatccaaaaattgaattggacacgaaagaatggggggggggaaagaaggaaatgaaaaaaacaacaattaccctcgagcaaactcatcgcgggggagcggggcaaaaggggggcaatgagtgtaacggaggagcgaaaaaaacagtggaaatgagaaagggaacgataattaattattagtgattagattttgaaactcttttaaaaggacgattatgatacaaaattcaatgagaaaaacattggcagagaatgcccaacggacaaatggggaaggcattttcaaatgttttaaattgccgaaaaatgctttaatagggaaactcattttggcatcattcaattggtgcgcactttgcctttcttttttaggacggcgattttctcttttactgcaaaaggaaagccgcgggactttgcgagaagagctgtttggggtccgtccgtccttttccatttgttttcaaaatgattttccttttagctgtttgctgcagggccgccgtttgtacgacggcgaccgtttccgccacgggcgcaccgttttccaatgcgaaattcggccaaagcggcacgc

SEQ ID NO: 45838 - DNA, 2162 bp, Heterodera glycines; identical to SEQ ID NO: 4523

SEQ ID NO: 45839 - DNA, 3167 bp, Heterodera glycines
atgccacaaaatttttgccaaaatggcacacaatttccaggacatggtcggtcaagaccaccagccactgctgttgagcgagtggaattcgaggacaccgagctcagcaagcagtacacatgctcgttgaacaacattttgccaagagtcagtgcaaacaaatgaactgttttgctatctatgccctgattttttgtacaaaattgtcaaaaaaaaaagacgcattttggtgtctctgtactcgaatttttgatttttctcgctatacaatctcttaccctttatttcatgttttttttttgcaatttaagttggatttggaccatcagatttcaccggacgattgcattcccttcaagcgcattttgcaccattttcatcgacttcgagcaggtcaaatgactctctaatttttgccgagtgttttcatctttttcttagacgattttttttttggggggggggttatttgcaaattaaaaccaaggggcaaatgtaccttttcggtatttgtaaaattttccttccaggaaacacatcctttttggtttgtaaatttttttttcataaaaatcagggaaatcttacccgggcattgttggggttgttgaaaccacaaaaaattccaatgaaatatttataaaaattactaaaaaaaaaaaatcataaatcctttccagcacaaacaccatcaaatggcgttgttggcagcattgaccaagcactttaccaatacattggtcgttacatggatttgtgctgtgcgagcactggggacactgactataaggtattttgcaaaaaaaaaaaaaaaatttttttggaaaatttccattttttttcctctagcccctgttctgtttgcacgcgttgagccatgtgatgcgcacacggaatttggtgatcagcaacaaacagaggctggagaaggcccgggaacaggtagtggttgcaaatttgtggggcaacaatttaaaatggaattaattctggcggcggtgcccgaaaatgaaatttaacaaaattccccaaggcgccatccctcgggaaaatttttctggaattttaatgaatttattaagaaaattaataaaatttgcgatcccgtccgacccccccccccccccccataaaatgtttacttttgttttaccgggtagtgggatagtgccgccccgtttaccctaccgtctctaatttttttttttaaattattttttgtaaattttttaaaacccattaattttgggtactgccaaaatttccattttgtttttctatttgatatatgttcaaaaattttatggttccgtctcggaagcgctgatggaacagtgccgggaccaagggttggcacggccgaaagtgctcattttggcaccgatgcgcaaatttgcgtacgcaattgtaaagacaatggtggcactgatgttcggggaggtttggcacaattttcggtttttagatttatatattttttttttatttaggatcgtccatttgtgcaacggttgtcacggtttgagtccgaatttggcgacacggaaggcaatcaaatccacgagaaacgggcggtggcccaggactacagggtttgtttgtttattttatggacggatgggattttcacggacaaaaattttatggaaaaaattaaccaaaaaatatttttttgaaattttggttttttcccattttaaatttaaaaaataatttttgattgcataatttatgcaaataaatttgaattttttgtcggactgagtttttcccgaacggatattttctggagaaaacgatcgaatttattcatttttaaaaatttttttttggcacttttcaaaaatttttttttatttggtgcataatttgtgtgccaaacaatttgatttttgtgttttcaacgtctcgcattaaaatttttttaaggagttgatggatgggaatgtggacgactgtttccgtttgggcatcggattggccaagaaatgcttgaagctgtacacaccgttcaacgaggtgagcgaactcggaaaactggaaaagcttagaagttttttttaggggtttatacattttataacaacacattctttttattttttttgataaaaaattatagtttttattgaaaatttcttttaaaaaattttttatacgaaatacgaactgccattaacccctttctgatctctaatgaaaattctgtaaatttcatttgaaaacccaactttgtttaaaaatggggtgttgatttatatatttttttaaatttcggtttttcattcattttttcagtccgattttatcctttgctcaccgctcggcctcaaaatgttgctggacgaaacggcgccggagggcgacgaaacgacgccaaaaaagcaaaaacgccaaaaagcatccgcgccatttttgcgtctcggcaccgaaaagcggcggaaaaccgacgaggcaactaacgacgacgacggaggaccaaatgactttttggcatccatcgaattgctaattgtggaaagagtaatttaatttaaaaattaattttcattcataaaacctgaaccattaattaacccatgaaaaaaaatttaattaatttttaaaacaatttaaaaaattatttgatggcaaagggacccgaacccgggatgcaaaactctgtgttaaacaaacgcatagaccgctcggacacactataactcccacatgttcaaggcggacattctgttgatgcagaactgggagcatgtgcagtcggtgtttgcactgctgaacagcgtgccgtgccgcgtgcgcaccgacatcacgcgcgtgcgacggtgggcgctcagcggggacggcacgcacgcgcgccactaccgccagacgctgctgttcacgcgcacgcacgcggtggaaatgcacgcactgtattacaatttttaaaaaaaattttcgaattttggacccagggtgggctgtctctaaaaaaccaaaaaacactcgccaagggcggatgtttttcaaaaaaaaaacgacgcctgaagtaacctttatgaaattttttaaatcttttttttaattaaaaaaaatcttaattttttctggggattgttcttctccccgaccctaaaagaaaaaacttttaaaaatattttctttgctaaattttatgatgaaataaa

SEQ ID NO: 45840 - DNA, 2016 bp, Heterodera glycines; identical to SEQ ID NO: 24099

SEQ ID NO: 45841 - DNA, 753 bp, Heterodera glycines
agtgtaagtcgcgaaacacgtgccctgcgggtcccgctggtccgccgggcgacattggaccctcgggcgtgcccggcatcccgggaaaagacggcatacccggacaggcggccgaagactcgcaaaacgcaccgctcaaaggctgcttcgtaagtgccaacacgggagggaaaatatcatgtgtacaaatgttaatttttacgcatggttcagaattgtcccgccgggcccaccggaacgccaggcaccgccggaaggcccggcattcgcggaatgtgagcaatacaaattcataaaaagggcataattacacagtgtgtcaacaaaatgccgaccaaaatatgagtgacataagttaaacaaattgttaactaagaatgccaaatttcggcaaaaaaaaactaaatcctattttgtctataaatattttaaaatattttatttattaatgtaacaattttattgatatgcttttttcttgaattggcctttttgttgggccaattatttgtccgcccgtttaattcaatttaattttattttaggcgtggtcctaagggttaccctggccaacccgggcgtgacggaggtgatttttcggcatttttgtgttttaaactcaatcaccgtccataattaagtgcccggccttcccggcgaacaaggccaagtgggagagaatggattggacggacggctgggacccaccggattcaaaggcaaagacgaggagaagcaattgggacgcaaagg

SEQ ID NO: 45842 - DNA, 1344 bp, Heterodera glycines
atgatcaactacggactgaaagtccgacaagccaagagaaggacaagttcccggcaaaagcgcatcttgcgctggcaaaacacaaagttttcgctgccgcagtgccctttgaatttggcggaatggtcagtgtttatcatttttttctatttggttcggataagacttggccctgggtccaggcatgtgttttttttcttgcatccaggcagactcggatcggttttcggtattcggtaacctggattttcttgtatgtttgtccaggatgacaaggtcaaacatggaaaaaaggctaggttacccatgaaaaacctgaattttcgggctgatattcgaattattattccaggaaatacaatgcatattttagatttataataattttgcggtataattttttcgtattatttaaattgaacgaatttgataactttcgatagccctaagtatgctctatttagcttgcgaaatttcattgttttttgaaaaaagatttggacaaaataatcggaaaactgctggccaaggcccaattacccccacccgaacttatccttcatgtataaaacattgaatacctaaatacctaattaatatatttcccccaaattttgcagaatttttgccaaaaggacatgctgcagctcagcgaatgtttgggtggtcaggacttgaatttgttgagcacgtatggcgcattttcattggccacttcactgatcatccaatacggcaccaccgaacagaaggagcactatttgccgggcattgcgtccggccaatggcgtccggcagtttgcattgatgacgaaacgtacaattttttcatgaaagtccaggctgttaaaaaaaattttcggaggcgtgaatccgaagactttagactcttagcgggactaaaaatctccaattgcagcgccgagcaaaaatggccattatgccaatttttgagttcaaattttcaaagaatatggcaaaatggggtccgtcattgccttaggcgccgtcgagaaattttttggaaatattttattaagaaaattttgaatttggaacttcaaaaaatttatttatttttggcccgaagagcaaaaaaaataaaaattcttcgaaataacatgtctttattttaataattgtagcactggcccacagtcgaatgagcatgttttttccgcaaaaggacaacaacaatttttgagcgcggttatgctttataaaatagcttctatcttaatgttttaaaatttatttatttgtttttagacaaaaatcaatgtgcagaatgcgcacaatgccaacctgtttattgtgtttgcgaatcgaacagttggagatgtg

SEQ ID NO: 45843 - DNA, 2587 bp, Heterodera glycines
atggtgggcatcacagagctggctgaagcgaccaaaaaggcgtttggcgccgggccactgatcgctgcgaactgtgcgacagcagagaatggtgcgtttggcagatgtcggaaatggcattaatcggacgaccgattgattgtccaattattccatcattttccacttttatgagttctgttggttgttaatcaacatttctgcttctcatccatcccttttctttccttctctccgttttttgttttgtttgacattctcatctcgtcaccaccaccactgattttccacgtggcaaaagcgcacacaatgagaaatgagttttaaatgtgaaaatcacggcgtttttttggttgtttcctcgtgaaagtgtacttgacaaaaaattaccgaattcatttatttttctgattgaaattcagaaatttacccattcccttctcacaaatttttaaaaattctcatgacctccgaaacggcagagaagaagaacccaattgttgttgtgcgttcgcgtcgcaaaagtggcgaccaaaatcgttacggagttgtggtggtggtggtctcctgggtgtatttgtacttctccgtcgtgcccaccctttacgatgggttaaaggatttcctttggcttagcaccgctcggctcgtcactgagttggtcgccagtacaattgccccggcattattgggtactttgaataggtccaaagaatcatcttcgatttatttgaaaaacaaatcgacaacttttccagctaagagcggcaatgaagtggagtttggctcgatgaagttctacgggttatgcggcattggcggaattctctcttgcggtatcactcacaccgccattgtcccgttggatttggtcaaatgtcggattcaggtattttccgacagtttaattggtgcgggatgagcatggatttttgcattgcgtttaggtcgaccctgccaaatacaaagggatcatcggcggcttcaaagtcactctccaagaggagggcgtccgcggcttggccaaaggctgggcacccaccgccattggctattcaatgcagggccttggcaaattcggactgtacgaaatgttcaagaatgtgtacgccgggatgatcggcgaggtttgtttgtgtgttttggtcatagtcagttgttgacaaaactgctcaaaatggtggacccttttagcaacaaaacttttgcgtgtatatttttaaattcaaatttgcatttataggctctaatagatgtgcaatccaaatcattcattttaaagggatggcgatcccatcctcttacttttttgaatgcgatctccaaaattaaatttttcgtcttatccgaacgagccaaacatccaaaaatcgaatctaactaggcattagaattttaaatggttttgtttttttagtcatcaatgactcaaacatttcaatcaaccgataaatcgaaatttaaatttttgtccatttgtgccctgaattagtttttcttagcattccgtttgctccgttgtaaatttggtccattcttttccaggaattggcttacagctgccgtacctatttgtacttggccgcctcggccagcgcggagttcttcgccgacatgatgctggcgccgatggaggccaccaaagtgcgcatccaaacatcgcccggagcgccgccaacgctgcgcggctgtgcgccgttcatttaccggaccgagggactgatgggcttctacaagggactgccgccgttgtggatgcgccaaatcccgtacacaatgtaagcctttactttattttaaagagtccagggtgtaaaaaaacaagaattagggtcggaaggagggacggaatgggattcccgcgtctaaatttctgttttgacagacttccgctttccggtcttttccctcaaaatatccggacatggtccgagtaaaaatctcgaccacccattggttgtattgtttatcttcttttttttgtgcctcaactcattttttgatttactttttatttacaacctttttaatatttgtttcccttatttaggatgaaatttgcctgcttcgagcgcaccgttgaactgctctacaaacatgtggtgcccaagccaagagccgaatgcaccaagcctgaacagttggtggtcacattcatcgccggatacattgcgggtgggtggagagggggcatatttattaacacaattagtggaaagaatttgattgaacgtttaacttgcataaactcatgatttctaggcgttttctgtgcgatcgtttctcatccagccgatacacttgtctcccagcttaacaaggacgcgagtgcggacgcaatgggcattctgaagaagctcggcccgcttggtaatttaaatttcacttgtcgacaaacattttatgcctgttaccatgttcgtaaatatctaattggtcggccaaaaccgaattccgcattggccctaatttcattcattttttgtcatcagaactcgaaataatcttacaaatttgccgtttcaggtgtctggggtggacttttgcctcgtatcatcatgatcggcactctcaccgctcttcaatg

SEQ ID NO: 45844 - DNA, 988 bp, Heterodera glycines
atggcttacaaaacatacttttcacatgagctctcctattcaaccacagcaaaggactcacacctaaatgcagcggggtactaccgggacccgggtgatgtgcttgagacgggagacggatgcacagcgcgacgcgatttgtttgcgctcagcaacgttgctcagttcattgccaaaattgacaccgacctattcaaccagccgctgtatctgatcaacttttgtgagctggacattgaaattttgcccaacgataacgaatttgtgctaattgcgccgctcgcaggtgcaccccgctaccgtttcgaggtagtgggactgaaattgtatgtgaagaaagtgtctctgatggatgggttggcgctggatattgcgcgaaagttggaggtgaaacctgcccgttacgctgtgaggaaaacaatgatgaaatcgttgttcatcagtcaaggccgttacgagtttacagccaatttgttcatggaccaaatcccccggcgtgtaacaatgggtctggtggcgaatgcggattatgttggctcaattcggcgcagtccattcaattttcaaccgtttaatgtccgagaaatttccattgttgctaatggacgatcttacccacaagcgccctatgacttggagtaccccaacgggaggtatgttcgcccattcaatgacatgaatgaggcggtgggattcgcaaactcatcggagagcaacgggataacttttgcccaatacggaaaaacgcattgcatttacgtgttcaatttgaccaacagcgggggatgatcaagcggcactgtttgatttgataaagaatggcactacagcggtgagcatcaaatttaaccacccagtgccagacggaggaataatgcttgtggtgatgggagaatgcgactcattggtgatgctggacaaaaaccgatcaataagcacggacaccactatttaagcttcccacaattgtcatttcatcattttgtaa

SEQ ID NO: 45845 - DNA, 387 bp, Heterodera glycines
atgtcctacagaggcctgaccaaagacgtgccaaaagatgagaagattccgttcaaatggtctgctccggaggtctggacgcaaaacagctacacgctcaaaagcgatacctggtcatacggtgtgctcagctgggagattttttgcgatggcgccgagccattccatgggatgaacatggaggccgttatgcgcgtggtgagtgaaaaaatttctaaaaaattcatttcacctatttatttgcaggtgaatgacggataccgattgcaatttctcgataatgcgcctgccaatttcatcaacctcatcaatgaccacgtttgggacttcgaccagcgcaaccgctactccatgaaacgcgtttacgaattgctgaaagagatgtag

SEQ ID NO: 45846 - DNA, 3325 bp, Heterodera glycines
atggatggtgggcatgtctggcataatatatcccaacaggtgtgttgtcttgcgcagttcttattgccaatgtacagtttagttgggcgactgtagggactctagagagacaatacgcagtgattcacctgcgcgatggtcgcaagttccggttcagagtgccaaggggtagcttccttacgcctcagcagctcgaacggggaatgcaccatggcatgatcgcggaaatggaacgactcgtgacccgaaaaaggtcaatacagtacccggatgagggagaacttcttgacatggaagtcgtttaggaggaagagcctgaagaagcaccattaaatccgttgaaaaatcgcacaaaacttgatcaacttcgcttgaagcatgagcgagacaaaaaagagagagaggaggaagataaaaggcgacagcagcgagaagagcagcagcagagaaagcagcgagagcagcagagaaagcaacgagaagaacagcagagaaaacaacgagaagagcagcagagaaagcagcagggagaacagcagcaaaagcagcaagaaaaagagcaagagaaggcaaagaaatctgaggctgaacgattagccaaagagaagaagacagaaaaggagcggttggcaacggaggaagtagaacgactcgccaaggagaaggcggaggaggaacgattggccaatgtgaaaaaggaagatgaacgcttggctagagagaagaaggaaaaagaagacgaacaactcgccatggaggcagaggaggatcgtttggccaaattgaagcaacgagagttggagctgctaaaagagctgaagccgtggcgtggtggctacatgcgactggtccacggcaaggacccgacccccgacgttcattatctgcacgagaaggatgattatcactttgtgaatgctgtgcacaagtacattgtgcgacatccggaacttccatgggactcgccggagtttaacccatcagcaaacattcaacaaaacatcgcagaattctgggaaatctttgagcgcgaagttttcgacgaaaattatgagctaaagacaagagaggagaagaatgagctgatagagctggtcaagggatttcgattctatttcgcggacgagcttggacgttttacgctaaggattttcagcgacaaaatatcacacatcactttgacggatcagctggcctacgtgttgggctacgaacagcagcaagaaattcataacgaagaccaagccaagtacgctgttgacttggccggtggtgtcagtcacctgtgcatctacttaaacagcggaataatcgagagcatgatttttggcaactccttcgccaatctcctccaagtgattgcggtcgagggtacgtcgggcagtgtggtcgagaaagactttcagtcaccgttgttccacaaaattgtggctagagaggtggacgtactggacgttgagattcgtacgctcacaggacggtagtgttgtgattttcaaaatattttccatactttttttttttttggtttaagagaggtgccttttgaatttggccaattgtgctgactcttcagtttaaaaaagtcgtaactttctgatacaatggtccgagttatattcaacgggtcgaacttgcggttggagaattatcatcagcagggtggaagcatttcgtactttgagggagctccgaccttccacgctgaacccgatcagctcaaggcctttccattttaaggcaaatattgggcaatgtataactcttatcagtgtttgttcagattcatccgatcaccagctacatagacctcagcaaagtgtttgtgtgcacggaattcaagctcaagaaaatcgcagaagacggagtggtagttgacgtatcagccaacgtggctgttggccttatacaaatgcccggtgcaactttcatccgcaatctgaaggtgcacataaaccagcgtgaggtgtacgactccaatcagctgtacagctacaaggtgtacctggacaccgagctcagttaccctgcggcggcaaaggatgcctactttggcgtggcgggctattttcgagacagtgattcgacaaaagtgaacgaaaaacggaaaaaagcggtggaggagagcaagagcttccaaacgataagcaagctgagtgccgacatattcaaccaggacttgtacatgatcagcaacgtcgagattgacattgagctcgcactgcagtcggacgactttatggtccaccaggacgatgcgaataaggacaagtacacgcttgaaattgtcgactgtaggctgatcgtgaagactgtcgatttgatgaacgggctgagtcttgacattgccaggaagttggacactgaacccgccagatacggtatccggaagtcgttcatgaaatcgctctttgtcactggtggtcgctatgacttctctgccaacctattcacggaggaggtgccacgaagagttgtcattggactggtgtccaatcagaattacattggccataatcagaagaatcccttctattttaatcaccacaacgtgagtggcaaatggcaactgcttgtgaatcagattattcaggtgcgggacattgagcttacggcctctgacaggacatatccccagtacccgtacaacctggactacgagaacaacaggtacgcaagggcgtatcatgatgcccaggagcaccttggcatggcgtgtacaacggagagcaacgggatcagctacagcatgttcaagactgcctactgcctctatgtcttccaaatgaccaatgcgcaggaggactcgccgggctttgagctgatcaaggagggctgtacagcggtgaacattcggtttgccgtagcggttccgaacgagggggtcactttaatagcctatgccgaggctgacgggctcattctgattgaccggaacagatcaatcactagtgaccttacagtatgaatggtgagaattattcctccgattttgttcaaatgccctcctccaatgctgcacacgaagggattgtactgtgttttccggatgtgatcgagaagtcgccaatcaacttttttctctgcctcatctacctgtttggtgcagcaggtactgcagctgcgggattttacctgtttttgaggagaggcggattcgtcgcaggaatggacaatcggttcatcgacagagctctctttgagaaccgggcgacgagaaaatattttgttggcacatttccggccgaccgattgccaaagtgcacgaaatttccctgcagtctaattgtcaatttggtgagtgccaaaaaatacattaaataaa

SEQ ID NO: 45847 - DNA, 318 bp, Heterodera glycines
atggctccaccgacaaacaaagtgcaaaaggtgatggtccagccgatcaacctcatctttcgctgtctccaaagtcgttcgcgcattcaaatttggctttatgaaaacgcttcttcgcgcattgagggttatattatcggtaacaaaaaaaactgttttgttgtttaatcgcttttcgttggtttagggtttgacgagtatatgaacgtggtcattgacgaggcggaggaggtccaactcaaatcgttgaaccgtcacaagttgggccgcattttactcaagggcgataacattacgctgatccaaacaatccaatga

SEQ ID NO: 45848 - DNA, 150 bp, Heterodera glycines
cttcccaatgcccacttccacaagcattggcagcgtcgtatcaaaacttggttcaaccaaccggcacgcaaggaacgtcgccgcgctgcacgttccgccaaggcggcccgattggcaccgcgtccggccggcggtctgctgcgccctgtt

SEQ ID NO: 45849 - DNA, 973 bp, Heterodera glycines
  unsure (1)..(973): unsure at all n locations
atgaacttgaaacggcccctgtttttgcgcccgaatttgcgcatcaacacttcgagaggtcccttccatctcattcgttttctaaacaaattcgtttttagtgaaaaaattgtcggatataaaaacctgaaagtgtccgtgctttattcggatccaaccctttttctgacttccctttatgaatgcgaacagaaagaggatgactctacgaaggttcgttgttggtcaaacagtaatgactcattaattagctaatttgccgtcatttagtgcgacgatattgaatacagaatcaaagacgcgctcccgcaaactcaactcaacgcctatttgacaattgagaaattcaggcagaaactcagcgagcaaaagaactttgttcctttcggagaactcatcacaaagttttgccttaaaggtggggaaagtgaagggaatggtgacacaccgtctgaactcatcaaactcagttttttcttaattttttcgttttataattcaaatactaatttcagattcagagattgaacataactttatactttataaattcgagaaaaaacagcaaaacgatgctcaatttgaccagggctataaatttctggagcgagtgcaagcgttggcccattggtacatcgatgcggtcagtgttttcgctctttcattttcccattttccgctcatccatttgttccctcttttcaggtctcttacactgacaatgatgaccatcgttatttcaattattttctgtttgccgtgcgtccatcttccgatggcgatggttcttccgtccatcgattcgccggttacgtcaatttgtaccgtttttaccaccatccggacaaggaacgagtgcgcatcgcacaaattctggttccaccaacttaccggcgcattgngttgggtccgcgactattgcgtgccgtttacaatgacttatgccgtgccgaacgcgtcttcgacataactg

SEQ ID NO: 45850 - DNA, 1188 bp, Heterodera glycines
gagattgtggtccaagcgcaaagtgctgacccggaagtgcagatgctggccgttacccaggctcgaaaattgctctcctccgaccgcaatccgcccatagacgacctcatctccagtggcattctgcccatcctcgtcaactgtttggagtcgccaaagtataaattacaaaaggggtgtactacttctcccctgaaattttaaacaaactttaattattaaaaaaattcaagaagaaatgatgtgggaaaagctggggtcgggaaaacgagctaatcctttaaagaatattaattaaattcatttcttttaattctgatttatttaagtgccacgcttcaatttgaggccgcctgggccctgacaaacatcgccagcggcacttcagaccaaacacgcgctgtcgttcaggctggagctgtgccacactttttgaagctgcttgagtcccccaacatgaacgtgtgtgaacaagcagtgtgggcacttggcaacatcattggtatgaaaaatggggccaaattaaattaatgaaaattgtgggtaatgactattttgatttttatcattctttccaattttccttttagcacattaattttgcgtttttggttcaggcgatggacctcactttcgtgactattgcattgagttgggaattgtgcaacctctgctgaaatttgtcgctcctgaaatccctttgaactttctacgcaacgtcacttgggttggttttttggattttattgctgtcatattccatttcttttcaggtgatggtcaatctttgccgtagcaaagacccgcctccgaaccgtcaaattgttcaaatgcttttgccgatgttggccattctcatccatcaccaggacaccagcattctcgtggacactgtgtgggccctgtcctatctgaccgatggtggaaacgatcaaattcaattggtcatcgactcgggggttcgttttttattaaaattgacaacagcaaatatttggttaaaaacaggttgtccaatatttggtccctctgcttggccatccggaagtcaaagtgcaaacggccgcactgcgtgcagttggcaacattgtgaccgggacggacgatcagacgcaattggtgttggactgtggggccctccaaatgatgccggcacttctctctcaccaaaaggaaaagatcaacaag

SEQ ID NO: 45851 - DNA, 1085 bp, Heterodera glycines
gaacttgcggatgaacaaatccatctgaatgcgaagctgcaactaatgctcgaggcggaaaccgagaaacgcacctccgaaacgttgctgaagcaaatccgagaggaaaaacaatgcattgatcgaaaaaaggacgaagtggaacgggaattggccatggtttgttttttagtcaaaatctggtagcaaatggcactaaaaatacaaaatttttcccggcggcgcctatcgccaccgccggaccccccccccccccaaaaaaaagttcttttaaaaaagcgcgtcgcaaaaaaagcgtttttaaagaagaaaaaagtcgtcgcctggctaaaaattgcaaaaatctggcaatttagttagaatttcttttcaggttaaacctgaagttgagaaagcgaagagcgcgattgcgggaatcagaaaagctcaattggtagaagtgcgctcaatggcatcgcctccaaatgcggtgaaaattgccatggaagccatctgtttgttgttgggcgaaacgcaaacggaatggaagtccatccgcgcaatgatgtttaaaggcgacttcatctcgcgcattcttcaattcaacacggattcaataacaccggaaattatggagaaaatggagcagtatgaaggcaaccctgaatgggaatttgagaaggtccgttattacaatatattattaataaaataacaaatccaacaattcaaggtcaatcgggcatctgtcgcttgtggaccaatggttaaatgggcaagggctcaactttcctacgcaaaaatgctgcgcaaaatagaagcgctcgagaacaaaattcaggaactgaaggttttttttatttttctgaggttttcgggatttttccactgctgggtgtcataaattatggttaaagcacaaaaatttgttttgtttccaattgcttgatttccatttgaatttcaggaacagcaactgacaatgattcgggacggcaacggcgacatgccgtgtccgtccagtcaaaagcggctgaatgacaacggcgaaattcagtgtccgtcttcctccacgtcctccacctttgctgcctcaacttcggatg

SEQ ID NO: 45852 - DNA, 1996 bp, Heterodera glycines
gttccccttgcccaattgttttttcttctgataatgaatgtgttttatccttttcctacaaaaagggcaacaaggagcggaaccgagagaagcgcaaggattggtttactcgtgccactttgctgtacacggcagcagacaaaatactcatgtacgaccagaaccatctgctgggacgagcgtacttctgtctgttggagggcaacaaagtggaacaggccgatgcccagttcaattttgtaattaatcaggtaagagttgccagtcattttttgctgttcattctctgtcctttttaagtcccaaggcaacgaaggccgtgtgattccggcaatgatgggcaaagcgtgcatcgcgttcaaccgcaaggattacaaggcggcactccatcagtacaaacggtgtctcaagcaaaatccaaacagtccggccgacgttcgcgttgggatgggccattgttttgcgcggttggggcacatggacaaggcgaagttggtccattgcaaacaataatgggtgggtgtacaaagttgttattatttgtttattttacagattggccttcgaacgagccctccaaattgacccgaacaatgtcccgtcgatcatcgctctcgccgttttggaactgaattctggcattcccgagggcattcgaaacggaatccaagcgttggggcaggcgtaccatcgcgagccggaaaatccaatggttttgaaccatttggcgaatcatttcttctacaaacaggtgaaaccattctacattagaagtcatttgtataaacactgattttcctcaggacattgaaaagacgcacaatctcgcttctgcagcacatcaattggcggacaacgacgcaatgcgagcggagagcatgtaccatttggtaaatgggcaactaatgactaggtcaaggaataactcgttccctcaacattcccccttctgaaaaaaattttcaacaatttttttcgttattatttttacatttcaacaaataattgtaaaattttaggttttatagaaaaccatcaacagggaaaccaaagatattttcagtttttaaaaaaataattttgaaggggatgattaggggaggaaatgtctaatatttaaggggcagcggtccagaggcaatttcataaattttcgaaaatttaagagaaaaaacaatagaggggaaatcctacgaattaaataacactaaaacaatttcatattaaaatcgttacgatttctaaacttcttttttaaggctcgttgttaccataagaagcaggactatcaccacgcatttcaggtgttccttttcctcgtctttctttcgatcacaatctgtcctttcttttcagttctattaccaggccacaactctttcgcatccgaaatttgtcctcccctattttggacttggccaaatttacatttatcgtgaagaatatgaaaatgtaaatgaaatattgtcttttttaatttatttccttttactttactttattaggcgattgtcgcctttgaaaaagtgctcaaaatggtgcccaatgacattgacactttggccgtgctcggttcactgtacacaaatgtgccgcataaagacccgaaaattgttgtggaaagaagagaaaaggcacgcgaatatctgaccaaactcgtggacagccaaacggaaagggcaccggtggaagcacttatcgaattggcacaactgctcgagcaacaagacccacaagtaagagaatttcaaaaaataaacagagactaattctgttcggatctcgggtacttcctgatgacagttcattttaagaaatcaaattaaattattttatcatttaatttcaggtttctttgaatttgtacactcgagtcgcaaatttgctcaaagatgacattggtgtcgacattccagcagaaattctgaataacatcggatctttgcactttatgctcaatcaattggatgaggcgaaggcaatcaaattgacatga

SEQ ID NO: 45853 - DNA, 2117 bp, Heterodera glycines
tgctatcttttctaattttcgaagcttaacgtaaataactatatgtcaacatttcatttccaaattcagatcaattcttgcggacggatatcttggaaaattcaggtgggcattggcatttgtcatttttgaattggcatttcgcatttgtctgctctgccctcccctccctcaggaccatctttttcctgtcccttctgtacgccgttggccaatgtgtgctgtgcttcgcctccactttgaatggcacttcttccctccacccttttctcgacattctcggcttggtcataatcggcgtcggcaccggtggcattaagccgtgcgtttgttcctttggcggcgatcagtttgagccgcaccagcagaagatgctgtccgtgttcttctccgccttttacttcgcaatcaatgccggggcaatgatctccactttcatttcgccaatgtttcgtggtcgttaccgtacccctttctgagagtgaaattaccgtattcctcctattcgcagcaatgccctgtctgggccaggactcgtgctacccattgtcctttggtgttcccgccgcgttaatggttttggcgacgagtcagtggggcaattaattaattaatggccgaaatgccaaaatcaaaatttcattacaaaagcaatttgtgctctctttcagttctgttcatgtccgcctctttttggtacattaagaggcctccgaaggagaacattttccgcgaggtgtaccaagttggcaaagtgagtgagtgccattttttagtcatttctttttggcattccctcggggggaaatcttttgtaaattggcattttgtttcatttattttctaaaaaataaacaaagtgttacagaaagcgcttgtgaataaatggcgaagcaaaggcaacaaaaagcgtggttcgcattggcttgacttttactttgactcgcatttgtgcgactccgacccaaaatgtgaagagttgcgcactttgaaggacaatccgaacgaatgtcacaaagtgagcggcgaatagcaaatcttccgattgttttttggccatttcttttctttgcttttcctttggccattcgattgttttgttttagcggcgcctcgtctccgacgtgcggggccttctccgtgtgctcgtcgtttatttgcctgcccccgttttctgggcattgtacgatcagcaggggtcgcgttggctcattcaatcggtcggtcatcgcctggggctgcttgctctttcaaatgatgctaattgctccttaatgattgtttgtaatttgctaattaggtgatgatggactgtcgcctgtggggcgacacccttctgttgcccgatcagatgctcaccttaaactcagtgctcattctgctgttcattccaatgttccaagtcattgtctacccaatggtttctcttcttgccaaaatcacgtgcgttgttttttgttttgttttgcacttcctaattggcccattaattttaattagtcccctccgcaaaatggtggccggcggactgttcgccgccctcgcctttgtcctttcggccatcgttcaattccaaattaatgtgattaaatggccgtccgtttaaattcacatttgtgtccatttagaccactttgccggacattccaatggatgggcgtgcctttgtttccgcaattaacgcatttgacaattgcattttgaaagtgtgcgcagagaatggaaaagggccagaaaagtgtcgaataatggagccaaatcaagtcaaaagcggacaaaggatgacaacattcacaaaacccatttagacactgacaaatacgaacagagaaaggccggaaatgttcgaattggacgggggacagcgaaagtggcactttgaaggggaggggggagactgcggggggaagcaattcgggggagaggtgggccgggagttgagtgccggacgcacttattggatgatggccagtcgaatgggcgttctgtttgggagacggacacgctaaagccgacgggagggaagggcgaattcaaagtggggtaagtgccgaaattggaggggggggggccccccaaggggggatggacagggaaaagccgacgggagggaagtg

SEQ ID NO: 45854 - DNA, 2451 bp, Heterodera glycines
caaatgtctgtgcctggctctcaacctccgcaacagggtgaggacgccgaggagcggctgatcaacgaggagtacaaaatctggaagaaaaactgcccgttcctttacgacatggtggggtttaaaacaagccatcaaatttcctgtttttggtacgtcttgttgctttattctgtcgttttcaggtgatgactcatgcgttggaatggcccagtttgaccgtccaatggctgcccgacgtgcaacgacaggagggcgccgactacacaatccatcgcctcattttgggcacgcacacgtcggacgagcaggtaaaggtggtggcttgatgtgacaattgcacgcaaatgagtaattttagaatcatttggtcatcgccaaactgttactgcccaacgacgacgcacagtttgacgcgtctcgctacgacactgaccgagtgcccaaccatattaattttaccctaaaatccaatcatattccagggcgaatttggtggctttggcacagtgaccggcaaaattgaggtggaaatcaaaatgaaccacgagggcgaggtgaaccgggcccgatacatgccacagaatccggttctgattggcaccaaatcaccctcctcggaggtgtacgtctttgactacacgaaggtctgtctgttgattaattaacggtacaattatcagcataattaatgcactttgtccatttagcatccgtccacgccggctgacgtggagtgcaagccgcagttgcgactgcgtggccacaccaaggagggatacggtccggttttttggcattcaaaccaaaggggggggggaggaggacagttccatgtttctgtcttgtgatgacattctatttgttcgttgcacccactagtaaaagctcgcaaaaacaaatttgggcggttctgttattattaataaatatagatcatttcaaaaatagtaaattaccacaattttcttaatttttctaaaattttttagttaatgcgttctttttcatccataataacaaatttaatcaaatcaggcttatcctggaacaacaatttgcctggtcatttgttgagtgcctccgacgacatgaccgtgtgcctgtgggacattcaagcggcgactgcgaatgccaactttttggacgcaaaatccattttcacagcacacactgcggttgtgagggacgtggcatggtagtaaacatggaattacgaactgaattttgagaataattttcaaattaaggcacgttttacatgacacagtctttggttcggtcggcgacgatcacaaactgatggtgtgggacacgcgcacgaacagctccacaaagccaacccatgttgtggaggcacactcggccgaggcaagcggagaccggggggggggggggagattgatgttaaaaaagggtagaaagaacatttttttattggaaaaaaggaaattatatcttactcgtagccgaaaatgctagaaattgggacagcaaaaatcagtccataaatgtgtgtgctaaaaatcaggcacttaaccagtggtataaggatgaaactgccccctccccatctcactaaattttaaaaaaaaattttttgaaagataagttaatgaaaatttgtatgggtttccctcccaaaatacttagaaaaaattaaaattgtaaatcttgagaaatagacaaaaacgcattttgattcggtccttcgatcggtaccaaattttctttattctatgccaatgtgtgatgttttttgtttgtctctgaattattcattaatttttgttacttcccaggtgaattgtctctccttcaacccgtactcggaattcattttggccaccggatcggcagacaaagtttggacgcatctgctagcatttttaagcaaatctgtttaagactgttgcgttgtgggaccttcgtaatttgaaattgaagctgcattcatttgaatcgcacagagatgaaatatttcaagtgaatttgtgcatttttcaataaatttaaacaaaaaaaaacatttttccaaggtccaatggtcgccccacaatgagaccattttggccagctcgggcaccgatcgccgtctgcacatttgggatctgagcaaaattggcgacgaacagtcgccagaggacgcggaggacggaccaccgggtgagtggaggcaaaacggactaaaatggatctttttaaagaactgttgttcatccatggcgggcacacggccaaaatcagcgacttttcgtggaaccccaacgagccgtgggtgatctgttcagtgtcggaggacaacataatgcaggtgggtctggaacaaaacaaattttttgtaattttatttgtctcgttcacagatttggcagatggcggacaacatttacaacgaggaggagttggacccggcgatggtggaaggtgttgcggccgcaagcggcgccg

SEQ ID NO: 45855 - DNA, 426 bp, Heterodera glycines
ttctgcgaaatgctggcaaacggtgcgcagcgttacgtggaccgggaaacgctggtgccctttttggtggcggacaacgaccagtggttcagctacgacgacgtggagagcatcagaaacaaagtgaatgaaagcccatttcgaatttcaatttgaaatgcttttgcctcattcagctcagttggattcgccaaaactctttcggcggcgctttcgtgtggactttggactttgacgatttcaacggacaatgccccggcagccaactcggtaccgtacctttatttgcaacaataattcggaatatttggttcaaattgaatttaaattatgttttgtccaggccgttacccgctgatccgcacaattgcccaagaattgggcggcatccaactctcacagacacccgtctcggcactttcgaat

SEQ ID NO: 45856 - DNA, 2927 bp, Heterodera glycines
  unsure (1)..(2927): unsure at all n locations
tggcatttcatcatttaaatnagggaataaatgggaattttattggccattaatccggccgatttgccaagtgataagcattataataactaagaatataattaccagaaaagaatttccacccatttttgaaattgacaccgagttgacgttctagcagaaaagggcgaattttataaattattaaagagaattctaaatttttatttaagcaaataaaaaggcattaaaatttcagggcctatgacccggccgatttgcctagcgattggcagccaaaaggaatgtattctcgagtgaacgcactaaaggttataatagaaagagaaaagaataaaatatattttaatatgcaataccaaattatatatactttttattattaaaagtataaatattttttgaaaattaattaattaattaattttaggcttttgatccggtgctgaaaacgctgctttcatttggcggttggtcatttggcacgcgactttttcagggaatgtcctcaaagtgaggccacaaaggaattttttcttaaatttttaattttaaattcacagtgaagcgaacagaaaagttttcatcgattcgtcaattttatttgtgcgaaagtacggcttcgatggcattgacatcgactgggaatacccaaacggagaagcggagaggcaaaacttcaacaaatttttgaaggcaaattaattaatagcaaaattaaattgaaaatttagccgaaattaggtaaaggaatttgatttttaaataaagttttttttttttggattggcataccgttaatttttttttggattggcataccgttaatttttttttggattggcataccgttaattttttttttttggattggcatacctttaatttttttttggattggcataccgttaattttttttttttggattggcataccgttaatttttttttgggttggcataccgttaatttttttttggattggcataccgttaattttttttttggattggcataccgttaatttttttttggattggcataccgttaatttttttttggattggcataccgttaatttttttttggattggcataccgttaattttttttttggattggcataccgttaatttttttttggattggcataccgttaattttttttttggattggcataccgttaatttttttttttggattggcataccgttaattttcatgctcattgtcagccgagcctaaaagtgtcactgtcgtgacaaaattttaattcaattttacagtgcaaatttttattaatttaaaacatgcaaaaaatattaaattgttttagtcaattaatttaaaatatgaaattattctcgtgtaaattgcgcttttacatcggcacaacatttttaatttaatttaatttttgtagagaaataaatttttatttgaacatctttaataaaatgtcgaattaagggaaatttaatgcaaaaattaaagcatttccacttttcactttaattttaaaatgttttttggtccttcgaaaaaatgcttgaattttttcatctaaatatttttgtttttattaacagactctataaaacagtctaaataaaatgacaaaaaattaatttatataattgcttttctgcaggaactgaaagacgccgttggggcagaagcgtcttcaagcggaaagccgcgtctgctgatcactgctgcggttgcggcggggacggaaaacattgacaacggatacgacattccgacagtcggaaagtcgagcaaaatataataaaataataattttttttaattataaattaaatttgaaaggattctaaataccaatttaggtgcttttccgtttggaggccccacattcaaattttaaaaaatattaacaaagaaatgttgggttcttatctgtgcaaattactctgatattttggcccaaattattttagctaatttgcaagcgcagttttttggatgttcagcgcgctctttgttaacattttttaaaaattttgatgtgggcccccttacggttaagtacacccccaattttataacataaaaatttggaaaatatctgaacagatttattactttataatttaccaaatttacttaaaaaatatttataatttttcgtctcttagtttttatttcttcgatttaatttagttttcgtttttatttaattttatgcttaaggcttctcgactttgtgcttctgatgagctacgacttccatggctcgtgggagcagcagacggggatgaacgcgccattgtacggacggtccaaagatgtgccggagaagcgcttgtggaatgtggtcagtcagtgtattcctatacattttaattattaattaataattattttttaattaaattaatttatttttatattttattgtaatcattttacaataataattgagtaaaatatgttaattttttaaatcaaatttcattaaaatttcagtaactaaattttccctcatcaaaaaataatttaacttttttttactcattttttacagttgtcgttttagccaagccatatgaaatttttgaaaattttcatctgccttccctactaatttctgctttttaggctggtgctgcaaattattgggctgaaaagggcatgccaaaatcaaaggtcccatttcttttctttttttgtatgtttaatataattttattattaaagattattatcggaatcccaacatatggtaacaaaaatttaaatcgaattaccaaaatattatttttattatttatttttaataaattgaggccgtggttggactctgagcaaccctcaacaatttcgtggcctcgacgcaccgggccaagcggcaaaagccacaaaatttgtccaattggcgggcactggagcgtattttgag

SEQ ID NO: 45857 - DNA, 1453 bp, Heterodera glycines
  unsure (1)..(1453): unsure at all n locations
gcgagcagaattcatgaccattttttaatcaaaatttctcttggatgtattgtataaaattttactaattttccgagtccgaattttcaagaatttcaaaatttggcaaataaactcccttttcccggttcttttcatttatggtcctgtactgggcacaaaaatcatgccatcttgatagttatcaccagtcttgaaagtatttgcatccaatgtttgcccccattttaagagcaaaagggccagcaccgtccgcttgggtccttacccggcaattgactcgatgatcgccgagaatcgcttcacggtgctcacccggctgatgcgagtggttgttcttgcaaattgacaaaaattaaatgtcaatcaaattgttttccctcctcaaccaggtcacccatttcatttcgcacatggcccccgaggtcatttgtccgtcgttgtgccgttctctgctgtacatttgccgcagcggcttctcctttcaggaaagcgatctgcgccatcgcgtaatgcgcgagagagcgtccgtcgaagtgttcgccgacttcagcaagttagtagggatttactagttgttttttcgaaaaatcattgatttgcctttccaattaattgcttttttggggatttttggcttaaatttttaaaaattctacggagcggtcctatgtaccccttctcaattgctgtagaaaggctcgcatccgtgtggtgtccccatttctcgtcgagtccatcaacggagtcaatttcgcactgctcaacggacacgcggacatcgccctgcgcgcgttggacgccgcccaccagcgggcgcagtacgaaatgatggcggacgtccttttggtattttttttacttttttgcccattattttaatttgtttttcaaacccattcttagggctccttttcgaataatctttttgtgttttactagtactatattatacattttcaatttactcctggtggctgtacggctccaactccatgcacaaggagttggagcagtacactcaactggggagaggcatatttaagggaatattttctgtgacaattagttcataggcctccattttgctgacacatagataatccggatgagtttcatgttatttaattcgttgtccacaatttcaaggagactaacgcattgcgaaacgcactgttggacccaaaagcgatggaaacaatcgttgcgaggaattccgccggcattggcgcaaattaatgacatttatttggacggatggataatgagaattaaaaaataataatattaataaattttatataaatgatagaaaataaaaaatatctccgctggtcagtaatttttgaggtcgtccgattattttcacattgtcaatttgcttanaacgccggcaacgccgcaggcgatgatcgtggcgaagacatcagaagggcggagatcacgccagcca

SEQ ID NO: 45858 - DNA, 1709 bp, Heterodera glycines
ttcatccaattttaatttgctttttgacaggcgattatcgtttaagatgagccttctctgaacactttgcagcaattttccgttgttattggaacagaaaaatggttgacagaaaatgaaattccgacagaaaattatttgatggagactttgcacgcagagcgacaatcgggaaatattttgacactttgtgcggttaatggtgaaaattattataatggcagtaattccaattgcaacactttggattttcaggcaaagttgcggctgttatttcgattgtcgaccaggcaaagcgagaggcgcctttggcggtttgggcattgtatcaaatgggcatgaaagtggtgctgctgactggtgacaatgcaaagactgcggaggcgacggcgaaaagagtcggaattcgggaagtgtacgcggaagtgttgccgaaccaaaagaaggacaaaatcaaacagcttcaggttgttggcagtgaattggtagagagaaaacaatttgcatggcaattagcccaaaaaaagaaggttaatgaagaaggaaatgccaaagggttaaattcaaaatggatgtaagaaatttgatgatgggaataagaagcaatgaatgaatggcatggaaaatggagcagaaacacaattcgattgattgcttaaattcttttgttgaatgttccccaatcgacgcgacattttcatttgctgcgaatttgcaagccttgctcttctttattgcactgtcccttttatactgctccattcgtttttagttccaaaaccaagtagttgccatggtgggcgatggagtgaatgacagtccggctttggctgctgccaatgttggcattgcaattgctcgtgggtccgacgttgccattgagagtgccggaattgtgctggtcaaagttcgtcaattttctgtcttccgcccctcacccactttctttcagaataatcttgtcgacgtggtcagtgccatcaaattatctcgcaaagttgtccgccgtattcggctaaatctatttttcgccttcgtttacaatgccatcggtgttccgttggccgccggagttttttccccttggggggtgcacattcagccgtggatggccgccgccgcaatggcattgtcctccgtgtccgtcgtgagcagttcgttgctgttgcgaagattcaagtaatgtccactgccttttttgtttcatttcttaattcccggaaatcaaacacttaaggaaaccgacagaacattctctgtccagcacagagtttaagcgttaccggaggaatttgaatgaccaaaacggaattgaagttaatgtgtacaaagggctggacaaaagagaggggaaaaggaacactgagcaaacggatttgtcggcaatggaacgcttcgcttctggcactgaaatggacgacaaggcaaaacggacaattggtgctgtccgatggattaccaaaggcgtaaagaagagtcgttcaccgccccacttgtcggacgatgtgggaatgaagagttttgcggacaaatcggcctctgaacggtcgtatttcctcatttcttttttaatttattatttaaaatttagtttcctttcgtccggtagtgatttaagcgacgatgacggaccaaatttaagtgacagagcaaacgcccgtgcaaaactatttgaaaatgtctaataacggacagaagaacttgcccaa

SEQ ID NO: 45859 - DNA, 1372 bp, Heterodera glycines
atgtacaccgtggacaacaactccgacaagggcttccgaacaatcgaacgattcgtcgaccactaccttcgcaccggaacatcagtcacaagcgtaagtcaaaaatttaaattataaatttagtgattttcctttgtttgcaggagcgattcgtcactctcaggaatgccgtgcaccgggcgaattgggagctgtcgcactcatccatcaccatcagcgcagagttggggagaggggcattcggcactgtttacagagcaaagctcaccgaacgcaatgggaacaactcgcaggtcgccgtcaaggaggtgtctcagacgagcaccaaggagcaggtaaaggcggagtttgaagcattgagatcgcaaattacacatttttccttttcagatcaaagagttcatgaacgaggcgcgcatcatgcggcagctggaccatcccaacgtcatccgcttccatggcgtcgccgtcggacaggagcccctgatgatcgtcatcgaactcgcatctgacggcagcctcatcgactacttgaagactcaacggagaagtgcgcgcaccagactcttcatgtgcgtcggagcagctgccggactggcccacatccactccaagggcatcatccattgcgacatcgccgccagaaattgtctctactcgaacggcgtggtgagtcaaaacttttgttgttttagtaactaatttcgctctgttcccacaggtaaaaatctcggacttcggcatggcgcacagaggaccagtgaagaaaatggagcccaacgcgcgcgtccccgtcaaatggctgtcaccggaagcactcgccgagcgctgcttcaccgcgaagagcgacacgtgggcctacggagtgatgtgctgggagatcttcaccaacggagaagtgccgtactcacaaatggcgggatcagacgtggcggtatcggtgggtgaacacacttttgtttgcttttttcaacttttccttccttttcagctgatcaacggacagaggctcaacttcccgagagatgcgccgtcaaaattggtcgagttcatcttgcagcacatttgggatgcggagacgagcggcagatactcaatggcagcggtctacgactggctgaagcgacacacgtaaggaacctagcggtgaacggattcaatgccatcagaagatatatgtgataaccctatgcttgttgtatttttacatattgctgactcattgttgtataactactattatgatatgtataaatgactgatgtccgatgtttgctgattggcactttgcctgaaagaaaaactgaattttatgactaaaatagaaatcaaaaatgaccaattttcgattaagcttattttgctcaagaaa

SEQ ID NO: 45860 - DNA, 2012 bp, Heterodera glycines
ctttccaatgcgtatttgcccgttcaaaaacctgagtttattaatgtttctcttccggtggacacaatgatgccgaaggtgggcaattcccaggacagcggagaaacggagagcaaaaacatcgaaatggactcaaattatcaggtggcttatattgtaatttctaataccaaacagtcgaatataaaaatgcgtaacttttttaattgctccaattcccttttaagccaataacacaacgtgaggaggccgattttcgacgacttcttagcaaatcaaacctccaaattggacaagcaaaacaatttgcaactgttctcagcgaacagttggcccaattggacactgcaaatttatcgaccatcatggagaacaagcaaaatgtgggcggactaatcgaattggttgacaccgcaattgaattggcggaatgcattgaacgacaattggacgaatacgacactttgctttccgtaatatttgttttgtttatctcccaaaacacggagcaaaacgtcgccaagaaaaaagaagaaaaaatataaattttctgcaaaaaatttaaatctttacaaactgttacaaaattcaaaaatttattttcttgaattttaagaagaatattaaagaattaggcttgtatgtgaagctttttcttttttcggcgccgttatgtctcgtgacgttttgtcctgctttgccattaacatttcccttttcagtttgtacgtgacagtgttgaactgatagaggaaaaaggtaaacattcctttcgctattttttcccaattttagccctttttaagacagtctgagacacattgagcaacagaacaacaagcgactcttcgacgagctcaaagacttcgtcttccttatggaaatggtccatgatcagcacatcgatgccctcaaaagtgccaatttgtccgatcccactgggtatttactttcattgttttcatgtgcaattacaatatctcagaatcaactcgtgttgtcaagctgctcgcgtggtagaccattttctgagcaaaaaaacgccactcaatgggatgagagcgtatcagacaaaagtggaattgctgaacaaattgacggtggatttcatcgacaagttttacgcacacatttgcgcaatattcgggaacatggtcggccatttatttattcattccatcgccgacagaatgggatgggtttccatttttatgattagtttttcatgaaagggttcaatgttggagtgccagcacatcggcgacattatcatacaaaagcactcgcaaaggcatcgcgcccttttgcccttctccgatctgatcgcttggctgaaacaggcacggcccgcagtttatgccaaagcgatggagcggtacaaaaaggaagcacgcaaattatacaaaaatgaattcgaccgttttttctccgaactttcccgacgagccttgcaaactgttcaaaatgaaagtaaaacaatcgattggcactaaaactgaaattttaatcagggaaggaaatgaaatggcctcagcagaatttgggaataaaaaccattcattttaagatttaccgaatttaattgtaacttttaaggtggaagtcattctttgagtgcagacaatgcgatctcttcgttaaagccatacactgacgtgagatgagactgtctatttttggatgcattttcaatttttacagttaactgaaacggcggttgccgagtgtcgtacggtggtggaaagtgaacagaaattttctattcgttttttccacctaaacattgacattctatcgcaggttggagttgagatgaacaaaaaccgtatgtcatttttataaaaaaaatcaaaatgtttattaaaaaactttttttagaaaatgacggtagaaaaacagtagagaaacaattgaacgaccaaattaaatttgcaattggcgacattttcgactcattgcccacttacttttatgcccttgtctcaacattcaaagaccacaacctcgtgtaa

SEQ ID NO: 45861 - DNA, 630 bp, Heterodera glycines
cccccaaggtgatcaccacttcgctgcccgtcaattcgctcgtctctttggtcatttggttttgttgccttctctacgcttccattcgcacttcttcatacacggcactgggcaaaattggtggggcgatcagtgaaggaaatgccgaaggtcaggacatccctctgagtaaggcgaaagtgaacggtggcgggaaaggaggaggaagagaaaggacattagcaaccgaaggggggggggcggaagacttatggtccatttgagcgaacaattccatttgttcaggcgaagcttcaatgtccgtcgaggagggcgaccgtgggacgacggggcgcaatgtttacgacaacgaaaaggggtccgtggcctattcctactcgttcttccacttcatttttgcgcttgcttctctctatgtgatgatgaccctcacttcgtggtacacgtaagtgacgaaatgcgaacgtttccgtgctaaaacatatcgctgccttcagcccgagcgatgatttgcgctatttgaacgacaacatggcatctctttgggtgcgcgtcatctcttcttggctttgcgctgcgctttacctttggactttgctggcgcccgtccttttccccgacagggatttc

SEQ ID NO: 45862 - DNA, 1021 bp, Heterodera glycines
atggttcatattgtgtttgacccaagcattgcgcagtatgacgagtatgtgcagtacggtagcggattagaaaaggacgattttgactacttcagggggtcaagcccctttcagagggggtacggtattcaacgaggggcgggcgttggagatgtgtttcgtggactgtggcgttttttcctacccattcttcgccgcgttggcaccacggtagggtcggaggcgctaagcactgggcaacgcgtgctggagcgagtcgggaatgagggggtgccatttaaagaggcgcttgtcagtgagggaaagcgaggaattgcaaaggaggactaccaaaacagtttggaagcggaaaacggagtataaaaagaaagagaacacatctacccagtcatcagacactaattggacgaccttttgtaaaacaggcaaaaaagcgtattcgatcggacgcttttggactttattaattaaataaatggctttccataaaatcgacaacgactcggtgaactcaatcaccaatgcattggactttttccgtataccccctacaaatgtgagcatttcatcatcaaaagtgtttgagcttctgcctagcaatccgcttacagacacaccttaccatttcaaacttcattccagccaaaattatattgatctgtccaaatgttatttgctcaccgagtttcgaatccgtaaggaaaacgttaatggtcaacttgttaacctaactgttgacgatgcggatattgcgccaattcaaatgatcggacaaaccttcatccgcaacataaaaatgagtatcaatgggcgtgaaatttttaatgccaatgccctaatggcctacaaaacatatttctcacatgaactctcttattcaacgacagcaaaagactcccatttaaatgctgctgggtattacagggacacgggtgaagtgcttgaaacaggaaatggatgcatagcgcgacgtaatttgtttgctggtagtaacgttgctcaattcatcgccgaaaattga

SEQ ID NO: 45863 - DNA, 1877 bp, Heterodera glycines; identical to SEQ ID NO: 24431

SEQ ID NO: 45864 - DNA, 812 bp, Heterodera glycines
  unsure (1)..(812): unsure at all n locations
atgctgatgatgttaaattatatantttgttataaagcaagagccgacacggaaattatgcataaagcattgcataatttattcgaatgggcaaataactggcaaataaaagtttcaattcaaaaaacttttgtattatatttgggttcaaaaaacccaaaagaaacatataaatttgatggaaatacaataaatgctgtggatacaattagggatttaggagtaaacattgataacaaattacaattttccgatcatattaaccaaataacaaggaatgcgtatttacgtatgcgtccttgtttcgaataattaaatccaaatcgtctaagatttggattacgttatataaaacttatattaggcctttattggaatacgctccggaggtttggaatccgtctcttcaaaaaaatattaaaaaaatcgaaaagtgtcaaaaatatttcaccaaaagggtattttttaaatgcagccttccgccaattccataccaaaatcgattagaatacctgcaactgccaacacttgagaataggcgaaagctgtttgatctgttcatggcgcataaaattgcttatggccgaacagatctgaaactattttctatttttaatccctcaacgcgctttaacatccccttttacagatttaactcaaaatataaactgggcaaaaaattcattccctttgctgggagggtaacaaaattgtggaatcaacttgataaagaaatcattaaaataaattctttaaatcaatttaaaataaaacttaaaagttcactagggtaatctgtaagaccgggaaag

SEQ ID NO: 45865 - DNA, 685 bp, Heterodera glycines
atgattgatcgaaactcgccattgcacatgttcgtttttgctaatcggttagcaacttttgagggccgatggaactacaaagaaggatgcaccgctgaaaaagtgagcacattcgaccttagggttctactggactttgatccaggcctgaatttctcatggatccaggtcctggctattttttcagcaacctttattttactggacctggggttttactgggtacaatatggaatcaaggtccaggattatttttaaaatctcaaattctaacattaccaacattaagatttcttttttccaataaaaactgttcaggaaattcctaataaattaagccgatttattagtatgatttagtgtaacttttcagatggccagggcaggtttcttctgcactgagaagcgaaagaagccctctgacgcagcgaaatgttacatttgcctgcacgaaatgtattgggacccggaggacgaaccgtggttatttcatttttagtgaattcggcttttcactaaaaaaaacaacacattttccagggaagagcacaaaaagcaccgcccggactgtcctttggtgaccatcggcaaacaaaatgaggaggaattcactgtgcgcgaagtgctccttttgcttgcatatgaacacagcacgaaaatggttggtgccaatgccattgaataa

SEQ ID NO: 45866 - DNA, 582 bp, Heterodera glycines
taaaagattcaaagtatcagacgcttgccggtttggatgcgaacatctttgtcaagaatgcaccaccagcagcagcgccaaaaccgcagcagtcaaaggcaccgcaacaactcggtaatgggcaagagaaaccgttcaaattttaaccaaattcatgtctgtgttcccctctttttcagtaaaagattcaaagtatcagacgcttgccggtttggatgcgaacatctttgtgaagaatgcaccagcaacaccagcgaaggcggcaccgcaagccccgggtaagagcaatggttttttgtgtttcatctccaaatgacatttctatcctccccttttcagtaaaagattccaagtatcagacgcttgccggcttggacataacatctttgtgaagaaatagttgccgaagtgcgtatatgatgagaatggatgattgaccgatgtatatatttatatatgtcatatgatgtatttctctctgtttttggttgtatattcgctgttgtacagtactatatatatacatatgtgttcctaactcataaatattattctcaagtgtacaatgtgcatttttgttta

SEQ ID NO: 45867 - DNA, 686 bp, Heterodera glycines
tttgccattcgtcggatgcccaaagtaatttaaatgattttcaccccccccccccacctctcaaccttaggacaggaccaaatcatcgcggacttaggccgtctcattgtggaaaactgtccgccaatgctttgcacgggcaagtccatccaagacttttcaactcaaagtcttacgagtgattgtcaaattgttcagggctcgactgtgccgtggtaacggaacgcaacggatgccaggtaaaaggcattggtcaaagcgtgccaaagtcagttcattcaaagctttgtgcgtgtccaatcgggtcgcctgcccgcggctgcgacccaatgccatttgttctttggcacgatttaattgtcaacggctgcccaaacattacggtgaacacgcgcgactcggcacagaaagtgcaccggtggttcagaagggtaaggcattgcacttaagaagtgccattggctaatgcacttccatcccaaggtgaacagattcagcaacactgaccaatgcgaggtcagtcaacccctcgcccgcccaaaaaatgccattccccgtgccgtcccttccattcattcacccttccgtccgtttagccttacattttcccctattgtcctgaactcgacttcaacctttggcgttctccccgcactaagcaggagtgcgagttggtcagttagctc

SEQ ID NO: 45868 - DNA, 1555 bp, Heterodera glycines
catatcacgctccaactgatcttcctggacggggaggaagcgttccacgagtggtcccacttggattccatttacggggcaagacatttggcggacacgtgggagcgcaagtggtacccgagcaccgatggcagtgcgtttgagctcagccgagaaattgatcgaattgtaagggataatcggatgccaaatcagctattttgagaggatttggaagggggggggggataatcctaaattttattatgaattttactgacctctaactcagcccccacccccctaattctgtgcggttatttacctctgtcactttcttcgttggggtatataatctctttttttcatggttactggaaattttgatgaaattcatcaactaaaagagctcaaaaaaattaatttgaaaatcgttgaaaaaataaaataaaaatataatttaacaattttaattcgtcttaagaatgtaggatgtcttggtgcattaacttcccatctttcttcactttttgcctgagatcaatttcctttttattagtttcatttttttaattatgagcggagttttactattataattttttaaattttttctcaaagccgccttttcgggggagcaggtgctaattgcactttataatgataattagtagggttcgaagttgtatgcactaaaaaatgccaaatatgcttataaaatatgcactaaaaaccggaaaaatgcccaaatgtgcactaaaatatgccttaaaaattacccaaaatagcttttaaccctcaaaaaaatgccaaaaattgtgtataaatagagaattgactttgaaaagaagacaagggctgggagcatttttttgacaattgcaaaaatattgaatttctaaatttttgaatttttattatatgctaaaacaaaattacatttttatataaataattttttttccaaaagttcttacagaaaattaaaaaattttcgatttttatttaaaatttccaaaaagtcgatccttaggggtgtatttttcgcttttttcgcatttttcttgtgaaaatttgctaaaaatgaccgaaatatgctctaaaagcccaaaaattgcgaaatatgcatttattctgaaaaccccaaaaatatgcttttatatttcaccaaatcaaaaaattttaacgtagaaatgctttttttgagtccctttcttcatagcatatgcgcagaaaaaatatgcaaaatcatacaatttataaccctaaaaattagtaattagcctcttaaattcaaaggatgtctttgtgctgctggatttgttgggtgccaaaaacccgcacattcaaagcgtgccgggccatggtgcggcctcactgtttgaacaactaccgtacactggtgagaaaggggcttcagctactgtaaggtgatgataataattttttaaaattatacagagggacagttggcctaagctgaacttgctgaaccggatcccgagaatattttatccgggcacttcatactttggagcagttgaagatgatcacctcgctttcatgcggaagggta

SEQ ID NO: 45869 - DNA, 1258 bp, Heterodera glycines
atatttggaggcttgtcgtcgtcgggttgtggacgacttgcgcctcgtcagaacgtcgctttctgcgtgttttccacccgagtacaacatttacgatcgatacgtcaaatattatcatgacagtatatcacttcatgtaaaaatggtatttttaaacccaattttttaaattgaattttagatcaagaaattagcttccgatgcgcttgaaaagaatgaacttgtgcaattgctcagttggatccaaagctatacgtgagtgagattacttttgacaatttacattaaaccggacacgccgaagttcttggataataatcggaattgttgatgaaatttttttattttctgagatttctttgtcattatcttgtagttttttaaatttataaaattgccttttcttctcgtacgaattggtccctcttcattctatgatttacaacataattttagaggggagcaaatgttgggccatcccaaattgggaatccaagcgcaagcacttgtccacgagtttccattgctacccaaatcgaccaccaatcatttgcacgaccgattcatcgaaatgactcggagagatatgcacgaatggctggacaagacaatgatgcaggaaaaagacgtagtgaaaaaaaaaatctgtggtttaatttctgtatttttaggattggtataaacaggtgccacccgagacggacagcaacaaattcttttacactcagttgcccagcattttatttggaatggtcgaggatacggtgagttcgctgttcgtttttgagtttaattccgcgtaattttaaggtgtctctttccaaagaaatttcccaagaaattgttccgcgagtgattgatgttgccgtcgatgagtttattattttttcaaacaaatacaaagaggcggcaacggcgtacaaaggcaaacactttgaggatcggtcgcatttccaaagttacacttcgacagtggtgggcattggcattgattaaaactcactaattgtagaataaaagtgcagattgcaattgccaataatttggacatttgtgtggactccactgacaaactcgaaaagcacattcgtcttaccatggaaagcggctccatcgacggcctttcctcgcccgaaccgaccattgcctatggccccccttcagcacgttccgtcggattttctgtgattaatcgccaggagttgattggaaaaatggagcagctgaagaaaaaatggcaatttggcattcaatttgc

SEQ ID NO: 45870 - DNA, 1152 bp, Heterodera glycines
cctcattgcgcgcaaaggagcggcgagaaatcgagcgactagaggaggaggagcgagagcggcagcgacaggacgaggagagacgagagagggaaaggcgcgagagggagcgactggaggcgatggaacgcgagcggcagcgacaattagaaggtcttaactcgacaatggcggaaaaagctcttacataaatcactgtagaacagcgcgaacgcgaccgaatcgctgctctcgaggcgtccgccattgaaaggcgagcgctccgtgcgcgtgaagagcagcgggcgcgggagcgcgcggatttggacagacgcgcggaagagttgcgggagcaggaaaagcgtgaacgcgagcgcagggatcgcgaacgggcagaagaggagcgacggctggccgaactccgtgaggcggaacagcgcaatgcggggcaacgcgaaagggagcggcgcgaggcacaggagcgcgaggagcgtcgtcgaaatgagggctggcgcagtcgcgaccgcttggagcaattggcacgcgagcgggacgagcgagagcgctgggaggcggagaagcggcgattgctggtgcggcattccgcccaatggcacataatgcataatcaccattccttcagtctgactacgagcagggagcccgcaagcggcaagaactgacttccaaagagacgcttgagcgtctgacgcgcaagccatactattcgcgcgaaaatctgacccaactcggcacgggcggagagccgactgagtaccgcggcaaaggcattgagccgccggaattcaccacgaaggtcggcgaagcttcgtcttggcacttaccatttgtccattctgtgccaggtagaacgacaagtgatcgaacgcgtcgaccgcactttgtggacagagccggagacgacgcgcgtctccgccggattgcctccggcgagctccgcctatttcggcaacaccggcggcatttttccgtctctgttggacgcatcggaagaaagcacgcgcgagcgcatgtacaacccacgcgacgaggactttctgcgccgcgggggttcacaacggacgtcgaaataccgcgcacgaatggaaaaagcacggaaggattttctgcagggaacgggcggaggcgcggaacaatatcagccaagtgcag

SEQ ID NO: 45871 - DNA, 762 bp, Heterodera glycines
atgggctacccgtcgttcaccaaatacatgttcctgggtgacatggtcgaccgtggcaatcaaagtgtggagacgattgtcctgctgctgctctacaaggtgggtggaaatgccgtgccgcgggagggagaatttgatcattttgcagggccaatttacctcccccccccccaattttaaggtgcgctacccaaccaaattctatgtactgcgcggcaaccacgaatgtgccagcatcaacagaacgtgagtgctgtggtgccgtcccatgtgtcacattttaactctcaatttcagcaaaaaacaaaaaattttcccccattttcagatatgggttctatgacgaaataaacgagcgttatggacaccacaatgtgcggcctctgtgggagcggttcaacatgacattcgcctggcttccgttcgtcggattggtcagcgactgtattctgtgtgagttttttgccgttgatcggctgtctgatcgatcggacgaactctaatccccccacccttttttaaggcatgcatggtggaatcgcgccggagatgaccaacattcagcaactccgcatgctgcgccgtccgtacatcgacccgccagttccgtccctggagctcgacctgctgtgggctgatccatcaaccgctgtggaaggcacggcacccaacccgcgtggagtgagcatcctgttcggtgccgatgtcgtcgccagtgtttgcaaaaagctcaacatcgaattggtcgtccgcgctcatcag

SEQ ID NO: 45872 - DNA, 633 bp, Heterodera glycines
cttatttgacgatgattgacaacgatgcgccctgttgcatttgcaatggtaagcaagtttggattcacaactgccggcttgcaattagcgcgaaaaattggcgcatttgtgcgtaagaactcaaaaggaggtggccctttcaaaaaaatttttacatgttgttcacaaattttctgattattttggataaggcgttcgaggggcgatatgttagaaatgtgccgaaaaatacaatcaaattccggtaaacaaaatcgcattttctttttttttgaaattgaccccttggggtttgaaaattattttttttttaaattaaatttattctttgctaaaaaattgttcactttgttttcttcataattcgtgtttagacggcgaggacagcaatgccaatcagatcattttttgcgatatttgcaacattgctgtgcatcaggttttctggcacttttcccacgctcaactttctgtacgattttttttttgttgccaggaatgttatggcgtgccgtacattccggagggccaatggctttgccgtaggtgtcaaatgtcgccgtcaatccccgtcaattgtgccctctgtccgtgcagttcgggcgcattcaaacaaacatcggatggtcgctg

SEQ ID NO: 45873 - DNA, 4168 bp, Heterodera glycines
atggcattttacacgggcgaagcaatggcgacaacgacggcactgattggacggcaccagcacaacagccacagtaacaacaacagtaccaatggagaagctgaccgtagtaatggcaccggcacaactgttgccaaaattggctcaccatcagcagcagcggtggagcagaaacggcacaacagtaacagttctgtaggaagaggaggaggagggggaacagcggcacagacagcgactggtggtggtggtacggtagcggcggcggcggaggctaccgtacgccttcagcaccacggaatggagagaagggcaccagcaactggagcaggtaaaaatgggggacaaaaatgcagaaattgggaatgaagctggcgaattaccccaaaaattttggattggttcttttcgagacagtgtcgagactcgaaatagggatataccgagactcttgaggattattagtagagagcggtatataaattgggtgtaactccgacacccggcagtttcggtaccggtattccgattttttaaatttctggcacaaaaattctgaattttttccctaacccttgcccccttcaattgtcctaaaaggactgaatttgtcgatggcaaatggcggtgcgctgacgccaaatggggcagaggacagcggcagcgttaccagcaacgggacaacggcggatttgcaagtgaaagaggaggtccgttttcgagcggcggggctgcatatgccgtttggggtgatttttcaaattttagcccttttctttgtcggtcgctcatcaatcggtcgcactgagctgtgcttttcaacaccctaatgatcagcagagagacagaggtaaaattctaattttaaattttaatttatttccaaaatatattttgaaagtgtgccaaattgcaaacattttttggcactataacctacgcgtgctcgtattaattaaaatataaatgtcaaatgttggttgcttctgtgtttgagccaccatttccctcacttttactaattggcaaattaacacttattgtcaattaccgataccataaagtttggtagaatttttttttgatttccctcaaattttttggcattgtgtgccctccgcccaccctcagcagctgaatattgtatgcgcgtgtatcatgtgcatgtcgttggcccatcatttgtggtattgtccaacgaatgcgggaaaggggggggggaacccattgccaatgccgtcccctttgtgccattcatcccaccgccgtgccgttttctcaagactctcgacgacgggacaattaccccctcccgccgcagccccttattggctggagagtggggggcactctttagcgatgggcttttgtgcaacgattatccctccccccttatcggcctgaggggacagaggcaaagagcggcgatgcttttcctcccccccagggcaataaaacgggagggggggggggtatccgactgaattttaaaatagtgccaccgatattggcatgagatttattgggccaagtcaccacatcatattgcatgtctcagaaaaggaccaccaaaaaagggggcgcacaattttttatgtacggcataccgtatatgcaccaacaaaatgccaaatttcgtatcagctcaaactcctctcccctccctttcttcttttgtttgtgccgccgattgggccgcccgtccgtgccttcggcgcactatggccaattttgttgccattgttttcagctcgctccgggagagaggcggttggccatcgcctccggggtcgagattctcgacaacttagtcctttcttcctctcttaattaaactttgcctccggctgcgatgggtgccccacgaaagggcacatcattcaattgttgttttgttggcaaaattcaatttggcccccgtcggtggtgccccaccattgccggcgggccgtgccgtcgttatcggcacggcagcagagccaaaagtgagtgagcggtggtggtgccatgattggctgcccgacagctctgcggcgtcacaattgtgggccaagttttggggcaccggattttgttgatgaactcctttgatgcatggttcagcgcttctacccccaagcctcccctaatttgcataatttggcaccggattttggtccagtcagaaagtccttaagtcaaacaacctaagtagtataaattgagaaaatctgttgaaaagtttgtggaaagaaaatcagagagagagggggggggggatttgtaaattggtaatgaaattaaaaaaatatatttggcattttatgtaagacagcaaaaaaataatcttttttatccattccctgaaattaaatttttaaaagaagatatattcagattaattttgaccttttcatttgttttctgttcttaaccttttattttacatataaaatttaaaaaaagaattttaaatcttggcacttcattatgaacaaaatttctctcaattttatattttaatttatggcatttgtacaaaatgccaattttgctcccgaggacggactcaaattaatccacacaatgcatgcctaattgttttttcttggcattctgctgacctcccctcccagggcaaaatggggtcaaacgccaacagattgttgtgtgtattgcccgagtcttcccgagaatgggatttgcattaggttgagcacaaggtttattgtatgatgtgttgtggcgttgtgtgtccattggcaattaacggtcaaagatttgggcattggtacggtaataattaataatgtgagcgattagtcaccgttccctcggacacaaattagggacgcgcgcgcgctccaaattcgctgctaattaccactgctgtgtccattgatagatggggccactgatgaagcttaaaaggaggactaaagagagggggggaaggtgaaccgtgtcgggattttgagcatgccaatcaacgaaaaattaatggaaaattggaatttacatgaaaagaatgaaagaaaattaaaattttttataaatgttagagaatttcgcaaaattggctagggattagatttagtccaggaattcatcacaagcagaacattggcatcattctttgggaaaaatcatggctctcagtctcgagctgagtttcttttggtcaacaacattggtctccattctcggcacccagcctcgggtctcggggccacacatttcgactccctgaaaaacaaaaactctgtttcaaaaatccttagaatttttagtataaaatctcgggaacaattcttggtgtccatcccgatcccgagtattctcagtatatcacgactctcttggtcaactctcttgttctgccgtgccccgctagctttttgagaaattaggaaaatttcactatctctcttacagtattagtgtaatactacagtaacccattttcacagaaaatccctatgaagtgctgggcccaatttgcagtcggctggccgctgcgggcagtggccaaatccaactgtggcaattcctattggaactgttgtccaatccgctgaacgctgaaatgatcacctgggagggcacccatggcgaattcaaggtgagaaaaagtgtcaagccttggctaaaaaatccatttctggcggagggggggggggctacccgaaaattttcgatttttggcaaggagggaggaattttgattaaaaattagttcgtgtcacgaccagagacgttccagggttggccaaaaatggttcggattttgcctttgtacgagttgtcatgacgccgggatttgaacaagaaaattcgaccctctttaactttagctccccaatccccatccccctcctaggctagaccaaaattttttgaaaatttccagctttgcgagcctgatgaagtggctcgacggtggggcgagcgcaagtccaagccgcacatgaactacgacaaaatgtcgcgcgcgttgcgctactactacgaaaaacagatcatgagcaaagtgcatgggaagcgctacgcctacaaattcgacttcgatggtaaaaaccataactcctatgcttatcatgccactttttcaatggcattatttcggacaatttttttgtccaaatggttatatgatttgctctgctgcggatggcaggcctttttctag

SEQ ID NO: 45874 - DNA, 660 bp, Heterodera glycines
atggaaagaattcttagccaaaatatttacaactttctcctaaaaaacaataaaatttcggaataccaatttggttttgttagaaataggtctacgacaagtcaactaataacagttgtggaagattggtacgaggcaattataaatggaaaaaatgttgactgtatttatattgattttcaaaaagcatttgactcagtgccccataatttacttttatacaaattggaaaaaattggtataaagggcaaacttttaatgtggataaagggctttttgagtaataggacttttcgagttaaaattggggattctttatcctcaagtaaaaaagttacctctggcgtcccccagggctctgtcctgggccctttattatttttgatttatattaacgatcttcctgatgccttgccatcaggagtgaaaataaaattatatgctgatgatgttaaattatatatttgttataaagcaagagccgacacggaaattatgcataaagcattgcataatttattcgaatgggcaaataaatggcaaataaaagtttcaattcaaaaaacttttgtattatatttgggttcaaaaaacccaaaagaaacatataaatttgatggaaatacaataaatgctgtggatacaactagggatttagga

SEQ ID NO: 45875 - DNA, 754 bp, Heterodera glycines
tgtttcggtgttcggtgaaggggcgaagtgtccgtgcgtcgaaatgctttcaaaggggcgaatttgttgtggagtacaaaggttttccgggcaaaaaaaaatgcatttttatttccaagttttttgttcatttaggcgacttaatcagtgtgaagacggcccaactccgcgaacaacggtatgccaaagatgagaacgtgggctccttcatgtactactttcggcaccgggacaatggtacggattggatcatttgtttttggagtcgatatttcgaacaatttcgaagtcgaacctaaattgttacgggtccaaatttgagacactacctttgtttcaaaattttagggtagtttaggccgatccattatgaattttaaaccgattttggacatgggcacaagtcatattttgtgtaaacatcaaaacaaattttagtgttttgtatcgacgcgaccgatgaaacgccgtacaaaggccgactgatcaaccacagctatttgaagcccaacctcaagacgagggtattcataatcgggcggacatgtttaataccccgatagtttcttaatccgctccatgaactccatattttcttcccaattcgctattttgccaggtggccgacttcggctgtgacggcttccatttggtgctcgtcgccatgcgcgacattgacaacggcgaggagttgttgtacgactacggggagcggcggccctccgtgctggcggttaacccgtggattttgggc

SEQ ID NO: 45876 - DNA, 2043 bp, Heterodera glycines
acttacaacatcgcctctcttcattcaacagcagcgccaacttaccccacagagcgacagcgacacatggcggatgagcttgtggcgcttgcaccaggaacgcgtgtctcaggccgatggaccatcctaaagaagcttggcgccggagcatttggagccgtctatttgtgcaaagatggcaagggaacagtggcagcactgaaaacggagccaatcgacacacgtcaaccgcttcttgttatggaggtagaataatggatgttttaatcaaaaatttttgtttttgttttaggccaccgttttggacaccctgggcaaaaaacttaagaatgctgatggtcaacacttctgccgtctgttggaccttggacgtagtgaacaacggaatgctacgtctggagatacggtgttcaactacgttgtgtgagtctttgctctgattacaaatcgggttctaacatgttttccacttttagcatgactgtggttggcactccgttggacaaacttattcgagacgcgggcgatcgcttcagtccgggaaccgcaatcggcatgtcaatccaattgctgagtgccatcaaggctcttcacaatgtcggttttcttcatcgcgacatcaaaccagcaaacacagcgattggacgggcggagaccaacgaacatcgacttctctaccttatcgacttcgggatggcccgtcaatttcttcggcccgatgtgagttgcagacagcttgatgaattgccaaataagcccaacctccccattttacagggtacgcagcgacgtccgcgagcctccgcgaatttccgagggacgccaatttacgcaccgatctctgcacatatcaagcgtgactacagccgcaaagatgacgtcgaatcgtggttctatgtcatggtcaaattctacaaaggtgctgtcccctggaaatttgcgaatgacgtcaaggaggtgggttcttggggaaatatgattaaattaacaaatccatctacagatcggaaggatgaaatgtcgccgcatggaagggcaaccggacgaaattcgacaacaggccatcacagaactcattggagggtgtccgccggaattcacccagatacttgcgcatattgtgagtttttacggtttttttttttgcgttttaacaattacatttttcgcaggatggactccagttggaagaccggcccaattacgagatgattgagacgatgctgcgtgagcacctcacccgaagccgtgttccggagcacccgtacgactgggaagtgggaaggcgcaacgcgatggcacaagcgcagagtgaggcagcgaggaggaagaaggataacacgaaagaaggcggaggaggaaaaaacaacacgcaaggatgagcccggccctggtctgatcgtatttgctcgccattgtacatattactgtgcctgtctgatcataattgctcgtcattatacataatatgctgtgatcagttcttatttgtcctgtcttaaacttatcattgacttgtgataaaattttattgattaggttaattttgttattctccgatcgtggtcacctatcccttgttcgaaatggatgccggattcgtgatcaacgaccccgaaaaatcacaaaagagacttgtttcatgattagaaaacaaaaaaaacttggttctagtcggttttacgcgtcacaaaaacagtttttttcgaaccgtcaatcgaaattttataccttccgaattgattgtatactttttaagccattgttcgagttgcctgtgtataagttgtcatgataaccttaggtttaacaacgaaatttttagttaaaaactttactgaatacctgacaaaaaaaagtttttctcagttattaggacaactataataccatgagaccagggatggcacggaattccttggggcatcggaatgccatccctgacatggacacaaaaatgtgatgggacgcgtaaaatgccatgggacgcgtaaaaccgactagaacccatttcttttcatatttttataatttgtaaataaa

SEQ ID NO: 45877 - DNA, 2132 bp, Heterodera glycines
gaagtactcattgaaccaatcgtcaaagagtctgaagaaggtgcgatttgctggcgtttgttggctctgatcgaagaggaggccgaccttcggcgtctgttgctccgatctctcattttcctgcacaaagataagagtttgccgcctcggctggtccctcgtctgttgagccgctgttccgcaaatcccgagctcacttttccctgttggatgcttttgagtgaactcagcaaatttctcgacgtattccgtggagatagttttttcattgtttgtccattttcatttttcaggtgtctcccaacgaagctgtcagttattggtccgattatctcacgctcactcaccaaaatcgtctgatcggatacatggctgatctgatcgccaaccgagcaaaagttctcagttttcagcagcgccgttttctcagggagagtgttagcggagcattgcagcaattcaagtggactttcctctggtagcgcttctgcacaaatcccgcttttcctgttgaaggatccatcccacttacatttcctctgtgtatcatttgttcgcccgaattgtcaatggaattggccaagacgcatccggaaaagcggaacttaccaagttcaaccagcaatggtttagcaagtgtctggtggagttggacttgttggtctatgccaatgcaccgcccgaggtggacgatgccgaatcggtgaacagtcagggcagcaacagcaccgaactgccgggcagtcaaaggcgagcgagtcaaatgtgacgaacggagtgaaaaatggaatttaagtgacaattgcgagaaaatcattcggctgatcacttccatcggcgagtgccttcagtacacgcccgcactgatcaacaaacaaatagtgaaccttctccaagtgatcatcgcgtcggatgtgctaaatcggatttaccaagcgcacaacgacaatgaacacggcggtgagcacttttaacgcatgttttgttcatttctctcctcgttaagacaaattgggagtcccctccccgcagcgtctcttctctcccaacacttcgttccacacggaactgcccgcggacggccccggcggcactcagtccaacgcggcgagtgaagcaggcggtgtcgctgccagtgaccaaaaccagcgacactttcacatgcgcatcaaaaaacgcattttccgcggagaattgatgagccgagaagttcgcgccagtggggtgctcgccattggcaaactgtgccttttggacgaacagttggccaagaagtgcatccccgtgtttgtgcgacaattgcgagaaaacccggaccattttgtgcgcaacaatatcgtcgttgtcatctgcgacctttgcattcggtgggtattttcccaatttaatactgcataattaacgcattaatcggaatccctctcatcattgtagttacacttccgaagtcgaccggtacagcaccattctcgcctcgtgcctttgggacagttccattctcatacgccgccaaacgttgctgctgctcaccaatctgatcaaagaacagtacctcaaatgggaagggacggttcgtctcgctgtttctttattcggagaattgcattttgattcgatttaggtcatttaccgttttgtgaccactcttttggacccagagcagtgcattgaagaatatgccaatttttgtttggtattttattatttcgttcgttttttatgtttcattttacagacggacattttgttgccccaatttcgtgagcggatgttcttccatcactttttggaatgcatgttcaatttcaacggagttcggcatgtctcttggatccccagcggttgggtgaattcatcggtgcctttctaattcattttgtgccatcattctcagctggctatgaactgagtgaagaggtacaaaagcgttgttccctcgaaggtcgcgaattgttcgactcgcgaatgcgcctttacaaatatatggttttgctccgtgctttatactttacagcaaactgtttcagctgaacactttcgaagaccaacaaaaggtgtacattttggagaagatcggtttggagatatttgtgccgatcgttgagggtcgactgaaactttcggatgtgaaa

SEQ ID NO: 45878 - DNA, 2325 bp, Heterodera glycines
cagttcatttttaaagttcgtttctgcccctcttaagaattggccctgtcaatgttttccaccgtttctccctctcccctaccgccggcgatcgtcagcaatgagccgatctttttgaataatgcccagccaaaaatcgctttatcacaaaatccaacggcggcgagcatagcaaacaacgaagtatataataataagacaaatggaggaacattggcatttttataaagaaaacactcataaaaggatgaaacggcggccgattcccaccggcggaaccaaagaaagaagcacttaactgatttataagcgcaatggcaaatgtccctccctcccatacatttagaggatttgttcatctgggtaatttcagtccctttggctctttagctacagtcactttttaattgaaaagatttactaaacatcatcttttctgtttccgatagagaaagagagaggagtaaagggggggggggggagaccattggacccattgcattccaaaggaaaaaatgtcttcctttttaaacttcaattatgattttgctctagggtaggtgcttttttgtgttataaataaaaattattgtcaacttgtatttttaaccaaaacgtattatatgattaattattggcttgtaaaagggaatggaagcaattgatcgttgagtgatcagtgagaatgagtaacccctcttccctccccaaatcttcaaaatgccgccgcctcctccaatcgaacgaatggcaatttatgtgctgcctaagaatgcagttttcagatccgacaagatctgctcgaatttgtgctgggcggagtcgcctcaactctttcgcccttcgaccgctcgcttctcagtgccgcaggctcagtccaacctttggagacaccgatgctaattcaccaccaccagcagcagcaacacaacagtcattgtcagtcgtaccatcagcagctgttgctgcttcagcaacagcaaatgaacgcgacaggttggaaaggaaggcaattttgtagtcaattagcagttgtgcagctgtcagttgccgaacgtcgtcgccctttgtgccttcccttcaaaacgaaatgccttgtgccatttcgtcgttgtccaattccatccatgccattgcgtcaccgtcctcccactgttcctccgccgcttacctttgctcaaattcggccgatggtcccccgcccgtttcgtctgcccctttttcatcgtccgccactctctctcctccgcttcttccgccgcttctgctccattcgccattgctgatcgaagcactgaacactgctcaccagcagcaacaattgctccaatcgccgctcgtccaacaaatgctcatgatgaacagcagcaaaacgctcgaaatggcagcacaatcggcgcaaaccaaaaacagccaattccatcaatgggaatggtccatctcggaaaggtgtggctgagccaaaaacgtcatgccaaaattgaaaactgcctcttaagctataaacagcaactcgccgaccattcgccattggaatgcccgtctcccgcctcctccctttccctctccaatcactccctcgcagtgcccccgccaccaattcgactcggctcaccacccaccccaagaaaaaggcgcaatttggcatcaaatgaggatgacgcattaaaaaacaacgaaagtgctgtcaaaatggaatttgatgagggaacaaagggaatggcaaaaaacagcaagaacgaagaaagggaagaatggagagagccaagcgaagaccaatttgaaaacatggagcagcaaaaggaaagcagcctaaaatggacactgattgaggaaagaagacggagtgaagtgcaagtccaaaatgaagcgaatgagcggcataagccgcgcaagacactgccccatttgctggcacggcatcagcaccgatgtgcccatccgggatgcggaaaggcgtacagcaagtcgtcccatctcaaagcgcacttgcgaacccacagcggcgaaaagccgttcagatgcgactggaaagactgcgggtggtgctttgcacgcagcgatgaacttacaaggtcattgcgcctcaagaaaaccattggcaaattcagaataatgctcaaaatgccttagtttataaaggacggagaatcattatttttaaaatttttctcgtcttaaaatgtatctgtcacaagtaaaattgtcattttcaggcattaccgaagacacaccggttatcgacccttccaatgcgcctattgttccagtgaaatgcgatttgctcgttcggaccatttgaaatcccatgtgaagaataggcat

SEQ ID NO: 45879 - DNA, 1646 bp, Heterodera glycines
agatagaatgccaatgctttttgccaaccacctcttccaacaaatgtttttgctgtttatgatctcatctttccatgcccaattggttgctgttgataatttaaatccgagacctcgacaaattgtcaatgaaggtgatcaaaagtttatattaactccaaaaaatgagatttatttatttttattaattaaattaatttatataataataaataaaaattacttttaaatcattaaacttttgcattaataaagtttgtaataattctgttaagtaataattttcttaattttctaaataattaaaaaataaattaaatttgcttgaaataattatcttaattttctaaaatagtaatttaaaaataattaatttatttaaattattccaataataattatttattttttgaatattcagttgggagcactccacgctttcacagcccaagcaaaagtcaagaccaatttttgttgatcgatgcaaccaaaaatttcattctgatcggagcaaggtagaagaaataattgtaatgaacatttaaataataattgttttttacttctaagagatgcattattcaatttgagctactccaatttggaatccagaaatgtaattattattaattagttaattacttttaagttatcaattgacagtcattataattagttaattatttttaattctcaacttacagtaatcattttcattaattaattttcttgattactttaattaatcaatgggcaattatcatttttgtagagtattcactggaaagcaccgggacagaccattgaggaatgccatatgaaaggcaaatcggaagtaaaaatgccattttatactaaaaaataaataattttgtttatttttaagacagaatgtcgtaactttatcaggcaagcattttattttaaatttaaatttaaaataaataatttaaaatttttcgaattaacctaaaaattttatttatttttttttgtagagtggccattcaacttgcaaatggccaagtgttggtctgtggaacacatgccttttcgccacaatgtcgccaatatgaattcagccaatctgagagtcgttttgtggaaaggtcccaattcaatggacaagtgggctttagaaccaataatttttaattaatttaaaaaattttatggaaaatttttttattaatattaaatattttacatcaaatttaatttatatcaaataatgataaaatttcaataacttattttaacatcttcaaatataaattaatattattaatttattttattaccaatttctaattaaaatattataatttttgattaaaattaatttacttactatattaattttcacaacttataatttaaataattatttgtaatttaatttaaaaccttaaaattaaatgaatattataatttattttaaacatctctggttttaaatacatttattaagggaatttcaccgtatgatccacgacaaaatgccacattcgcctattccaatgaattgaacgccatttttatcggtgccatctccgattttagtgccaccgacccgttgatttatcgacgaaaattgtctaatggggaaacaatgcgaacccagaaggacgatcgagtgctagatg

SEQ ID NO: 45880 - DNA, 391 bp, Heterodera glycines
ttattccgttttgcacaccggatcattttgaaacaaaatataatgttccaaattttcgtcaaaactctcaccgggaagaccatcacccttgaagtcgaggcgagcgaccccatcgagaatgtgaaagcgaagatccaggacaaggagggaattccgccggaccaacagcgcctcattttcgcgggtacatccgcttgatatgccaggatattaaatgtttcacgtaatccttgtttttagggaaacagctcgaggacgcacgcaccatggccgactacaacatccagaaggagtcgacgcttcagctttgtcttaagcttttcgggggcgcaaggacgggcaaaacagcacactactctcggagcgtaagtcatgattatcataaaaggcc

SEQ ID NO: 45881 - DNA, 647 bp, Heterodera glycines
atgaatgtaactgttggcattgaaattctttacgtgccatttggaatttcgatttttggtcttcttggcaatacggtcgctttcttaacaattattctctctgatcttcgaaaggtatttaaaagcacgatgaaactcttttgcatttgaaaaaaggaaataatttaaaaaaattatttgttacaaaaaaggaaataaaattttaaaatttatctttttatataatgctctgcaaatgaaacacaattatccaacccctaacctattgttttaaattttcggaagctcatttccttgtggacaaaaggtcgtccttggttcaaatattcctattaattaattactaattaaattttaaatttcaaatgttaattgcttttctttctcagaattacgtgaacatttaccttttggtgctgctctgctccgactctgtgcttcttctcgacattttcgttcagcctttgttccgtttcgacgtgctcactttttggacatgcgcaatcaccgaatatttgttcaatgcttccgcttttgtgagcagttttgcgatcatttcactcaccggcgaacgctttttctccatcattttccctctccgacatttaaaggtccatttttatttagattcatttatttatatttaa

SEQ ID NO: 45882 - DNA, 1053 bp, Heterodera glycines
atggagctgtatttgttccgtcccactgattaccaacgactttacaattgttcctcgtacaaaattgacgacattccgcttgttaaccgtacccataccgtactcggcatctccttcatcatgcagttcgtgctgttccaattgtgctacatcccttggtacgtttagtttgtgcttgttcccctaattatgtgctaacatttagcatgttctccatttggaaacaccgtgaccaggcttgctacaagttcatgttcttcatcggtctcatcgacattctctgtttattcatcaactgcttaatgcacggctatttcgccatcacaggcgttgtgttctgttcctatcccgacttgatctacttgtccggcattgtcggattttgtaagcggcctacggctgttcactaaaaatacaaagaaaaagcgaatatggatcggtagctcaatggtagtctgcccattaaagggttggcgtcggctcaattcaaaccctatgcctaattttggctcatttattattttattggccgtccctttttgctttggtatgtattatggctttcttattttgtgctaattagtgtcacttttggcatttcaattctatgctaattaccatcccatttgcccttccgttttcatccttttcttttctcagtcttttgggtggccgaatcatcggcggacattcttcttgcggtaaaccgatgtgttgagatgatctcgcccgtttggggggaacggctttaccacggcgggcgtgcctggctttggctcattccgcccctcctctacgccacttacatcgccatcacgcaaatgccggttcttttcagcggcatttacttttcctggttctttaaccctcatggtatatgtcatttgtacattggcatttggcttttccttttttagcatttgctttaccctttttcatttttagtcggatacatcgacgactttggcacaattgtgagaaatgcatttttatattataattcttgcaagtccaagtggtgttttattttggtctttattatggtgctgggac

SEQ ID NO: 45883 - DNA, 1954 bp, Heterodera glycines; identical to SEQ ID NO: 24795

SEQ ID NO: 45884 - DNA, 1012 bp, Heterodera glycines
  unsure (1)..(1012): unsure at all n locations
aatcgactgtatttantttggacataattaaagcatttgacaaagtccctcatgaattgctaatttataaaatagaaaaaattggaattaagggcaaccttctaaattggctcaaagatttcctaaccaacaggacattcaaggtcagaattaatcaacagttttccaaagaatttcccatcaaatcaggtgttccccagggatctgtcctggggccaattctatttttgatttttataaatgatttatccccagtaatccctgaaggaatttcgctaaaactttttgccgacgatactaaaatttacttgtgttatgacaccgaatttcaacgtaaaaaactaaacgaagccttacattgcgtctgccaatgggcccaaatgtggggtctacaattttcaccagaaaaatcagcttctctgtacctcggcaaggacaattttaaggttccctaccaatttaatgaaagactattaaagagacccaaacaattcgagatcttggaatcttaattgacaacaaactgacttttaaatcccatatttcatctattcttcaaaaagcctaccttagaagcagaacgctttttcaaaaaattaaatctaaatcatcaaagacatggattaaagtctataaaagctatattaggcccttacttgaatattcatctgaaaattggaaccctcacattaaaaaagaaattattcgccttgaaaagtttcaaaagttttttaccaaaaaagttttcttaaagtgccatttaccggttttacaatattcagataggttaaaataccttaatatttccactttggaaaataggagaaaatatttagatctgatcacagccttcaaaattattaaacaagaaactcacctaaaccctctaaaattatacaatttatctcaaagaagaaattcgccttttctcagattaatcactaaatctaaaataactaaaactgaacattcttttattaaccgtactacaaaaaacttacaagaattaagc

SEQ ID NO: 45885 - DNA, 1363 bp, Heterodera glycines; identical to SEQ ID NO: 24825

SEQ ID NO: 45886 - DNA, 1107 bp, Heterodera glycines
  unsure (1)..(1107): unsure at all n locations
agcgattctacgaggaccacgaaaatgtggtcgagaatctcgaggattggacttcggaatcgcccaacaaattgcactttatccgacagcctcagaagtgngccctcttcaggcatccacagcactttctgatcgctgatcggaatcgaaacaacgaatttccgccggtggagagcattggcgaatgggatacggaacagaaacagcggttgctgaacgcgttcctcagggaggacggaggaacgcgagtgcccgaattggaggggtggctgatgctgaaggcggacggcaagaagtcatggcgacgacacttttttgtactccgttcctcggggttgtattacgtgccgaaggcggggaagccccgggggcccgccagggatttgaactgtctgatgagcgtgttcaacaaccaagtaggagatgagcagcccattaccaccccttatcccactcattttgaaggtgtacatgtgcacggactggcgcaaaaagtacaaagcgcccaccgaattcggatttgcaatcaaacatccgcgcatccaactgaaaacctccaagtacatcaagtacatttgctgtgatgacgagttcactttccgccaatggctgacggcgcttcgaataacaaaagtggggccgaaaaacaccgaattctcatcaaatttaaatttcattcgaattgcttttccaaattcataattcgtttgcttttgctttacgctccctctcctccaattaatccttttcaagaatggctgtcccgcgctgtacaaggacttccgtgccgctcagtcgcgcgagtgtccgctcgtcggccccgcctcccccgcgcgagcggaagtgccgcaggtgtccctacagcgcctctccgcgttggactccaattttgccaccgtctcttcggcgtcgccgcgtcaccgtcccgcgcttcatctcggcgacttcgcctgttcctccttctccactcgcgcatcgtcctcaacccccggcggctcctcccgtgaaggactgatcagtcgcattgcttctccggcgccgtcaatggcattcaatgttttcgaccaggacgaatgtaacaccataaaacgacatccggaaggtgtt

SEQ ID NO: 45887 - DNA, 305 bp, Heterodera glycines
atttgatgtgtgttaaccttacaaattaataaggtcaaaactttgaggacttcgccctctaatgacgaattgttggagatatacgcattgtataagcaagcgacctgtggcgacaacaacacatgcaaacctggcacttttgatttccgtgggaaggccaagtgggaggcgtggaaaaaaaagcaaggttctcacggaaattattaaaaaatttaaataaaggactttcgtcaggcatctctcaggagaaggctcggattgattatgtgaaaattgtcgaaaaaatggtggccaaatacggtgtt

SEQ ID NO: 45888 - DNA, 1121 bp, Heterodera glycines
  unsure (1)..(1121): unsure at all n locations
tgaatttgcccaaaaagcgtggaccatcagcngtcgacgggttcatttggggcacacaaatggtaaaaataaaatatactagtatttattgccttttttaagaaaaatttattattgttgtctaaaataggccaaaatgtaaaggaaatctctattaaaaattactcattttttcagtttttttttaaatttctatttctgtcaaagggaaacgattggatgtggccttcaaatattttattattttttttggtctacataatttttcacaatttttcccaaaaaaggtacgcaattttgttggacagaacagcggaattggagggcaacaaagcgcgcatcgccaaagcaatggaggtcaaaacgcattttgaacgtgccctggagttgaacccaacggacgcgaccacttggcaccttttgggttcgttggccaaacattcaaaaacaataatgtaatttggtgtaaaataatattttgttttaattttcttggtctaaccacatttacaatttattttaaaaaaattaaaacgaattgggaaaaaaatttaacacctcattttaaagtggatcatccaaagcttttgaatggtatttttacattggaatgtttttgttttcactaacaattttaacacccatttttatgacgaattaaaattaaaattaataagatttccatcaaaattcaatattgccaaaatcatcgcgggaattaaggcgtgtggcactacgaattggctgatctgtccacgcacaaacgatggttggcctcgttggtctatggcagtccgcccgagaccacttatgacgaggcattgcgctgctttgaacgagcggaaacattggcggtaattttatttttgatggatggatttttttttgatttttttttttttggtggtggaatttttaaaatttgtttttagccttgcttttactcggccaacaattattatttggcacttgtgtatgaaaaaatgaatcgcaaagaagaggcagtgaaacagttcaaattggcatataacgcgccaatggccgaaccggacgacttggaatatcacaacaaagtaggggaagatgccaaaaaaaaaatttttttaattcaaaaatccatt

SEQ ID NO: 45889 - DNA, 858 bp, Heterodera glycines
atgcaacaatacattaatgacaacaacgaattgcttagaaaacgcatcgtaaaacaacaaaaaccaaaagaatgcatcatcatcagtaggggagccacgacatttgcggccccagccaaaaacgacaattgcggtccgacatttgcggccccagccaaaaacgacaattgcggtccgacatttgcggcctatttcttaagggccattttccgacatttgcggctcaaccaaaattagacttatttaggcataaatttagtaaattttacataaaaccactattattttcgcattataattggaatatgcatgacgccacaattgaaaaccttcataggacctaacaatgccatggaggcaaagccatttatgggtgttgcagggaagggatttaagagacaaaacgccaaaaaaatgcaaataacatgaaaattagccaaaaaagtttttatatagataagtcggttattttaagtctaattttggttgagccgcaaatgtcgggacacgcttttaacacctagaaatttaggaaaaaatatacaataaaaaaaagttttcagttttaaaaatttttggcccgcccgcgtctatttttttggctccatcataaattcaatttgtaaaattttctttctttttatacttcggtctttccccccactttttaattcaatttatcgaataaatatttcattttccagcccccgacttttccccgccgtcccccgacgtagtcgaactgagcgccttcctgggccaggaactgtccaagtcggagcggcctgagttgggcggtgccaagattgtgatcagcggtggccgagggctcaaatcgggcgaaaacttctcattgct

SEQ ID NO: 45890 - DNA, 223 bp, Heterodera glycines
atgcgcaaatcgttgaagcatcagctgttggtggccgaggtgctcaaccaattgacaacgcgtttccagccaaaggtgggggagaatgattttgggtgcaaatgaatgcctttcctttccttttaaggtgccgatcatcaagaagtgcatcgactcgctgattgagaaagaatatttgaagcgctcggaggaggatagcgatttgtatgaatatttggcatga

SEQ ID NO: 45891 - DNA, 878 bp, Heterodera glycines
atgatcagagagttgtcggcaatgctcaccgcggtcaaacacgagcaggagtacatgcaagtgcgggacagagtgcaccgttcaagtaagtggaggacggaacggcaaacaaaaaaaaaataaaaaatagaagggctagtggagggtagggacggaacggaacttttaaaaagggggagaggatggagtaccctatcaaatcccatccactattgaagtttggtgcattccaataaaaacgcttgtcctttttatttgggttgcatttgatcaattattgatccccgagaaattaaacgacgcaaactcaaacccaatcaaaacgttcatttccatttcagtcaatgagaatacgaacagtcgcgtggtcgtatgggctgtgttcgaggcgattctgctaatttgcatgacgattggccaaatctactatctgaaacgctttttcgaagtgcgaagggtagtctgacaatgagaagggacgcaacgggtgatgtgatcgacaaaaccaacccccaaaaaagggggggagagattcgtgaggggaattgtcggggaaaagcccttttggttgttgttgttattatatattcggcggaactctcttctcccaaatttcgattgaaacagaatttaatgacgatactggtcaatgatttgcccgagcgacggaaagagtgccgtccattcctaatttattccaaatgcatagtgtttgtggtataaatgttgcgcggtaacatcgatcaaattgtttttttcatatgatccgttcaattttcaagatgaaccgcgtaatttattttgagtatgtatccaattgttgacataaattattgccatgtgtgttattttatgagggattttacaaaaaaaataaa

SEQ ID NO: 45892 - DNA, 1041 bp, Heterodera glycines
atggctgaacgggcgcaaaagcacgtggaggacaacagaagcagaaaactgaccagggaagagaaggccgccaaggccatccggaagattggggaggacacaactttggcagtgcacgtcaccgtttttaagtggggaaaaaaggggaggggacattagagaaaaggggcatcattagcaaagcaaaacgggacaatgccaatgcattcattcattctctctgcaggatcaaatcgttggcaaaccctgcgaagaaattcaaagtgatgatgaacgccaaacagttgcaaatgaccggtgttgtcattgtgttggaagacataaatgttgttgtgatggagggaggtcagtttaaaattccgttttgcttctacacttaaagattttaaaaaatcaacaaaaggtgcacggaacgcacaatttttgaaccattccaatagcataaattggccaactgattaaccaaaatattcatacgtgaaaatgccataatatgccgaattttttttttgttcaatgccttcaaaacagtgtcgtacatttaatggcttcccgcgtgcccttattgactttttttaaaattttgaggtgtaggagcaaaaccaaaaacctaaatttcggcacgcaaattttattcactttatgtaattaaggtcccaagcagcaaaagttcttcaaaaacttgatgctcaacagaattcgatggtctgctgaaattgccggtcaaaagcacgaccgaagggcgacgcataacagagcgaatgaaatgggagaagggacggaggatggaccagcggaagagaagaggaacgagtgcgttttggtaagcatcccaaccaatgtttgttgtcttaccaatttcaaattttcaattctcagatttgggagggcgtcgtgcaaaagcgagcattcactggtgagccacgcttcactcctgtgaccaatcataagcaggcccgtgaactgctcgaaaagtacggagtgccacactactgggacctgtgttactctaccactgtccttctgaatgacgagacctga

SEQ ID NO: 45893 - DNA, 476 bp, Heterodera glycines
atgcctccatatgaaattactttcttctttcgtccattgactaaggtttttctcttaataatttttcaaatttattataactttcagccatctttggtcgaagcaataaaaaggcaggcgactcttttgatggataaaggcgcagtgattacgaaattggaaagcctcggctaccgcgacttgccctattcgcgattggacagattcgcgaagaaaaacgtccattatgcaaagttagtcgattgattgtgatatttgctgaacattttggatgctttcgtctttgaaacttaaaaataacaaattctcaaaaatgcaattgtattcaagatttgatggctaaatttcactttttgtttctcattttttacactgtttttagctccattctgatgaattcgtcgatgtcagtgaaaacaatgaatgatgcgagaacattgttttcgaatgacaaagaattggtcggtttattgtga

SEQ ID NO: 45894 - DNA, 1169 bp, Heterodera glycines
aatattgccaacacgatctgcaattctgccacattaattaacagatacttacaattttaaaacttttcggcttcaatgtaaaaatcgccaaaattggcatttctctcacccgaccattaaaaaccgaaaattttaatttcggagaagaattcccaaaaacaggaatacaatgttggtttaccattttaaattcatatgcgaaaatataaaatttggcaaaattataattttggctcaataattcgaccaaaaaatttgtcattaaattttgaatttgttgatatagattagggctattctcacaaatattttgaattccgctgtgatttgatcgattttctatgcttcggttcacttataaatttcgttttttatttttaaattttttcaattaattttcttatatctgactaatccttaaaaataaaataaagttttttttacagaacaatgatgttgagcggacatggaaaaattacaaggaggagcagctgaagaatggcttgctcgattggcaagactacaggtgaagaaaatctaacagagggcgagaaggatggaaaattctaaaaaaattaagaaatttgatttacggaaaaccgcaggagggccaggagatttcaccggaatacgtcaaaatgattgagcgagacgaacgtcgatggaaggtcagaagcaggccaaaaagacctgctaatttatattaaatcgagaggctaacggccaaattttaatatttttaaatgctttccatacagtaaactcaaaaattgatttacaggtggctgactacaattcggacggtaaaatggaccgcacggaatacggctgtttcatgcacccggaggactgtgaccatatgagagacattgtggtgcaggtggattagcaaatttatttattaaaaaaaaatcaaattagattattgcttattaaagtccctttttcaatgattttcactttatatatttttcacttgtcttaacttggaacgggaaaaattcacctcaccctaattctcatatttacccagtattgttgcctaattatttaaaatgatttattattaataaatctttaattgctattggagcccattcattaataatacttaaaaatttctgtacaggaaaccgtcgaagacattgacaaggacggtttcgtcgaca

SEQ ID NO: 45895 - DNA, 763 bp, Heterodera glycines
atgacagaagaaatttcgggcacggagcgtgtgtatgcactgtcggtgaacgtcggcggcttgctgaaccacgtcatcttccgccgacacaaaggaatgttcaccgtggacctcaactccgacaagggcttccgaacaatcgaacgattcgtcgacaattatctgcgtaccggagtttccgtcaccaccgtaagtcaaacagcttggaatctttttttttcattttccctttttttcagcaacaatacgtcgctctcatcagggccgtgccccgcgcgcactgggagctgtcgcacacttcaatcatcctgggcaatgaacttggccgcggcacgttcgggatcgtcaagagtggcgtctacgtggatcagcaggggactcgagcggcggtggccatcaaagaggtgtctcagacgagcaccaaagagcaagtgaggaaggggggtgggttggaagactgcgtccgcatattattaattttcagatcaaggagttcatgaatgaggcgcgagtcatgcggcagctccgacaccccaatgtcatccagttctacggcgtcgcggttggccaggagcccctgatgatcgtcatggagctggcgacggacggcagcctcaccaactacttgaagcagcagcggcggagcgcgcgggtcaaactctacatgtgcctcggcgcagctggcggactggaccacatccactcgaagggcatcatccattgcgacgtcgctgccagaaactgcctctacacggacggcgtg

SEQ ID NO: 45896 - DNA, 3779 bp, Heterodera glycines
cccccaaaatatggatttatatggactaaaaaccttcaccaaatcaaaaaattttaacgcagaaatgctatttttaagcccctttcttcatagcatatgcgcagaaaaaatatgttaatccatataatttacaaccctaatgataaagcataaatattagcccggcaatagtattgttaaaattcgaaatctctgacaacttaacggacgggcacgactgggccccgccaactgggccccaaccaactgggccccggattaactgggccccaccaactgggccccaagagacagtaatttttccaccattattgttagggctgcgatttatatgtaagaaaaatcgtaaaatatgtaaataaatatgtattaaaatatgccgaaatatgtacgaaatatttacaaaaaccttaaaatatgtactaaaatatgtaaaaaaaaattttttaatggttattttttggaaaaaaattcttcgtaaaaagtgaaataggcacaaaatgctataaaaatgaccaaaatgaatcactttttagtattttaaattaatttttgatagttaattttttgaaaaacattcgattttttagggatacattttcaaaaaattttttttaatttttcacaaaaaacctataaaaattctcaaaaatcctcaaaatatgtaaaaaaaaatgaaaatatgcacgaaaaattgcgaaatatgtacgaaaaagtccaaaatatgtataaaaatatgtacatatgtaatatgtagaaaaatcccaaaatatgtaaaaatatgtaaataaaagtcccaacttttgttcgcaaacacaaaaaagaaagtgtttttcctactaattagagcatggagaatccaggaaaaaaatatgtatttacatataaatcgcagccctaattattgtataatattatttatatatttttcattacatacacatatgtatgtgtgtttcgtttacaataatctaatttgtgtttatatttttttcgttcagtgcctaactacaataactttccttcagctattttttaaatttaactatcatttcatggcaaataatatattatcgcagaataaccacaaaaaaattgagcatgaaggtcatctttatgttttcgccaaacttagcgcggatggttttatcaaatttttgaggtgtgagaacaaaaacaataaggacatgaagtgccgagggcgtctgcacaccaatttgaatgacgtagtgttgaaacaagtcaatgagcatgtctgtggagcaaaccctgcgcgagtggaagcacagcgcgtcgttacaggttaggttatatcaaatgctgaagattttgaatgcatatttgacaattttaggaataaaatgtagagccattgaaaccgccgagccgccatctacacttcgctcaattgcactccaaaatgtgggaacccctgtgttgtctgaagtcccaacaaaaaatgcaacaaaacaagttgtgttaatttctctgcgctcattgtattgccttttttagctaatcaaaagggcccgcaatgaaggaattactcccgcaatgccgcttaatctaaaccagttacaaatcccacaacaatatcaaatttatgcacggaacgaaaacgaaactgaaaactttttgctagccgattctggtacatttttgttgaatgaaaatggacccccgcaacggtaggcaatgcgttttgttcgattcaccattactttttttgttaggattttgattttcgggcgcatgtctcataatagctgggccaatcaaatgacagaatgttacgctgacggaacattttcattaagcccaccactattttcacaagtttttgcagttcttgcccggtatgctttaattaaatttttgtattaaatgttcagtttttttataggcgcggcaagtgggtcttcccggttttttacgctcttttaacatcaaaaacttccgccatttaccaaagaatgttcagtatgatcaaagcagtttggccggccttttcacctcagtccatgtcgttggattttgaaattggtttgatgaatgctgtacgagaggaattccctaattgcaatttgcgatgttgtttttttcacctcgtcagaaatttcaaaaagaaaatggtcgaacaaaatgttattcaggtcccattcttccccccaaaaaaataaaacatatttttagcggtataatcacgactctaattttgctgaaatggcgcgctgcatcacatcattggcatttgttccgttgggtacactcactcaagcaattgtcgcgctcgaccactacatccccgccgaattagaccccgtttttgattggtccaaacaacgaaaatttaaaacaacaaatttgaaaaaaactacttttaacaacattcaaaaacaacacgactttatatttttctgcaggtttatgaccaactacacgggtagagtgcgcccgaacggaacccggacccaacccctctttgacccaggatgttggaatttgcacgaaagaactgttcacgagcaggacagaacaaacaattttgcagaagcggcacatcgacgattgcagcgcgccttttcgtgtcatcacccatcagtttggcggttcatcgacacaattcgccaagaacagaaaaaaattgacgcagattacgctcttttcgttgccggtcatgatccaccgccaaagtgcaagaaatatcgcgaggcagatgaaagaattttgagactgacacaaaattttaacccactaaacattatggaatttttgattggtgtttctcgaaattaccagatggatgcttagaattttatgaataaatttttgggatgttaaataaatttttgacagtatgaaatggaaaatgtgacaggcccttggggcccaatcggcggggcccaatcgtaccggggcccaatcggcggggcccaatcgacccccaccgaaacttttgatgtggataaaggactttttgagtaataggacttttcgtgttaaaattggggatgatttatcctccagtaaaaaagttggctctggtgtcccccagggctctgtccttggacctttattatttttgatttatattaacgatcttcctgatgctttgccatcaggagtaagaattaaattatatgctgatgatgttaaattgtatatttgttataaagaaagaaccgaaacagaaattatgcataaagcattgcataatttatcggaatgggcaaataaatggcagatcataatctcaattaaaaaaacttttgtactttacttggggaataaaaaccccaaagaaatatataaaattgatggaaatataataaatgttgtggatacaattagggatttaggcataaatattgataataaattgcaattttccaatcatgtcgcacaaataataaagaatgcatatttacgtatgcgttcttaatttcggattattaagtccaagtcttctaggatttggattattttgtacaaaacttatgttagaccgttattggaatatgctcctgaggtttggaatccatcgcttctaaaaaatatttaaaaaattgaaaagtgtcagaaatatttcaccaaaagagtattttttaagtgtaaccttccacccattccataccaacaaagattagaatacctgcaactgtcaacacttgaaagcaggcgaaagctttctgatctgttcatggctcataaaataatttatggccgaacagatatgatcccttttaatattcaaacttctgacgctttacattcccttt

SEQ ID NO: 45897 - DNA, 1449 bp, Heterodera glycines
ttagtccctttgtccaattgttcccgctactccaaacaacttttcgtcgattgtgccaatggcgtcggcgccctttgggtgaacaaatatttcgatgctatcactgacggcactccgttttccgcccccgccaagggattgtctgtggccgcttcgactgactctgtccaattgcatgcactcaacacggacactgagtctcttctgctcaaccacgaggtgccctttaattcgtttaattccttttccattccttcgcatttccttccgtcgtttcagtgcggtgccgactttgtcaaaatcaactccaaaatccccgccaattttgactctgtccccttaaattcgcgctgtgcgtctttggatggggacgcggaccgtctcatttacttttacccttcggcaaccaattccaacggcggtgggggcgtcgttctgctcgacggtgaccatatcgctgctctctttgccactttcattgctcaagtctctgccctttcttttcttttgcctatattcgttaataattttatttttagcaattttctgtcgctgaaaaattgggccacaaaattcccctctcttttggcgttgtgcaaacagcttatgccaacgggaattcgaccagattcttcacagaaaaattggtgattttaaatttaccatggtttaaattccattttgtttaagggcattgaaccggtgattacgaagacgggcgttaagcatttggaggaggcggcgttgaactttgacattggtctctattttgaagcgaatgggcacggcacggtgtgcttcagcgaccgcttttacgcgtatttggaagaaatttcagggttttagccttttttaatgccaattaatctctctttttttgaggaatgaaataattcctcgtcacatccaattgctgtcaatgttctctcaacttgttaatgaggtgagttcttttcttttctcctaaattgcattttttgtgcttttatgttgtcggggatggcatcgctgatatgttagcggtggaatgtcttctccggcactttgactggtccgtccaggattggttggccgagacttacgccgacattccgaatgtccaaaagaaagttgaggttcagtcaccccccccccctactttatggttttaatttggaccacaattaggtgaaagatcggtccatttttgagaccgcagccgaccgcgaaacggtgttaattcgccccgagggaatgcaggcgaaaattgacgcaattatcagtgaattcgacaaagcacgtgccttcatcaggtcattggattcttttttgctattttttgaaatgtttttgacttttttcagaccctcgggaactgagccaattgtacggatttatgccgaagccgaaaccactgaaaaagtgaacgaaattgccgaaagacttgtcgaacttgtccttcccttctga

SEQ ID NO: 45898 - DNA, 647 bp, Heterodera glycines
atggaagactctgagcagaatattaccgaacaatcggtatcggctcccaccactgatcacgacgaatatgaagaactttgcaaattggtcaacccaatctcaaaaccgcttgcaaacagaaaattggcaaagaaagtctacaaattggtgaaaaaagcggcaaaagagaagggctttttgagacatggattggctgatgtgatgaaagccttccgaaagaatgaaaaaggaattatcgtcttggcaggttcttgaccatttacgctctattataaaatattttgaaaggaaacgtttcaccgattgacgtgtacagtcatattcctgccatttgtgaagaaaaggtcaattttctttttttcagtttaccgattaattttcaattctgtcctttcagggtcttccttatgttttcactccgtctcgtgaacaccttggtctttgtgctggttcgtcgtctatatattttttcctttatgttttatattttaaggctataaacgtcctgcaattgtccttttggtgaagcgacacgattcgttcgcggagcttttcgatcaaacgcacgagtcaacttatgcgctggtggtggaaccggaataagcttttaattccaaaattgttgtttgttcgttttgtttcactca

SEQ ID NO: 45899 - DNA, 706 bp, Heterodera glycines
atggaacttcgatggtcgggccgcaagggaaggacagtcgctaccaccaaagtaaaatggtcaaatggggaattcccggaaagtttgaagacttccagaagcaggtttctttattttgttttcatcctaagtttggtctcttctcttaagatcagggagaactgttcgcaatacaaacaaatcgctgaaaaatgggacctcagtgacgagcacccgggcattgcggtcaacccttcgctcgactcgatcattcgccaaaaataccgtccaattggcacggtgttccctctatttcctaaaatattggcttggccgcgtttttgggataaaccaatgaatgagggctgtttcgaaaagggacttgcactggccaaatattcgctgccgatcagtgagttttgttttgactgacgcgcccttaggcttttaatttgcgtctacacctttagcttggattgcttatgcaggagcacttcgtggatatgatccgccaggtcatattcaatcaaagagttgtatgtcttttttgtttcagccaccaatgtcggtcgctttgaagcagtggagtttgtcatccaatcgttccgggggtggctatttagtagtaggatgattctgcccgcgttttattcctttacctttggccttacttcatgcacttcggctacatttcgcgatgaggacgattcgtggaattggatcgcag

SEQ ID NO: 45900 - DNA, 631 bp, Heterodera glycines
atgaaatgcattggggaaaaggccttgggctgtttcatttcacccgaattggccaaagatgcgaacaaaatggccaaggtcgtttcataatttttgttttttaataatttctttcctatttttagattgctgaataccaagacaaggcaatggcagaagctgctgttataacacaggtaatttgtcttcgtgtggtgtggaaaattggaattttccgctttttgttcgattccgggtttggtgtttggaatgaatggcgagcataaatatttacgaaatttactaaactaaattgtaagcatcaagttcaccaaactataaggtgtctagtgttttttaaatatacttttagaaccaagccagtgcccatgccaatgatttgtctggcacttcgtcctccaatcagcagagcgatgagtgcggcacccaacaaaatgcttgtgaaaatgaagttgatccatgggatttgatggagccagtcgacatctcatcgaagctgaacatcaatttcgaaagcccaaaatggcaggaaaggaaagaggcattggacgcactgcaacaattgttgttgcaatctccgcgactttctgattcgccaaattaccgggaggtcatcgaacgcttagcaaag

SEQ ID NO: 45901 - DNA, 1883 bp, Heterodera glycines
atgcaacagcggttggacgtggcgaagcgggacggactgttggacaattttgacggggatggcacaacgacggcgacaacaaattcaagcagtatatccgcagcagcaacgacaccaaaggcgaaacatcattcgcccgacctgcaaattgcctattcgttggcctgctcctacgggcagaactacgactgtgccagggtgagttttttttatttaaaaaaactaaaaactgaaaaaacacaaaataaaaaaaactctaaatcaaataatacaaataaaagtattaaaaaataaaaatgtaaagaaaaaaaatataaaatcttttttttaatttttttaaaatttatttttttatatttttagcttttttcttgcatttgcctacaaaatttttaaaaattcaaaaaatttcggccaaaaaaaatcgaaaaccacgtttttaatgaattttcatccatgcttttgaaaaaacaaaattttcatgtagagctatcgaatgatatcaaaattctgtttacttggattggttgaattttaagaaaaattatgtcggtttttcaatttttaccaaaatgaaaaatccctcaaatcaaacattttttgttaaggccggcacagtccgtctgattgatgagagcggcacaatcaacacggaaggcttctacaactatttgtatggatggcacgaatacgaacaaatggtatggggttgtccttctaaatttactgttttttctcgaattttttatgaaaatttgaaaaattaatcaaaaaatgtaaaaaatttcccttcctttcagttctatgccgtctctcaggccagcttctacccccgtcttcgcaagttgcgccaggggccgcctgggccgatgaaatatgtccgtttttgttgcatttccatttttaaaatttgattttggtttaggtccgtaatagaaaaagtttttccgggggttgggaagggaatccgaggagtttttcttaacccctcaaaaaaaggtacaattttttgttaaattaaacaccgtaaatgtaaaaaaaaaagcatttttagtagttttgttacaaaaaatgaatccttatggcatttaattacgaaaattagcgctcctactttaaaaattaaaaaaaatttccataaaattttttttaatttcccatttgaaaatttttattattagtcctcaattaattcattatttgatattttaaaatcaaatttatttcaaattatatgcatacatttttcaatgtatctctcccattttctcagcgctatttcattccgcccgcgccgaagccgttgttcagccgaattccgttttactgtgacgggttgcgcgacacgccgaccatcatgcgcatgatccgcgagatcagggcaatcagcgaaaattacagccgtgcgggcctgcccaactacccggaaggtgttttttttttggaaatttaggaaagttttcggggaaaatacaaatttattttttcaaggcgtcgctttcaccttttgggagcagtatttgcacttggactactacttggtgttggctattggcgtaagtttttctttctttttggtgaacaattattatacgaaaaataaaatattcaactaaaagttaaaggattttttcatagctttgcttgattatttcttaatttaaaaaaaaaatttttagaaattaaaaaaaattacattttcatcacaaatttaaaaaaagttaattcgctgaacacttaaaaattcctcattaaaatatataaaattgatgaatttatctaacaaattatacaaaaaaaagatttagatcatttccgtgtccgtcttctgcgttatctccaccatcattttcaacccgtgggccgccgctttggttggttaa

SEQ ID NO: 45902 - DNA, 2248 bp, Heterodera glycines
cggtgacggacactgcgcgggcccgtcaattcgctacatttcctgcaatttggagccatgcccagcggatgcgatggatttccgggccgaacagtgcgcggcgcacaatgacgacccagtggccgacaaatattataaggtaataggaggcgcggaatttaaaataattatttttaattatttttttaggtatttaatttacagaaatggggagaaatgtaaaaaatttaaagaattttctgtttttcattttttaaatatttttaaacattttaaatatttcttattaattttagaaatacatctaatttgattttccattaggttaacagatttttaaaattaaatattaaattaatttttcaattttatattaaaattgattaaaactcaaaattattaaaacatttaaatgaaattaaagctctttgttttttagctgactttcaaaataaattggaaaacttatatttcattccaattaatagaactataaaattattatcaataattataattaaaaaataaatcaaattttagtgggtcccacacacaagcaaaaacaaatgcgaattgacctgtcggccggagggcgacagcttttactacaattgggccgagaaagtgattgacggcacaaaatgcgacgcctacggcgaagagatttgcgtggacggcatttgcctgccggtcggatgcgacggcaaattgggctcgggtacggtataaactgcacaaaaatgacttatgtaatgatctgccaaaagtcttttttgatcactgttcagcgaaatcccaaataatgatcataccgattaatacaacaaaattgggttttcatcaattctcgctcggtagttactgatcactgagactcatcacactgatgtatgtttgccgtataccgctttatttttgtactacagaagcaaagcgtgacaaatgcggcgtttgccaaggcgacggctcccagtgcaaaacggtggagggactgttcgacgaacgcgcgctgtcttccggatatcatgacatcatcgcgttgcccgtcggcgccaccgcaattcacatcgaagagttgcgcccgtccagcaatgtgttcggtaaaagttttcggcatcccaaagccaccgaaatgtcaccttttatgccattttttctctatgtgtccgcaaatggcattttgtgccatttttgttctttttttttttactcaaaatgccaaattgacattttttgcataattattttggtacttttgtgccattcgtaggattctctttgttaatttgaaaattttagctcaaaaagaggcaaaaaagaatatttaaaaaagtcgaaaatccattaattttaattaattactaaaggaaacaaatgaaaacaattttaggattagcttttccttgtctttttactaaccagttaaaatttgaactgcttcaatcattttaagaagaattatgggcgattaaaattttaaaaaagtcaaaataatatttcaaaaatttcaaaaatttaaatttttaccattgctaaattataacctaccgtggcattctatgcaatgaaatgcccatttcagccatcaaaaatgccaccggcttcttctacctgaacggcaacttccaaatccaagtgttggacaagaacattttggctggtggtgtcccattcaaatatgagaagggcaacggtggtactgagcggctaacagctaacggtccattacaagtacagttatcaaaacaataccgtctttctaaaatacagtccccgacgggacccatttttcaaccttcctcgaaatgagaggaagctatgtcttgggggagtggcacaaaataccaatttattatacaaattttacagcattggaaaatacagtatgccagtattcatggtatcaaattgaaaaaaatactgtaaatatttcattgaattttagttgtttttttacttactatgcacagtaatctttgaattataaaataaaaaaattcacgcttgataattttttaatttaaggatagtaagccaaatacagtaccgtttggtacagtaatttttcttgcttttttatcaggaatctgtcaccgtttcgctgctgctccaacggaccggcgccaaacaaagtgcggtcaaatatgaatattcggtgccgttggagaaggacgtgaagtatttgtacaagccgggcgaatggtcacaatgttcagtgacatgcgggagaggtaaaaaaatgggatag

SEQ ID NO: 45903 - DNA, 603 bp, Heterodera glycines
ttataaggacattcattgcgtcgatccatttaacgcgtgcatcgctgggaagtgccaatgtgcacccggcacacatagagactcgtcaaaagggcgttgttttgcaggcattccaaaaaattatttaaattaattaatggccacaattttttttcaatttcccaattttaagtgtgtcccgatggcatcgcacctttgcagacatgccgtcgcctgttcatcaacgacgtggatatgttggacaatgctgcgaccacggacagttgcccaattggttaccgatgcgtcacttatggaaggttatcggtttgaaaatcataaaagattatctatttacgtggccggaccccttcgcaaaaaattttacccacccctttttttcatttgtgatttgttttcacctaaataagtttaatcattttatttctgcttcttttttgtcttcaaatttttttcgaagtttaattagttttggattttcattactttgaaaatttaaattttaataattaattcacattttttgtttgcgttcgttcagtccatacattggccactgttgcaaagtgcgctgtccgtacggcgagcctgacctaaggttag

SEQ ID NO: 45904 - DNA, 456 bp, Heterodera glycines
atggccggcattgtggccatctacgggctggtggtggcggtgatcatttccggccggctggaggcggccgggcccggctacaccatcgaccgcgggttcagccagttcgctgcaggcctcgtgtgcggtctgtgcgggttgggcgccggctatgccattggcgtggtgggcgacgcgggcgtgcgcggcctgtcgcagcagccgcgcctgtaaaaagcggtgttgaaagcaaaaaaggtcattgatttacattaatttacatggccggagaccccttcgcaaaattggaaaattggccgctgatcccttgttttgcaataatctgaattctgagctctacatctgaattttagtgttctttatcctgaatttgaaaaaaaaacttggtcaccctcaatatacatatacttctgaacaattctaatgctaaaaaacaggcactcgcgcgaaaactga

SEQ ID NO: 45905 - DNA, 822 bp, Heterodera glycines
acgcttgacgtggacgtgtccaatgtgaaggaactgtaccgccagctgccccatccaacgcccacccagcgagcagcacacgacaacatggtgcagcgctggcaagacatttgggagctgtcgcgcatgtacgtggagcggctgaaggggcttgaatcggtgttgaacgggttggacgaagtgacggacattgtgcgacgccatgagatcacgctggcctcctttgacgacatgccggccgcgctggagcgcctgcgcggcgtgcacgcccagctgctggagctgaatatggtactgcaacagcaggaaaacatcgtcaagaagctgaaccgggacactgcaacgctgcgccaacatgttgcgcgcacgcgtttcggcgctgcaaagtgtgtttgtacagtaaactttgtgaatgctcgtaagggatatcgtacaaattggtggtgtaaaaccgaactgtatagtagagtgatgcgatacagtaccaatttacagtagtgagttaacacacacaatatgcattgcctgcttctggtgatttaattacatataagttagtgttgtacggtagcgaattgtacaataatgagttttataaaggtgatactgtagtagcgatagtgtcacggtagcaaatctttggcattgttcaacccaatcatctaaatgtttagccatccggatgtggaccaaattgaggaccgtgtctcgcagatcactgtccgatgggacaatgtcaactcacaagtggcagaacgactgcgcatcgcggaagaagcccagcaaacgcagatggtctaccgctcccaatacacagaagag

SEQ ID NO: 45906 - DNA, 1868 bp, Heterodera glycines
cgaagcacaaatcatgaagcaatgcaaccatccaaaacttgtccgcctttatgccgtgtgcactaagggagaaccggtaattttgtgatgatttgaatgggcataaatgggctaaaaaacaaattttccagtattatattgtcactgaatatatgcgaaacggcagtttgttggagtatctgcgtgataccaacaacagtttgcgcttgcatgcacttgtcgacatggcagcccaggtcattaattaattattgtgttgcaattgatttgacatgttttttatggcgcttaacaatttaagtggttgtgatggcttgttaaaaaaatattacactggccgggaaaaacagttttgggaccgaagtgtaaaaaaaggggggtttgaactctcccctcgcccacccgaatttttttttttgaaaaatattaaaaaaaattaacaaaactagaatggaaaatgacatggagggcgaaaggtttataatgcacccgatttttttttttgattaatttgactccatctgactagtttttcacttaactgtttgttcatttcttcattcacagattgcgagtggtatgatgtatttggaaagcagaaagctggtccaccgcgatttggccgctcgtaatgttttggtgggcgacaaaatttccggcgtgcccgaggtcaaagtggctgacttcggattggcccgtaaattgatggatgagaacatttacgaagcggcaacgggcgccaaatttccagtcaaatgtcagttttttttaccatgggatttttaacggtttgttgaaaaagtcattggtaccctggatttatggacaaaaaacaagggttgacgaaatgtcctaggccaggcagggcccatgaagaatccgggcctgtaggcctgtaaccagggggtgaaaaatggggcaaaaaaaaaatcagaaaaataaaattaaatttaaaagcaagaaaaatccgggcccggcagtgctcattcattttctttacctgccatttaaaaaaaaaaaatttgttaacaatttagggactgcgccagaggcacagcgttgtggaaattttacggtcaagtcggacgtttggtcatttggaattctgctctatgagattttctcacttggccatacgccatatccaggtagtgcatgcagtgtgcacaaatagctcagaccggggttggtctcgaaaaaattctatttttttcctccggtagtgcctgtcggcatcccggacccaatctccaaaaaaaactgtcaacaaagaaaatttgaaaattggtcctgagacatcccttttacatgatgttgtaaagccgaaattggcattcactttctcatatacattcggaactcaaaaaatagtaaaaaagagaacataaaaataccattttgattttttacagacagttaaacaacaccgccccccccccccccgccgttattgattttaattttggaaaaccaacaattagtaaattcatcataaaaattttgaaaaattaaaattttttgcgaaattttcgatggggggcgataaagcgcgtccccgtctgacaattgattccggaagaatacagttttcaacaatttttgcgcaggagtacaaaatcatgatgttcttcgtgacctggaccaaggcaaacggatggcatgtccgaagaattgtccggatgaaatttaccaagaaatgttgaactgctgggatcaaaacccggacagacggccgacctttgaatatctgttcacctttttcgacgatttcttcatttccagtcaaccaaattatgtgccgcccagcgttgacggcacatcgtttgatgcgcaagcgatcgatggcattgagggggagcaaagtggag

SEQ ID NO: 45907 - DNA, 677 bp, Heterodera glycines
atgagtcacagcgagggaacgattttcgtcaaccggacggtgcaccttcaggacatcaaattgtttggatttgacatggactatacattggcgggtaagaccttttttaattttaaaattccatgtcgaacctctggaacaggcccctgtttttctttctgctaataacttttccattgcttgagaattttttttaaggctaataaagtatgtaagggctttcgaatgataccatgattgtctgatttagttgaaatttaaaaaaggtatagcccaaaaacttggactggcgccgaaagacccactattcgggaatccccctcccccaaaaatcgaaaaattagtttttaatttgaattaggtcttggacaaggaattaattgatcggaatgggtgtgcattcttaatttgaattttatttttcgaggaatggaggggaaaaccgcagtatttccaaaaatggtaaaaattttgtcaatttttcagagtacgtgtcgccaacaatggaagaccaaaccttcgaactttgcctcgactatttgattcaaaaaactgggttcaaattccattttaaattttttttaaatttttcatttttagttaccccaaagaaattgctgcattcaaatacgacccgatgttttccattcgtggcctctggtttgacctcaaattcg

SEQ ID NO: 45908 - DNA, 1931 bp, Heterodera glycines
gtttggttccggtacatcgaatcgttctggcgcgaatattccaaattgggcattccccgtttttcgcttatgcatcactcttatttgtcacacgacgacatcaaccgagtgcagcaagtggacgacgatttggagaaccatctgaggaagatgctcacagtgggcgcttttgagaacgctgtggcaattgtaatggccgaccacggcgcacgcttttctgaccttcgccaaacgcaccaaggtgaaggggggggcagggaatgggaagggcaaacaaaccggaaaaggcattcaaaagatgggacagttgaaaacactttttgtatattttttatggtacgacctaattgcccgcaccttttttactgcatttttaatacatttttttgatcgcttttgtggatatgcaaaaacacaaaaacaaatcttaaatgaaaaaaacagctagttattgaaggtataattttatcacattctcaggacaacttgaggagcgattgccatttttctccctccgttttcctccttcaatcgacggaatttcgcctcaaattgttgaaagaattctgtcaaatctgaaaacgaacgcacaaaagcgactcacttcgccgtttgatgtccatgcgacgctaatggacgcaatgaggtgattaaactaataaaacttatataatatggggttcaatgcgaagtgcgtgtgggagggtttaaaagacgtagtgcgacatttgcggaccgacttttgcggaccgacttttgcggaccgacatttgcgggtcgtaatttctggatttaattttcaaaaacaaatttttttcttaaattggatgatcatttgaatattgaattttatatgtgatttttcggagttaagcaagttaatgcgaatgaaaatatgaaaaatttataaagtttttccaaaaagttcttttttcaattcctcttggtgctaaaaatttgatcacttcatatcatccttaagtagtgatctgattttctcttttttttatatttagtcacaaatgtcggtccgcaaaaggcggtcctccgcaaatgtcggctaaccttaaaagagggaggaaaaactgatatttccccaaaacacataatcagatggccttttccgttggattatttgtccctgcccccttcttctgacgtcgccctttcgtcctccaaggcaaagtctgtgcctcccgccggtcgttcgctttcgttctttcgcgaaattccttctaatcggacgtgtgatcaggtgacaatggacaactgaaatgtttaaaccttctttgttaatatttttgattttgctaaatccgctctattaaaactgaatgtataggccggcattgaaccgcattggtgcacttgcttgggctgggaatcggtgccgaattcgacccacgaaattgccattttggctaagtcggtgataaaagtgatcaacgaatacacccaatcggagaggaagctgtgtgccctgctgtcgttgtctaaattggacagtgccaaaaggtgggcgaattgttttattataacaaatcaatgcttcttttatccaggctcgtgccaaattcggatttgatgaaatactcgggggtgaaggacgcagacggatttgtgccggatttgaaggggaatgtgaagacgacgttcgccacatatcagatcggtttccagacgcagcccgggaatgccaaatacgaggttactcaaaacaaaaaacatgagcaatccgaattggctaaccaatacaatcaaaatcataggccacgctgttcttcgatggacagcgacgcatcaccgtcgacatgacggccatcagtcacgtgaacaaatacggagacacaccgcactgcataatcgacaaaaactacttcttggccacttattgtgtttgctacgacaaaatcgacgacggagagacttaa

SEQ ID NO: 45909 - DNA, 1861 bp, Heterodera glycines
atgctagatgaaacctcagcctccagagcaattggttccaatgaaactgctgtgatgatcaactcggatgaacacgaattggacaccgatcccggcattcagggcagtgacaatggcgcctcctcttccatgcaaaggcagctgtccgccgctatgcaggcggtcgtggaggagccgaccttcaatttgcgtttaattgacgcggtcaggcaaagccattgtctctacgacgcttcggacaagtgaaaaattaaaaaggcagtacatttaaatgaccattttctatttgtgtagacaatacagaagcgcggactacaaaataaaggtttggaatcggcttgtacacgttctcgggttccaaggtgacgcgcggacattgtacaaccggtggaagcaattgagagacaaatacggaaaagaggtcaatgcaacttcaaagtcgatatattgtttaattttttgccaatttgcagaaaaagaaactgaaatacagcggggagcagcactcgcaatggcaatattttaaggtgttcaaaacattttgcaaaaaggtaaagtgtttttttatttagcatctcgaatttctcgatccgcacatggtggacaggacacaacaacgttttgagcgcaacaaagaaggcaaaactgtaacgcattttatcttttctttgcagaacctttgtttttaggaacaacgccaaattgtcattaccgacccaaactttgctcttcacctgatcaaccaagttcggacgcagccttgcttatacgatatcaaggacacgaagtatcgtcacacggagtacaggtctttctcgagtttattattaaaatgataattattggcaatcgcattcccatccattcactggatttgtcccatatgtctttttggtactatggcactttcctttcaaatatctaaaagtgtggctctgatgagattatctatcgccacgccttgcccgtccacaataagcttttttgaaaacagctctgaaaaaactaacattaaacgaagagcagcaaaaaagtgtcgtcatgttttgtgttttgatcttttataaaaatctgttgttgatcccccccccccccctctttttcatataatacaatacgtgtttctttcagaaatcaggcatgggctgagattgcaaaaaacctggcatttcctggtgagcattcgtttgtctctttcagttaattatccgcccctttcttcaggcgatgtgagtgccctttacaaacagtggaagaaaataagggatcgatatgtgcgcgaaaaaaggaaactgcgcatgaccaatggtacggagaatgaggagcccaattgggagttgtaccgggaattggtttggatcgaccgatatttggacgaacgcgcagcgtgcgtttccctgcaagcataaattggaaatcaaacgcttttatataaaggcaggtaaagcggaagcaggagagcagcgacttgtccggagaggaattcatagaggatgcttactccacccaaaatgcttccggccttagtaattcgttgcccggaaattccgccaccccattggactctgcccatccccaccaccacccgcagcaacatcactacgccaatgtgctcatgccaaactctggccaacccattgaagagacggcaattgtcggtcaccaattacagcaactcgtaaagctgcagccccaacagcaaattgtcggcgcgacgctgcaggtaataaaccaacattaagtctttcggagtttccgtttttccgcatttactatcacaaaatattcatttgcagaattccacgaggtcacgggtgtccgatgttggaacaacgctcctcggagcgggcccaattggaat

SEQ ID NO: 45910 - DNA, 1830 bp, Heterodera glycines
ggatcaaattcaacacggaaaaggtccaacacattctgaagaatcccggcgtggtccatgccatcgttgagaaggttggttttttataaaccactaaccatgaaatttgaggctgtattctttcacaattccgcgagttttttcacataaattttcataaaaatcatttaaattgacacaaattgtaaattttccgattattttttattgacaattttattaatcaaaaattttacagtccgctgtcaagggcactgacactgtgctcgaggttggcccaggcaccggcaatttgtccatgaaattgttggaccgtgccggccgtctgattgcctacgaattggaccctaaaatggtggcagagctgcagaaacgtgtggtcggaacgtatgcatagatttttaaatataaattattatttttttttttgcacattcatgctgactgaccattggcttggtaaatcaataggtttttggcctaaaaaggactccgaatttgggggacgggacaaaatttcgctgcaaaatcagcgatttttctcaaaattcatatgaattagtaagtttttcgaaaaattttccaaaaaatcgctaaaaaattttcaaaaaatttttcgttggaatttttatacaagaaaaaaaattttgaaatttgaaaattaaaaaacaaagtttctttggcgaaattatgtcccggcgaaattttggggtgcaccccgaatttgatgagttttttgggcggctacttaaactgaaagactaaattggtgccaattaaaggcgcgaaatttcagtttcgaaaaatctccggatttttgagtttgattttcgagtttaggtgtcgttgatgccaagtgtttatcttgagaaatcaagaaaaatgatttaagattaatatttttgcttttttaaagacccgtccaatacaaattgcgtatcattgctggcgatgtgatcaaagcagccgagtggcctccgtttgatgtgtgcgtctccaatttgccctaccaaatttcatcaccgtttatttttcgactattgctccaacggccattgcccaggtgtgtttaaaatttgaacaattttttttaattcaataattcttaaaaaaatttccacggcacgtatattatattggcacccggatcaagtcatccctcctcctcctcctccgtcgtgttgaaaaaaattgtccatttacattgcacaactttttcgcaaaaacttcgtttcacctttgacaaaaaaatcacataccccccccccccccccgctccatcgtcattcatcatgttgcaggtacgccgtgctgatgctgcagaaggaattcgccgatcgactgttggccaagccgggcagtaaggtatacacaaataaaatattaattaatccgaaatgaaattgtctcaaaaatggatgaaatttctcaaaaaaaaaaaaaaaagattgtaaacaacgcctttcggagcgcaccaattagtagaccctcaattttcaggaatgctcaaataattaaaaaatcacacaattttttaattatcaaaacaaaaaattttgtcccaaacaggtgtattgtcggctgtccgtttctgttcaattattggccaccgttgagcatctgatgcgtgtgaagcgttccgaatttgtgccacctccaaaggtggactcggccgtcattcgcattcagccgcgcaatccgccgccggccatcaattacaaggcaaacgaaaacaaaaaatggatttttttttaaaatttttgtttctaatttaaatctctaatttttagagcctggacgggatcgggatcccgcagggattgtccctag

SEQ ID NO: 45911 - DNA, 1141 bp, Heterodera glycines
atgggtgcctacaaatacatgcaggaattgtggcgcaagaagcagtcggaggtgatgcgctatttgctgcgcatccgctgctggcaatatcgccaaatggaggccatccaccgctgcacgcggcccacgcgtccggagaaggcgcgccgcttgggctacaaggcgaagcaaggtgtgtgcagcgagtgaaatgcgagtgatggaggcggattttgagggggttggcggattttcgagagaaaaaaactcaggttttgccaaacaaattgggtggcggcacggcaatttttatgaaaattgggcgaattttttcaaaaattaaaaggtaatcccagccgtaattggcgcgttcagccctagttaaaacactcggggtctccaagttggttcatagaaaaaaaaatcctacaatcattgtgtcatggtgtcagttttttttttttttttttttgtaaaagtgccaatctgtgtgatgaattgatgctttggaaaaaaggggaaccgcccaatttgtcgcggccaactcaccgtgttgagtttttgtctgttaaaattttactgttttttaggctttctcatttaccgcgtgcgcattcgccgcgggggtcgaaagcgtcaagtgaccaaagggcaaacgtacggaaagccgaaaacgcatggcgtcaaccagctgaagaacacgcgcagtttgcaggccgttgcggaggtttgtttcaattagatgggcctaacaaattgtgcggttttcccaaaaaatggtcaaaacttggtgattttagagcaaagcgcattgaaaaccaatgaaaaaaaaatgcgtcaaattttaatctgccctggcggtaacaagaaaaaaggaaggtatgggagctgccacaatttcacccgccccttgtcatcccaggctaagtagcccggcccatcttttatttcaacccttaaagtttcacaaattttctgactgattttccccccttcccttttcccataggcccgtgccggccgccgtttgggcgaacttcgtgtgctcaattcgtactgggtgggccaggactcgacctacaaattcttcgaagtcattctcgtcgacccatcgcacaaagtgcgttttggtttttgtttgtttgttttgttgcgatccttt

SEQ ID NO: 45912 - DNA, 1444 bp, Heterodera glycines
gtggtcttccgattgacatcactgagacggagttgaagcaggcttttcataagtgcgtttctcgtcggtcggctttcattcattgattcatttgcttttttctctgctttaggttcggttcgttgctagtcgattggcccaaccgatcatccgattcacactttgttaaaaaagaacattgtaagcgctgtcatttggcggactgttacggcgaaacagcaaaattcagtgcatgaaaagggcacaatttctgtatgttttcagatagtggcgctgccagcagagtcaccggctacgcatttctcatctttttggaggaggcgtcggtgcagcgtctgatcgctaagtgctactcggagggcgaccgtttctacatgctgatgtccagtcagactgttcgcgagaagcccgttcaggtgcggccgtggcgcctcgccgacatggactacatgccgcgcccgtcggcccacttggacccgcgccgcaccgtaagagaccaccgattgacaccgctaggaccaaaaccgtcccattccaagattttcatcggcggtgtgccacgaccaaccaaagcgagtaatgagtgattggcacgcaatttgcgataaatacaccagtttaggcgagttggcatttgtgctcgaagccgccttcggtccggtttgctacgcgggcattgacgtcgacccggaaatgaaatatccgaagggtaatttgtcatttagaaacattggtttttcatttcccgcttatagcaaataacgatgtttttctctcaggggctgctcgcgtaactttcagcactttcaaatcgtacgccgctgccatggccggtcgcttcgtccaaattccgcactcggacaataccaaacgcgtaagttggctctcctcaagtgaagaaatttgttttggatcattgtttcgacttttaattcgaaaattgccgggctttgaacttttaagtgatcaaaccatttgttcattggatctattgtctctgtccttcttcaggtggagatcaagccgtacttggtcaacgatcagatgtgcgacaattgccatggcaaactctgtcaggaccgttacgcgccgtacttttgtggcgacgtcgcgtgtcttcagtattactgtgaaatctgctgggaccgcctgtaattaattaattgcgcattccttgcccaaaaagccttaatttcccctctttcagtcattacgggtcgggcaatcgttcgcgcgaaatgcataagccatttgtgcgaatgggcgaacagatcaaagtgagtgcgttcattcagaggaaaacaaataaaaaatgccgttatttttctttttggctggtacaatttttcagtattaatttcccacttttcgtcttaattcccaattgtttaatttgctcccttttttgatttttcagatcaaaattccgcagagggaattctaa

SEQ ID NO: 45913 - DNA, 1046 bp, Heterodera glycines
atgggcaaaggcaccgacggagtggtctttttctccatgggttccattatgcgcagcagtgacatgcccgagagctttcgacggcatattttcgaggctttttcccaacttaaaaactaccatttcattgtcaaagtggagaaagatgacaatgtaaaaatgaagtgaagtgaacagaaaactcgtctttttaagtattcggaaaatttggccaaaaatttggacaatgttttcttcacttcttgggctcctcagttggacattcttggtaagtttttacatgttgtttttttcttggttctcaattttttggctcagtcctgatcatgctaaaatttttaaataaacctaaaacgactatttaattagcctggttttcggcattttgtccgttcatttcccattcgattgttccttcccaggccatccccgtctccgtctgttcatcacccacggcggcttcaacagtctgctggaggcggctaatgcgggtgtgcccgtccttctgatgggctttttcgctgatcagcaccgaaacggacgggtggccgagcgcaatgggtggggaaaggttgtggaaaagcggcaattattggaaggcagcgaaaacttccgtgcagccattcagaaggtgttggaagaccaaaggcaatttacgctatattatcaaataccatatgggattacagtattccctttacagttacgctgccaacgcaaaaagaacccatcgactgttggcaacaaaggttggcattttgtaattcattttctatcgattgagtttgtgccatccgttttaaagcctttcaccgccaaagagcgtctgttgaagaacattcgctttttggagatgaacgggggtcagtttcccgagctgttgagcgagtctcggcacatgggctgggttcagctgcacaacttcgacttggccgttttggccgcactttcggcactcacttttctcttcgttctccgatatttggccaaatttacattagctttagcaatttggaccaaaaatatgcttcagaaaaagtacaaaa

SEQ ID NO: 45914 - DNA, 3302 bp, Heterodera glycines
tctcagtaaatttttcatcccatttgcttggtgatgtcattttgcttaattaattatctcttttcagtgcctccggcgatcagtcgcgaaagtgccgaattgaatccgagacttccgttgggccgttccctcacctttttctgtgacgtcataggaaaaccgccgccgaacattcgttggacaaaggacgagaaatctttgaaggaagatgccaacgttcagctgggcgagggcaaccgatcgctgctgatccaaaacatttctttgtctgatcgcggagtttaccgatgcgaagcgaccaatcacgtgggcaacgacagcgtggagtatcggctggacgtgttccaagcgccgatcattgccaaggggggcacggagcaggcggtggagggcaaagtggccgtgttggactgtgtcgcttcgggcgaacccgcgccactgatcagttgggtaagcaacggctgataaacgatttgatttcttggccaaatgattcgtttgcctcaagcaacgaaacggcgttcttgtcgaagtgggcgttcgatatgttctggagggaagtcgtctgaaagtgatcgacacgcgcagctccgactctggcatttacgtgtgtgaagcgaccaatgaagcgggcaccgaccaacaagcatttaccctggaagtgttaataccgcccaagctgacaagcgaatcggcacgacaaatggccgtcctccggggcggaaatggcactttgagttgcaccgcacgaggctatccgacaccacaagtcatttggagtgccgagagcacaaactcatcggtgagaggagaaaaagcaaatgcgaatccaagcgaatttaaagcattttcatccgattggcacggttttgaaaagaaatgcccaatacgaactctccgaatacggacaaacgctgcacctttttggcctttctcacgaaggcactcgcctcttccgctgctccgccgttaacaacgcgggcattgaccaattggaattcggaattggcattattcgggcgccgaccctttcgagaaaggtggtcgagaaaggaggcgagggacctttaaaatggcaattaattaactaattcaaagggtattttaacaataaatgtcactgagggcggccctttgcttattccatgcggcgtaattggcacgggaaaagaaattggagagcaaatccaatggacttacaacggacgggctttggcgggggagggaccgacgaaaagcattggcaaagtgacgcgggctcagggcggaaattacacgtgcacaatgaaaaacaaagcgggaaatgcttcgtcgacagtgatagtccatgttggaggtgagagggaattaggcgggacaattcggagaagggaaaggcacgtggccaaagtccgtaagaaatggccgaatcagcggaaggaaaaggaaaatgccatcattaaaaaggaagagccaactgagaagttgccaagaaattggaggaaaaggccacatttaaagtcgaacggaaatgggacagacggacactgcaaaatttagtcgcgccgaaaataagggaggacgaagcgcgtgcccgcgggcgtgtcatcgtggagaaaggcgcgacagccgaattgtggtgcgaagcggtgggaattccaccgccaaagatcgttggcttcgagacgatcagccactgaccaaatgttatttttctcccatttttggcctatatttcgttttgatcagttgcacctacggctttcaccgctaacgaaggcattggcggctcagtccaatcggcggacacacggcgatcgacggcagtgtttggggaggtgcagccgcaacacgcgggggtttacacgtgcgaagcggataattgggccggaaaagccaacaaaacagtggatttggtggtgttaagtgagttggaagcaaacatttcatttattcgtgctaaattattctcccggaaaagtccctccgtccattttgcctgaacgcgagcaaatcgaagtcgaaagcggacaaatggtcgttttgcagtgcaacgcgacgggcattcccgaaccgttggtctcgtgggagaaagccgacgacacagcggcggcggacatttccggcgacggacgaagtgccaaaactttgccaaacgaaggggtggccatctgtgatttgttcgttcagagtaccaattgctcggcacatcgctcgcaattcgcgaagtcgagaaaaaggacgaaggcatttaccaatgcatcgcaaagagtgacgcggggcaaaccatcggagttcgccaagtcattgtgaaaagtgcgtgaaaaacacaactatttccgttttaagtgcctttttaacgctctccaacggctctttccaacaatatttttcctttcaattcatttcaattcagtacctcaactgaaaaaagcgaagcgacagcgcattttcgtggaatgcgacgcaaacggaaagcccgtgaaacattcattcgcgcgcgtccggggcgaccgtcccaaagggtcggacgattatggccattggacgggaatgccaaagaatgggacggaagtcaagtgcttaccaaagggggacaaattttggaagaaacggcggtggagaggacgaattagcctcgaaagaggggggaaatggcgggtgactaattaactaattaatggacaaataaattgtattattataaaaagtaataaaggtttacaattataattcggacttcggttcagcatttaaatacactagaaaaatttataagtaccaattaaaaagtagtcgaaccaaaaaggcatctgtcgtaacacaatttacacaactaacagcaaaacagtgcaaattaaagttacaatattaacgtataaaagtaaaattgactattacggtattatattgtatggtattgctaataaaacagagatagagattgactggatgagggaaatgagcaaatcaatcaaatgtttaaagctatggacaaaggaaaaggaaacaaaaacggtaaggggaggaggagaaaagaagcgatcaatggggaagggataaaacaaaacggctcacaatcagcgctttgatacgagtgctgacattcactcgcgcctattaatcggtgtcaaatttagtgaaatctaatgaatcgatagatgctaaattacatgttggcattgatgcaactgtactggtcgtaaatgtttgggcaccaacaaatgataaggcaacggaagtcccttccctctctcggcatttctcacagcgtttaaacccattaaccccccccccctcaatccaatcgatacaaatgaaca

SEQ ID NO: 45915 - DNA, 874 bp, Heterodera glycines
catttgctctccattcttcgtcaagccgtttcagaagcttttcccgatgcgattgctcagggctcttcccaagtgatcggtaaatgtgaaataaccctctatttgatggatttccccaaacttttcaggaatggtcggatacccaaatgtgggcaaaagtatgacaatcaatcgactgctcggcaccaaaaaaacggcggtgtcctcgacgccgggcaaaacgaaacatttccaaacactgatcattgacgagggggtaaataaatatgaacatttatactttggtcatcatttttacaaaagttttgccgagaattaataactattttttccttttcagttggttttatgtgactgtcctggccttgtgatgccgcagtttggcattagcgatgccgacatgattttgaatggtacaatttttgttttgttttttcggacaacaattccgttttaaattcccactttttcaggcattttgccaattgcccacatgcgcgactatttcggacccatccaattgctgtgcgaacgcgtgccccgccaatacttccaacaacgctactccgtcctgttgcccaagagcattgggtctttgaacgggcacgacctgttgaccgcagtggcattcctcaagggcttcatgaatgcctctggcattcccgtacgtcatgcctttggcacttcaaatgcatttctttttcccctcaaggattgttcgcgtgccgctcgtctgatcctcgccgatgtcatcgatggttcactgaaatgggtcgccgcgccttcgaatgtttcacagcgacaatttgatcaatggacttttaagactattgagctttcaaaggcacatcaacaagagcaacaacggcagcag

SEQ ID NO: 45916 - DNA, 358 bp, Heterodera glycines
atgccccgtcatcgtgcaaagcctcgttcttttcatgccggattgaaattccccgtcggtcgtgtccatcgcaagatgaagaagggtatgttggaatacaggacaacaccatattctgattttgtttcattcacaatcgaatcatacattccctttcctgttcacatccacaggtccgtatgccaaacgtctcgcgaacggagtgccggtctacatgactgctgtgctggaacacatcacgggcgagctgctcaagaaaattggcgagatcacgcaggccgaaggcatgaagcgtctcagtgcatttcacatccgaactgcagcgcgcgatgacgacgaggttgaggaaggtcagtga

SEQ ID NO: 45917 - DNA, 692 bp, Heterodera glycines
atgcgcaaggccgtgcttggcccgttcatcaaccgcgcctctctgatcacagcctctgccggccctcaacagtcgtttttccctgtcgacgtgagcccttgggaagcgttgccgacggaagaggaaattgagaaggtgtgccgtcgatgttgggcaaatgcatggaaaataattaatcctttttttgatgtacagcatgagaagacgaaaaagaaaaaggaccagaaaaagatgaagaagaagaaagagacggacgaattggaggaagaggaggacgaagaagaggaggcggaagaggacggacgaatattcccaaatttggacacaattgatcagaaaatactgatgaagcttatgtgatcgatcatcaatcaatcgttgaatcctactaagaatgctttgaaattatgattgattttattttgatggaaaatacaacttaaaaatttaaatgaatgaatcaccaaaaaaaaaaaaaaaaatttttccccttcacctttttaatcagtcagtcacaccattagttaatcgttaatcattggttgaacagaaaagcttttctccccttgtacattttttaattcattcccaattgggtgcgtttattttttgctttttcttgtggggttaaaaatttatttttttaatttaaattttgtttgctacatagtttttttttattaaaaaaacca

SEQ ID NO: 45918 - DNA, 2460 bp, Heterodera glycines
tcggataaaggtaaaaatgaagtcaatttttgtcgaatttagtttttagctcagcgccaacatactttcgttgagacaaattctgtacgatatgtctatcagccgatggacaacatttacatggtaattctattgttttttgttcatttaacagttaattttcaggttttgatcaccacgaaagcatctaatattttggaggacctggagacgcttcgtctgttttcccgagtggtgggttagggttattattactaacatttgaatcagagcgcgggaaagatttgttctcccttgaagggttcgaggcataactttgaatatacacagtatgcgataaaagggtggtcaaataatggtaacgaataaactcgtaaaacccaaaaagctatagccggaaattttcttcactacaaatttcgctcctctgattgtgtgctttttttttggagggattaaatttaaatatttgtttatttgaaaaaacagcaggtggggtcatgtactacatattcatactgatggtcagtcccgtttaatttagatacccgagtattgccgttccaatgatgagtccgaaatcactgacaaggcattcgatttgattttcgcttttgacgaaattgtcgtgcttggttatcgcgaaagtgtcaacttggcacaaatacgaactttcactgagatggactcgcatgaggagcgtgtgttcaatcaaattcaaattgtacagcctttcgaaatttagccaaaatttctcacaaactttttaggctcaacaacgcgcagcccatacactgatgaaagagaaggagaaggagataaagcggcaggaaaaactgaaggaagcatttgaagggcggaattggaggtgaaacgaaagtcaacaattatttaaattattctaaaaaaggtacggctgcatccgccacggggatcagttcgtcacaggcacgaactgaacttacgtcggtcgtcaaagacaccgcgcccatttcttcactgttgggtggaacgggtggaacctctctgtttgggggattgggtcaaaaaaagcaggcggtcccatttgtgggcggaggaaaggcgttgaaattgggcgcgaaatcggcaaacgaggacgcttttctgcagcagttacggcatgagggcgaaaaagtattggataaggttaatgaaatgccaaattgtgttaataagccgaaaaacaattccactttccaggaatcggccaatgtcaccgtgtcaatgtctggttagaatttgattattgtattattgcttgacggctgcataatttattgttttttgattatacaataaatattgcattaactaaagaaagaattccgtttatttgagaatctgatgctgctgtttcgaatattggtgtaaaggctggcgctgtccacttcaaatgcgttgagaaaataaatgccgtgctaagccgaggcgggggattgaattcgtctgactcggcaaaagtgtgatggatttattggatttgcctattccattccttcttcagatatttggctccatttcgctctgtgtttccgatcccaagtttaacagtgttgccatccgagtgttgaataatatcaaacaagtgcctggttgtcgacacggtgacacttctcaggacagcaaagcagttcaaattcaagtaatatatcggtttctgtcctttttcatttttatatgatttcatctattactgtcagcgtttttcataataactccagtaagaattcccaaaattaggttcatccaaatttggacaaatcgtcatggcaatccaaatcactgctccgcctcaagtccgagcaaaaaccgtacccggtcggtgttgacgttggtgtgttgaaatggtccattaaattgcctgacgaagatgcacttccattgacacgttagagttggatgacgaatcgaattaaaaaatgaatctttcagtaaattgttggccaaacgaatcctcggagggagtgacggtgaacatcgaatacacattgcaacgcgaggatttgcagctcaaaaatgtgcgaattgtcatccctctaccgtatgtgctattcattctgatgaatcttttatttttattgtgtttagtccggcaacagctcccgtcatttccgagtgcgaaggagcgtacgaatacctaaagtctaaaggccaacttttgtggtccattccgctggttgaacggggcaacaaaacgggcactttggaattcacaacagccaacggaaatgctgatcactttttccctgtccaagtccatttcagctccaccgacagtttttccaaaataacggtcaatcattgaatatattttttatacttgcaagggtttatagtattttcaacgtcctttaggttgaaagcgttgagacaatgcaaggagatgatgttgagttcactgatgaagtgaatttgtttccagaaaaatatgagattatt

SEQ ID NO: 45919 - DNA, 421 bp, Heterodera glycines
taagcgcttactcgagttgttaagcgtgaagtgatctctattcatgtgggacaagcgggcgtgcaaattggaaatgcttgttgggaattgtactgcttggaacatggcattcagcccgatggaaaaatgccatccgaccaaaacaaccaagacgattcgttcagcaccttcttctcggaaacaggcaatgggcgtcatgttccgcgtgcggttatggtcgacttggagccaacagtgatcggttgccatttgttgtttttcgttggattatccgctgttttagacgagatccgcactgggacttacaagcatctcttccaccctgaacagctcatcactggaaaagaagacgcggccaacaactacgctagaggacattaaggggacggcaaagaaatcatcgaccccgtctggatcggat

SEQ ID NO: 45920 - DNA, 1416 bp, Heterodera glycines
  unsure (1)..(1416): unsure at all n locations
atggagccgtttgagcaatgccaaatctgcgaccgaaaatggcaccgaatttgcgcacttcacagcaacaaaatccacccgggcggcttcgtctgcgagcagtgtcgggtcgagaaaaacagaacgcgacaggagaacaaattcaccgccaaaagtacgttttttggatcactttggcctatcaaatccgatggaatgatcgtttatcattcaaatttgcttccagaattgccgcactacaatctgagcaggcacattgaggatcgtgtgaacaacttcctccgccggaaactcaccgattctgaccccgaggtggaagtgatcattcgcgtgctgtgcagcgcggacaaagaggtggaggtgaagccggcgatgctcaaaaagttagtgaaatctaactaacattgctaaaattgctcgaattcaaatcattattttctcagatacgcctccgagggctacacggaccgctttccctaccgttccaaggcggtgttcgcatttgaggtggtcaaagaccctgatactggtgcctcgcacgaggtgtgcttcttcggcctgtacgtgcaggagtacggcaccaactgtcagcagccgaaccagcggagggtgtacatcgcctaccttgactctgtccacttcttccaaccgcggtcgctgcgtacgtcggtgtactacgaaatactgctcggctatttggacgtaagtttgcgtgcgattttatcccatggggatgctaatgaatttttcggtcttactcttcgaatttgctatgaaatcatgttactttacaataaaattattttagtatgccaagacattgggctacacaatggcccacatttgggcatgtccaccgtccgagggcgacgactacattttccactgccacccgccggagcagaagatcccaaagcccaaacggttgcaggactggtacaaaacgatgctgaacaacggacagatggagggcactgtgtacagctacaaggacatctacaaccaggcgagagatgacgggttggacacgccaatgaagctgccctattttgaaggtacagctacaaatttcgcaaaatttgaaaatgtttaaaaatatggccaaaactggcaatttttccggtgtttttccactcagtggttctattgacaggtgattattggcctcgcatcatcgacgaatgcatcatcggggcggagaaggaggaggagcaggaaaagcggatgaagcagcaccagcagttccaatcggcggaggagnggcggcggtatcggaagggcggcggttccgcggcaaccgcctcactgtccgacgacgacactttccaaacggacgacggctttccggtggtcaaacagaaacaacagccacaacaacagcaaaaggcgagcagcaacaagaagaagacaacctga

SEQ ID NO: 45921 - DNA, 1617 bp, Heterodera glycines
  unsure (1)..(1617): unsure at all n locations
tacaatattattatggttgtgtctaaacttttcggggtcaattatttgtcgcaacagcaactcgccgggttcgaccagtacaagtacagctgcattgacaactcgccaatttccacatacatttcgcatcccttctggaattgggtggtccaagttggtttttgaggtttattcttaataatcgcatcattatgaatgataaattcattcgaattttaattggtttaaaatgcattctttgcttaaagataggccttaatttcaaaaatttaaagattttcaaaaaaaaaaaaactgccgttgcccctccctcctttttggtagaaatttttttagggtgttgtaaaatgtgaaagcatgtttagggggatttttggagcgcctcacggatttgacatttatttttgccttttccgaatcacgaatttttaaaaattgaatttctggcattttttgttcgaattcgggtctgggaatttggaataagccaaaatgaatgtcagattcatgaccagcgaccccgaaaacaaccataaacatgttttcacgacttttaaagcaacttttttcaaaaacgggggggggggggctccgcagtattaccaaaactggttctaccggaaataattaacagacctaagggcctacatgaccgaattttggtgctttagtccaattttgaaaaaaaccaattatttggtcggttcagtgcgcccaaaatttgcaaaatttttcaaaaaattttttttttcagttttacccccgttggttggcccccaatgtgctgacatttgccggtgcactgattgtgatgtgttgctatgggctcgtggtgtgctttgaccccgggctgagcgccaattcggccaccgggccggccgagctgaacatcccgcgctgggtgtggctggtgtgcggggttggcactttcttggcccacttgttggacggcacggacgggaagcaggcacgacgagtgggtgccagtggaccgaccggggaactatgtaagtacgccgtgctgtggtggacggggtcgggacccggtcaggttacaagatcccgaaccccggaatccgggcgggtttttaaatgatgaaacggatcggggtcccgcaaaaatcaggttttaatttcaaaatcctgtccggggcatccagaattgtcaaaattccggtctcaaggcgaatttttttaatttttttttttggttttatttttccctcattgaatttttcaaggcttggtaaattgtggccggttcggcccaggattgaaccccaatttttcattccatgaatttttattaaaattgctgcccttcctgaaacaaaattgggtggttgccagagatttatagaatgccaaagaccggcggngcacttaaaattactttccgggctattgaggccaaaaattgggctcgaaaaagccaaattggtatcagatggggctagggggcccggttttggaaatccacgagatcaaaaatctctgggggtttaaccctcactttcttttacaatatctattttttttaaaatccaattgattttcaccggattttcttaaaatcctggaattttttacaaaattttccaaaataaatttatttaa

SEQ ID NO: 45922 - DNA, 575 bp, Heterodera glycines
atgcctcttcattggacttctgtggacactcgcaacgcacttttgtgcgccgccgttccttccattggcgccttcgtgggctcgacgatggccatcaaagatcaggaattggttcaatttctcaaggtttgctgacaccagagttgagcaattaattccaatcagcttttagaatcaaaactttccttctttcgcccgttgttgcaaatacaattatttgctggccaacactgccgtcaccattccgttcggttacgcttcttatttggtctacaaaattggaggaggtgtcaggttttttgacaattaatggatcaaaggaatgcattgaggattcagttgcaccgactcaaaaatcgcattgggactgtacggtgcgacgctgctcagcggctgttttttggtgccaacgctcaaaaaacatgataccaaggcggtaggcaacctacaagttcatcttcccatctccaagtccaaccctttaagctgactgccaacgctgttgtccttgccggactttccgtcgccacttctgtggctttctacaacatcgacaagatttccgcttattggac

SEQ ID NO: 45923 - DNA, 624 bp, Heterodera glycines
atggatcctgccgaactcaatttgctgcgttacgaatattaccatggactggtgagtgatgagccccgcccgtgttgtgctaaaatttccctcccattttttcagatcgttcaagaggacctccaagagcggcttcagaaggatggtgactttcttcttcggcgaacgcaagacaaggacgaaactcgcacttttactctgtccatcaacacaaatggagaacttttggatgtgcacttttacgaaaacgccgacgggactttcatgcgtgacaatgagaacatcaattcaattgaaggcttcatcgaatatcaccagcgctcagaggattcgctcattagtgtgagaaaacgggaggatcagaaattcattcaattgttccccctttttttacagggacgttgcgttgttctaaagagaggcgtgaagcatgccgactgggagatcaaacacaaccaactcacattgggcgaggagcttggacgtggaaaatatggcgttgttcttggaggacttttggcgcgaacaccaaaacaaaagaagcgcgtggcggttaaacgacttttggaaactgccaacaagcagaaggtgacatttgtgggagacgggcgggtgtttgattaa

SEQ ID NO: 45924 - DNA, 1029 bp, Heterodera glycines
atgtatgctgacgatgttaaattatattatgcccatgaaaacgatgaccattcaaatcagttggataaagcgattgaggctttggaaaaatggtcaaaaataaatgggttagaaatttcaactgaaaaatgttttgttctttatttggggaaaaataacaaaaaagaatattttattaactcaaaaaagatttcagaatcggaaagtgtacgtgacttgggaattataattgactcgaaacttaatttttcagaacatattagcaaaattatacgaaacgcatatcttagaattttccaaattttgagagtgttgaaaagcagggaaataaaaactctaacagcagcctataaaacttttgtacgacctcaattagaatacgctaccgaagtttggaaccctaatttaaaaaaagatatagataaaattgagcgtgttcaaaaatttttcacaagaaaagcacttagaaaatgtggttttgtgtacaaaaaatatggggaaagactaaaaatcacgggtttacacaaattggaagaaagaagaaaaatcaatgatttaacaacagcttttaaaataatcaaagggttcaccagcctcgatgctggaaaaagtttctttttctcagaaaggctcaggaggcctttacttttacgggtaaagcgccacacggccaaaactcaaaataattttttcaatagaatagtaaaaagctggaataatcttccagtggtagcggtgcaaattaataaggcaaaggaattcaggggtttactaaaagcaatgagttctgagtaggaatattcatgtgccatattttacattccatatttaatcacctgtgattttttacatttaatttataatttattttttactctttttattacggtattcattttgtatttttattttgatcaaatttatttgttttgttttctttttggcaccatgtaagagcactaatgtgcctttggtttgctcgataaattaaattaaattaaattaaaattaaattaaattaaaagtaaa

SEQ ID NO: 45925 - DNA, 1168 bp, Heterodera glycines
atgacgaccatttggcaactgtgcgaggacgcgaccaatgtgctgcgggaccaggcgtcacttgtcgagacgaaaccaccgctggtcatgtgcggagacatccatggccaatttgtggacctgaagaggattttcaacaagatgggctacccgccgttcaccaaatacatgttcctgggtgacattgtcgaccgtggcaatcaaagtgtggagacgattgtcctgctgctgctctagatgtcgtgccgtgccgcgggagggagaatttgatcattttgcagggccaatttccctccccccccccaattttaaggtgcgctacccgaccgaattctatatactgcgcggcaaccacgaatgtgccagcatcaacagaatgtgagtgctgtggtgccgtcccatgtgtcacattttaactcaatttcagcaaaaaaaaaatcccccccccattttcagatatgggttctatgacgaaataaacgagcgttatggacaccacaatgtgcggcctctgtgggagcggttcaacatgacattcgcctggcttccgttcgtcggattggtcagcgactgtattctgtgtgagttttttgccgttgatcggctgtctgatcgatcggacgaactctaatccccccacccttttttaaggcatgcatggtggaatcgcgccggaaatgaccaacattcagcaactccgcatgctgcgccgtccgtacatcgacccgccagttccgtccctggagctcgacctgctgtgggctgatccatcaaccgttgtggaaggcacggcacccaacccgcgtggagtgagcatcctgttcgatgccgatgtcgtcgccaatgtttgcaaaaagctcaacatcgaattggtcgtccgcgctcatcaggtggggctggagaatcggcactgcacatggacgactgtttatcgaagcgattttttttgttgcgcgtaacgcgttgtcaatttttcgatccgcgttttgcctatttttagagggaatagtgggatttgtgtgatccggaaaatttgtctaaggaatttcattcgccccactttttcagtgtgtgccattcggtgtctcattcttcgccaactcctacatgctgacgctgttctctgcgccaatgtatcagactgaaaagaacgtcggagcggtgctgg

SEQ ID NO: 45926 - DNA, 1389 bp, Heterodera glycines
atgaatatcccaaaacaacaacatggagcaatgccaattatctacaaagaccaactgtgtgaaaaattattaaacttttttaatgcattttctatgtccctctccccattttcaaggagtttggctatcttactcaaaccacacagtcggaggcgctcatcggactcttcaaaggcatattagcccaccaatagataattgatcaatttgacgctttaggacaaaccgagtgcaaaaagaacaaacacggcgaggcgcgcaaaacggagtgagttggccggtggaaatttttttaaattgttttttttggtttaatcgggataatagagaatagaaatgttgtttcggacttttttttgttgttgcaaaaatgctgttttttaatgtttttcgttcaattttttgattgtctgtaataatataaaggaggccgggttcaagtgtttgccagaaatttgatttttttttcctcacgtagaaacaagaaaatatgtgaattttgtagtaaaaaattttttttttggactttttcaggcgtttgggcgtcatcggtgccggtctgatgggcgctggcatcgcaaatgtcagcattgacaagggcattcatacggtgagactgacacacacaaatgggtgggggggggatgggataaatttaatacaagaagaaacataactaaataaattcggtggcaaattttaagtgcgcaaaaaaaatcgcttaatttcgaacgaattaaaaaaacataaaaatttttttttgccgtttccatttcagactcttgtcgacacgaagcaggaggcgttggaccgcgggctgaagcaaatcaccgcccaaatggaggggcagctgaagcgcaggaagatcaacgctgcagagcacgccatctgtctgtcaaagctgaagccggtgagttggagaaacaattgcattccaagaaaatatataatttatattagggcccgaatttttagggacgaaaaattccaatttaaaaatgtcgccaaaaaaggtaaccgctggagaaaaatctttgtagcaatttttagccttctcacttaataggactaattttttgccatttgagtcaaattccaaaaatatgacaaaatgggggttctggcagcacggaaaattttgaaaactttaatgcacttaataaagtgagtcaaattttaaaaaatgttagccttttttttaatttttatttcggcggagtggaaattccctgctctaatgtaatttaaaccaccataaaaaatacaagaccataaaaaatttaacagaactaattctttgaaattttgcagactaacagaggattcttgggacaatcgaatcatattaagatattttgtattaaaatttgggttcaactacaattttaa

SEQ ID NO: 45927 - DNA, 1610 bp, Heterodera glycines
atgcgtctgatcggccagttcaacaacgcgtttctcattgtccgtcttcgatcggacgtgttcatcattgatcaacatgcggcggatgagaaatacaattttgagcgtttgttggcacacaatgtgatcaaatcgcaaacactgatccgcccgaaacgcctacgccttggcaatgtcaacgcggcactgatgcgcgacaatttgcacgtgttccatgccaacggattcgattttcaattttacaacggagcgacaagcgaaaatgccaaatggtgctgggaaaacggagcggcggcggccggcaacaaagacgatgccattgtcattgaagacactgagaacaatgatggtgtgcgattattgatggcttttgcgtcatagaaaattggggcgttaaaagatacgaaaatgggagcagttcgttccccctccggccggttcctacccctcttccccctggatcagcccccccccctcccccgaaaaatgtattaaaatttttaatgattttttcaaaagtttgagtttttttttataagaattttaatataaaattttttggaagtttctaagatattcgggcggatagcgcacaccaaggcaaaatataatgacaaaaaatgcggctctaatatactgccaactttttctgtattgtcttacaattagtgccattttgtgatgtccgctcatacacaaaaatgcttgaacgattcatatataaatgttcgaaatcaacactaatcattttttcagttgaacccatccttcttaatgacgatgattatgatgacaatgacgaacaggagaggggtgaggacgagttggacaaacttggcactgttttgttgactgccgtgccggtgctccatggctggcagttggaccgtgatggtcagtcagagatcagaagcaatgattttttggaatttggaatgccgattttggacatttttgcagacattgaccaattgttgtcaatgctctctgaactgcccggcattgtgcaccgtccaagcaaagtgcgcaaaatttttgcttccaaggcatgtcggcactcggttatgtttggaaaggcattgacacaacgtgaaatggaaacggtggggagacagactcattttttgatcatttaaaaaagccgcttaatttttcagataattttcaacatgggctccatggaccagccatgggtaaaacaattgaaattgaaataataatttaaaataattgcatttctaaattttcccaaagaattgtccgcacggcaggcccaccatccgccatttttgtacggttgagagaattatgagttgaatgatttttctcgagtaatctttgcttttattctcgattacatgttttaattgttaccatattctttttttttgtttatacttttcaacttaaaattttgacaattgtacaatttggtgcatttgcataataattttgcaacattttctcctttttttaatgtgtgggcttcgtttatttatgcttatccttcaaaaatatagatatatataatgtttaatgttttcgtactcaattgtttaaaaatacgaattaaaaaacaaaacaaaaattttattcactttttaactaaa

SEQ ID NO: 45928 - DNA, 1057 bp, Heterodera glycines
agccctctaaaattcacgaaggtgtttttgctattgttcgtaaagttggtggtgaacatattcgtttgtgccgtttgataagtgggcaacgcgtgctaattgaacgactgagttttaatccgaaagacgcaattggacatttttatgggattttcgaagtatttttcatataacaataattgtttgaatatcagtctgacaacacacttctgcttaaggtcagcaatggtggtgacatgctttgccccattgaattcgcctcaaagccatttaaaaccgaattttcaaatgggaattcagcaggagataggggccacggaaatggtaatggaaattaaaaaaaaacgccgatctaacatgcattcttggaatttttaataatattcagaaagcactcaacaacttacaagcaatcaaattatgagcttaaaagaggatggaatcactacaaacgaattagtacatctttttttttaactttcctcttcattaatattcagcaaaattcaattttaaggtttccaaattggtcagcggaaattgccatttccaatctcgtacaaaattttcaaaagaaaaatatatgcgaaagaaagttcaaaagcattcggtttgcgactgttcttttctttccaaagcttttttgtttttttaggaccgggttgttattttgcagcccaatattcgccttttggccgactgttactaccgaaaggaccccgaacgactcggacatttgaggttaaaatttactgaattatactggtaatcaaattaacaatgagccgttagaattgaccagctcggactgatgcttcagctttccgggcttcactccggcaaatgcaatgcttttgtcttcgaccaagttggtcaccttatttttgggcatttgattcccatttgatgactttcttcctttcggttctcggattgcttggcgctgctgtgttggaacggataaacccttttggccactgcatttttcttcaccgcggcgattggccccaatccattccatgccttgactcattcactactgacgctcaggtcaaaa

SEQ ID NO: 45929 - DNA, 899 bp, Heterodera glycines
atgatcagactaagtcaattggttgttccgtatttggagaagacgaaaggaagcattgtgaacggttgtttcttttgcattaattgcaattgcctaattatttggtttagtgagtagcatcgctggcatttgcgcggttcgttagccattcctttcaatttgccgttttatatttaaattctattgccaattcattttttaatttgctccggtagtttttcggggttgttgaccacgaatctaacatcaattttgactaattctttatccaaatttttttttgttaaaatgtcagggatttatgtcattttcgtgattagcaacctgaaaacctccagaagcaagtttcacgattagaccattttcctacaaaaaaatttggaaaccgaaagtgtccccccttttgctttttaatttattcaaaattggtcatttatttgtaaaaattagcgtttatttttcctcgttcagtttcctgctgtgacttactattgcatttcaaaagctgccgttgacaaatttacggaatgcctttccatggaattggcaccgaaaggcatccgagtcaatgccgtcaagtgggcgagggacccaacgggtcaatgaccagtgtttgtcttatttaagccctgcactaatcgtcaccgaattgcatttgcgttcgggaatgcccgaggagcagtacagtgatgtgagtcttgctcaaaatgcccttcaattattcttttttcttcgactttcagtttgttcgtcgcggtgcccaaactcacgcactcggccgagtcggaacgccggaggaggtggccagcagcattctgttcttggcacgggatgccaccttcaccacgggacagctgctgaaaatcgatggcggaaaagcgctgatgacaccgcgttga

SEQ ID NO: 45930 - DNA, 1594 bp, Heterodera glycines
cgctccatttaagggtgccatttatgcggcggagaagttcagcacgtgctcccaagtggtcgagaatgcaaagcaaatttccatcacattcccgccgccaaatgtgtcgccggcatgtggcactacaattaaggtccaaaagcaaggaaattagtttattgctcttctcctgatcagtttctcttcaaagcattactttgaatttgatcagactgaataagccatacaatcaatcagtttctgatttaaatagcctcagctttttgcaagaagagcctatttagtagcaacaatgagctttttcctttttctggcaatgcgctctggagacttgtggcttgttgataaatttgaatttaaataccaataaatcatttggtcactgattgggggagggtattattgaccaaataaatcataaccagatcataaaattatacatttgtcctataattgcggacaaaagccaatcagacccattgtctttttttgatcaaataaatataccaataggaaatgggtgcttgatcaaaatcagatataaatttgtccaatcattgccggtaaaagctgatcagacctcctctgtttttttatcaaaacgaattgctttatcaaaaatctttctgtccacaggacggcaaattggaggcgttggtggtcgtctcgttggacggagtgttgccgcaccaggtcaccacggagtgggaccgcttctaccgcgtgtcatgcgacgtgaacatggacattgaccgcttggtgcggaccagcaacagcgctggcggtgccgtagtcagtgccggaggcggcggcggtggtgccggaggtggcgatgccgccggccaagaacccggctttgagggcacagtgatcgtaaccaccatattcgagacaaagtttgtctgtcagtcgggaaacgatagtgcgtttagaatattttgaattgggccacggggaaccagcccagttattatgaattaactaatttaatacttaattaattaacataacaatttttaaccccactcattaattagttgactaattaataagcactggcttcattggcaaatttcatcccaaaatcattcgttaataattaatttaattaatttgtataatccagcttgctgaaaaatggcctgaactaattaactcatacgacaattttcacacccaccaacttattaattagtttaattaattaattgagcgctacattggcaaatttccattcaatgtccaattccaacccaaactcattaattaattcttgtgtttatttttatttttttgtatccgactactaattaattaacaatcctattaattgtttgtccacccatcaaagggaggccgagccccaagtgctgagcgccggcacaccgccgccgatcactgcgcaactgtcgttcctcgacaaggacaaccaaccgctggagaaggcatccatcggtgatcagctgcacttggtggtgaacagcgagcaggccgggccccacaatatgatggtcaccgaatgtgtggccactcgggtgggcggcgaaggcgagccagtgccattcaccatcatcgacaacgggtgaggaggagc

SEQ ID NO: 45931 - DNA, 5721 bp, Heterodera glycines
ggtggtttggttaagttccaccgtttcccacgcaccgtctcttcgacgaaggcgaaccgaaaatcggggggagggaaatcgcataatttcatttggcgaattgcccaaaaaccccccaactgccatattctcgttttgtacacattgtggaccgaccatggagacgaggtcggtggcaatgaaacctggttgggacccggggtcaaaaaagacgggggccgaagccggagttggaccattattgttaaaaatctcaatttccttaatcattaaatatgcggtcgggcggttttgcccctcaacaccgaactccgtgacgggtggaaaatggccactttcagcgaccgccgaaataatttgacgcgattccggctgattcccttgagggggagtcacgtgaggggttcccctgccattatgcccttcgttagggattcgcggacccaaaggaattgaattgctaccccttgccgggggccggtccgggccgggacagaccaaaacatggtgccttcccccgcatcggaaacaattggctgcccctgggcagaatttctgattgtgcccctcccgggcgcagagagaacaccgtccttgctcggacagtctcgccctcctctgctccacagtacgataaaccacacagtttgatggtttatggccatctctcaggcacaaagagcactcgggcttgttaaccctttttgggccttcagacactacggggaaggcgcgccgaattggctcaggcgggcgcgggggaggtttatggatttgttggggtgccggactatgcgggatgtcccagggagcatgtacggcttccttaagccgtacgacttttgcaagcctctccctccactgttttgaggaccatggcgccccctcctccatttctttgtcgtaaagttgggccttgatttctgtggggagtttttccttaattgctacggtaagaaaaggattatcgtccaaattagtccccaaactttctaactgccgacaaattcggtcgacattttcggaaaaggcccttagtgaggcggaattacccgtgggcttgaccaaatgaaacagctcgctccggagccggtcggcccgcttgacctcatcgccgtaacgacccttcaaaaggtctacgacgatgggataattatggtcagtgagagaaaacccatccaccaaagtccgggcactgcccctgaggcgacccaccaaataagtcagtttttgggacccggtcaacgaagtattgtcatgtatggtgtgggaaaaggctgcccaaaatgagggccaattcccgtcattcccatcgaaatcgggaagttgaagagagggcaaattaataaggggccgaatcgggggaggggaggctggagcagcaggatggggcgctctcgaagacaaagcgcgtatcccgtcaattttcacatccaatttggtctgcatttcacacccatttgcaatgatgtcgcctgggcatgcccctcccaccagaaattgggaaaaaagcttattttccccgtctcttatttccttttccggggagcccaagatgacggaccattccctcaaaaggccctgggccaggagaattaggcgagacagcttttcagctgtgatgctgatggcctctaaagatgaagaatcgtttggtaaggcctcgaggttaactccccgatttgtttcagaggaaatagccgacagtaaagggaaaagctgttgtcggataatggcggacatttccgcaaagtgtaagcaaaaaaaaaggggggggggggggtaaagccaaaagaaaggacgaaaaaaggactatgcccggttagaactcagtctggtgagagcaccagactcttaatcccactgtgttggacaagggggtaaatgccttgccaaccaggaaaaggagaaaatgggccgggggttccgatttgggtcccgacaagccaacaaattgtaaagccaagttcaaaatgggactgagtccctgtaagccaatggagcaaaagggtgaaaaatgggtaaagcaaacggggggggggcgagaagcaatgggaacgagggggaaatggtaaagccaacgaaagcgaaaaagcctagaggcaagacttaaccacaaaaaaagggtttattaacgaaaaaacgaatggaaaagcaatgaaaaataagtggtttttgggttttgtaaagcagaggaaaaggtcgtcgaagcacaaaaaagtgataggtaggagacggaaatgaagaagaaaaagcaagtcccaagtcttggctcatcatttcttttatactcgctcgggagggcagggcatcgttgggtgggcggatcgtcgggagggcagggcgtcgttttgggcggattgtcgagggggcagggcgtcgtttggtgggcaaattgtttaggcgagaacagtgccggaggggatgatcagccaatggggagactaacagcagaaaggcacgccatcgcacagaattggccccgatagcatcagcgcgagcgtccaaattcctcagcgccccaaattcaccacttcactttaggggattaacaaaagggggggggggggttgggggccgtaggccctgattacagattagtggtttatttggaactcaacaaattggcccattggcaaaagttactaatccccgacccaaaaagttattaatgtgaaaagttatttttattgttttgcaaattatttgtttttagtttgttttattttgttttttaaataatcaaaaaatatggcgtagacactattcatcactaggaatcactattttggagcttcgccactaaaaaaaactatttcggaagttagccactaaaataattttttgccactattttggcgtttcgtcattatttttgccactattttggcattttttgtaaaatttcccaaaaaatgcaataaaaacgaaaaatacaccccaagaatcgacctaaaaaattttcaaaaatacacccctaagaatcgacctaaaaattttcaaaaatacatccctaagaattggaaaaatttcacaaaaattcttcccccaaatttttttttcttgttcaatattttctaagaaaatattttgtaactgcaatcagtgaataaaatctttttccttaattttaaattattttcaaattaaaaaacagctatttaaaaaattacacccctaaatttggaactttttcgccactatttttgccactattttggaatttttttctcactatttagttaattattttgggattttttatcactaaaaatccgatccctattcatgtgtgtgcaaaatttaatttgaaattttattcattttcgcttcatccataataaaaggctgcgaatattccctactcaaaacaaactcttttgaggaaaacgataggaaacagaaacattattaaattggctaaaaccttaaatccaatgcaataaacaaaatcgaattatcaaaacgctttaatacacatagaaaacaacaaaacaaagcaaacggctaaatacaacaatatttttttttcacgctacgggcgcgcgttacgagagaggtcaacagcgctacgagagcgcacaattgggatatactgttgcatgtcaaaaaaaaggtgcaattggtcgtacaacaacttcaaatcaatgtagagctcaaagacgttgagtcggatgttgtcgatgtggatctgcagcccaacttgactcgtcaaactgaaaaattttaaaaatttataatcaaatttatcgggtggtttttttttaacttggtgtccttttcaaacttgtccaaaagtccaagcagcagcggcaactggcggctaatcccagtgagcattcccttaacaaaaacaatttgttgctgctaaatgcacacactgatttaatgcagccccaacctgaaagcgaaagacgtccgcttgcgaccttgcgtcgtcaacgttctgcaataacgttctgagggccagcaattgtccatccaacgacaattgaggcccacttgtgccaccttaacatgttaaagcatttttaaaaaatgaaagaagtgacttcagacattgcgacttacttaaaccagccaaaagtgccgagcaatgagttgaaaagacggcgcgtgtatcgacacgtgaaacgtccagagcaacgagctgcacatggaagtgattcagccacacgtatgcgacatggatgcgatgaataggcgtaaggtccatttttgaagtcaaataaaaacaaaattgaaagagctataattaaaatgtaataaatttttaataaagtatattaaataaatgaaaagcactttaaattgtaaatgcatttaaatttgtaggatcacacgcagattttgagaattgcgaaaaaaatagatatttaaatttgcttttcatatcatttttgtggcacgctttttcagaacagggtggtccggcagtgtttagcatttttatataccgtatatactctttttatatgccagtctccattaatctgccaggggggaaaatataattttttaataatttatttggcacattttccaaaaaaaaattaaactcaattcaacagtaagaggggctaataaatgaacaattcgtcgtcatctccgactccatccagccctgcatcatcatcagagtagggtcggttagccgacttttgcgccgcggacatttgcgccgcactatttgcgccgcgacacttgcgccgctcagcaaaacgacatcaattaataacagttgtggaagattggtatgatgcaattattaatggaaaaaatgcggactgtatttatattgattttcgagaaagcttttgactcagtgccccataacttacttttatacaaattggaaaaaattggtatacggggcaaacttttaatgtggataaaaagctttttgagtaataggacttttcgtgttaaaattggggatgctttatcctcaaataaaaaagttggctctggtgtcccccagggctctgtcctgggccctttactatttttgatttatattaacgatcttcctgatgctttgccatcaggagtgaaaataaaattatatgctgatgatgttaaattgtatatatgctataaagcaagagcagatacagaaattatgcataaagcattgcataatttatcagaatgggcaaataaatggcaaataaaagtttcagttcaaaaaacttttgtattatatttgggttcaaaaaacccaaaagaaacatataaatttgatggaaatacaataaatgctgtggatacaattagggatttaggagtaaacattgataataaattacaattttccgatcatgtaaacaaaataacaaggaatgcgtatttacgtatgcgttccttgtttcgaataattaaatccaaatcatctaagatttggattacgttatataaaacttatattaggcctttattggaatacgctccggaggtttggaatccgtctcttcaaaaaaatattaaaaaaatagaaaagtgtcaaaaatatttcaccaaacgggtattttttaaatgcagccttccgccaattccataccaaaatcgattaaaatacctgcaactgccgacacttgagaataggcgaaagctatttgatctgttcatggcgcataaaattgtttatggccgaacagatctgaaactattttcaatttttaatccatcgacacgctttaacatccccttttacagatttaa

SEQ ID NO: 45932 - DNA, 283 bp, Heterodera glycines
gctggtccgatgttcgcttcctcaccgctgcgcttcagcgggctttcgacgagggaggcgatttgggtgcaattttcacatatttaaattaatttaaatttttgttttgttttaaggttcgttgacatatttgcgcgactttgacagtgcgagccaaaggcgaaatgggccgattatattcgcaattgactgtctaaaccgactttactcgaccgaccaccccttttgcacgttgttccgttccgttgggctcaacattttggaccggattcttccggccaag

SEQ ID NO: 45933 - DNA, 1906 bp, Heterodera glycines
atggcggacgatgcgccatctacgaacgttcagcaacaatcgaatccttcctcgactctttcaccacaatcgattatttcaaatgttccttcgtctattatggtccaagacgtgatcattgtgccgtcctcgagccaacacaaacaacagaatgccacctgtccccttccttgcttcatgaagtcctcttgccagtcctgcattgactcacagtgcatgtatagtggcgcaaatcccgcgcaagcttaattttaggaaattatttaggtggtgtccgagcaatcaaagatgtgtgtcgatggacacatacatggtcagttttccatacggtcaatgccaaagttgggtgacggcagcgaacacacacaaagcatgtcaaacgagtgagtaacatttgttgggattgttttttaaaggagaatttgtcacatttgagaccctttcgcgtgcgaattacaaaaaacttgttccgactgtcagtccattggcccccgttgtggctggtgcgatgacgggttttgccgcgttttatttccccttttgtatttgtccattttattagatctggtacagggttgggcaaatgcgtagaagggaccaattcgggcgcattggatccgagccaatgcccagctgagcgttggtacttcacaggcgaacccggtcaagttttattggtaattgtgtttagaaagggagataaacgtgatttatcatcagaatgccaatgcaacgggcacagcaattgcacggaaaatgtcacttatcggcgattgcgatgtacgaaatgtcagcatagaacgaggggtgaacattgtgaactttgtgagctcggcttcttcggcgacccacggaatggtgggacctgtcaaggtacaattcgtacgcattccaatcgtttttaggtgtcattttttagaatgccaatgcaacggccaagcggcactttgcaacccagtaacattaataaaaaacaattagatttataaatgaccatatttggtgttcttttgtcagctaaacggcgactgtttttgttcgacaaaaggagtaattgggccgcggtgtgacaaatgcgagcctaaatatttcggagacccgaaaaacggcggcacctgcacatgtataaacaaatcttggcttctatttctgcgaattacatcgttatgatttagatgaacttgccattgacttcatcttcacttttaagctggacagcaatgacattcgggacaaatacgttaatcagatcaactttttcagcgtgccttacaaagtatgccttgcctttttcttgcagaatataaaaccggggtcctccgattaattttgtcggaatttacttcggtaatgcatttgcgaacttcaattattccttctgctaaactcaagaaagcatataatttattaatttactgtatagcgtgacacggacgttcaattctcgatcacatgcgaaggcgacaccggcgcaaaagtgaccattaacctgaccactcagttgctcgaaggccgtccgcctcacacaaagcatttgatggccggtcagttgtgcacggcttcagggataaagcgcacttacagctcaacagatcccggtaattgtcccatcaattgggtggaaggcgattaatgtggtggaaaatgcttaaggatttgcattcggaacagaaacaaatacgacttttcacgttcgggttaatgatttcgagacaccaattaaggtataaacaaaccgggaatttttttatccaattctttttcagatccaaatttcatttgcacaatcattgccaatcaattggattttgttttttgttatttttgcagcgtaagctttacttgacatttagaaattacattattttcagctgtttcattgttcttctcgttgttgcgggattga

SEQ ID NO: 45934 - DNA, 714 bp, Heterodera glycines
aattcgttggatatcaaatgcttacacaatagcgcagtttccgaattgatgcgctcaatccgtgcaaatgtcagcagtttcttgggcgaagaaacagcacatgaaatgaatgcgatgcgattgggtgtcgcccattccatcggccgttacaaagtgaaatttaaccccgagaaaattgacacgatgatcgtccaggtgaagagaggcggcgcactttgtggttttataatttcttttttaaggctgtttctcttttggatgatttggacaaagaattgaacaattatgtgatgcgttgtcgtgaatggtatgggtggcattttccggagctgggaaagctaattgcggatgctcaagcgtatgcgaaggtaatggggaattaatacattgtttaaaattaagttcattaaacattgtttcttcagtgcgtgaaagcaattggaatgaaagcgaatgcgcaaaacgccgatttaagcgccattttgcccgaagaattggccgaaaaagtgcgacaggaggccgaaatcagcatgggaacggacatttccgagctggatttgatacacattgtcgagctgtgtgaccagatcgtagaattggcacaatatcgcgcacaattacacgattatttgaagaaccgaatgaatgcacttgcgccaaatctcacagttttgcttggagaattgatcggtgcgcgtcttgtttccaaagcag

SEQ ID NO: 45935 - DNA, 699 bp, Heterodera glycines
aaaatcatctcgcgcagtgccagggctggcctccaattcccggtgggacgcatccatcgcttcttgaagaagcgcacaacaagcaccggacgagtcggtatgttttggcgaattttcggggataaaatttgaaaaaaaaaattttttcaaaatttcccaggcgccaccgccgccgtgtacagcgcagcaattctggagtatctgacggccgaggtgttggagctggccggcaacgcgtccaaggacctcaaagtgaagcgggtgacaccgcgtcacttgcacttggcaattcgtggagatgaggaggtgagggggcggtgaaacaacaaaactttgctaactttaggattcccttgaatcctttttttggtctttcgaatttaaataattttgataatttccctgtgtcttctgaaggcatcatccgttatccgtcttaattttgctttttccgttcagttggattcgttggtcagtgcgacaattgcgggcggcggagtcattccgcacattcaccgttcgttgatgggaaaggtcggcgcaatgggcaaatagaacaattccacccccgtacggttgttttccttcagcctccgagtcaactcaatcacagtcagcagcagaatcattcgcagcagcagatgaccaacgttggcaatggcgacaactgattttggccaaatgaatatcgttctttca

SEQ ID NO: 45936 - DNA, 1283 bp, Heterodera glycines
gctggttcggctttggactccaaagaggaaaagtcgtcggacattttgtggaaaatggaagaaaagttgcgcattaaagcggacgatgaggactcgcgtttgccgaccagcacaaaatgggacaaatacttcacgaaaacgttccaatttcagcgctgccaaataaggtgacccaaggaaaaatgaactggatgtgccaaagtttcccttctgtttcccagcaagtccaccttcaatttggttgtcgttctgcacgatgtgttgcgcgcggctgcggagacggactcggagatggaggcgagtcggctggtcaccacagcgcggaacattgtcgaaatgtttgccaccactgcgcccgaataccaccgactcactctttcgtccgtcccgcacatggccggtgggtgtttcagctgttttccatgggaatgtcctttttctttcattaatttgtgcctttaatttcagctgttttcttcaacaattgtcatttcattgtgcaccgattgagcacactttccgccgacattttgcagaacattttgacagtttcgaaggtttttttcaccgttaattttgtaaaatttgacagaaatgactcattcattgctgcctatcaattatttttcgtaaatttatcattcagatcactgggcaggactgcgcgttcaccgatttgttcaccgaactgcgaattttggctgccacgactttggagcagcacattacgcaagcgcgacgccaactttcagccacaattggcgaacacgacagtgagtgggaggagggaggggaaggaagaggcacttcattcctaaaaaagccaagataagccagaccaaatgcttcccagatgtggcacccaaagccctgacaaaatgattgcaactttggaaacccgaatgaaacagaaaatacttttcaaatgtcatggtcggaattttagtttttgtcggtttgcgtgacgacagaacgaacaaacactgtgtaaagctgctcaatggctgtgtgatgcaactcgagcagactgcttcagtttggcgagaggtgtgggaaaagagtgaatttcttaataaaatgccaataaacgcatcaattttgccgcattttcccaggtgctgtccgatttcgtgctgacgcattgtgtcggcgagttggtttcgtatttgttgtccgcaatggcgaacataatcctggccaaggaggacatcgcctccagcgacgcggagatttcggccaatctgctgaccacgactgtcgaccgctgcaagaaattgatggag

SEQ ID NO: 45937 - DNA, 1413 bp, Heterodera glycines
  unsure (1)..(1413): unsure at all n locations
atgtctgacaagtttaataacaaaaaaaaacagcacttttctagtttactcacaaaaatccaaaaaagaaaaagaaaaaattatttttagagcaaattagggactataatcaaaaaattttgtacaacctgaatctgaacccgatactcgaatataaaaccgaagaatttttattttatattagagcggctcaaaaatgcaaactaaattaatgatttctttttgattttaagcaaaaaataattaaaatattgtaataatgatttaaaaacgtggtacttttccgtttggaaccgcacattcaattttttttttgtccaaattgctgctttcctctcaaaaagtgaagcgctgttctttaatattcagtgcgcaattgaatttatttaattcagttagaagttaggaattacatttttactctaaaaatatttttttttaattttagcaattattttgtgatataaagcagaaaagtaccaaagaagcgaacttctcagaattctcccaattctgctcaattttaattgtatcgatcagactgagaaagtcgcgaatgccattttttaaaaacataatcgcttccttaacaaatttaaagggattaattaatattggtcggttggtcccatcggttacctcacagcccaaaatattttgctgaattcggcagatttcgtacattgaatcgactgatgcttttagagtgtcgatgcagtagctccattctcgggcttctcgaattttgtcagatatggacatttgaaattgaagtaatatttgtatttttcgttatttttttatttcttaaatgctttaagcaattccatatttttaattaaatttggcattatggcattctgaatctttttaaaaaaaagtcagccaagtgattgaagattttatgctctcatgtgatttgtaagcaaatttttgtcaaaatgagtcatgacaatggtaacaacgcttttcccgccgcctcgtccatttacccctcccttccgtcggccctttgcgatgaaaagccttcccccgccgccgttttgtcccattgcgatgatatggaaggcatcagtctcttggtaaaagctgcggattttgcagctcgtagacaccgtttccaaaagagaaaggacgagcggacgccttacataaatcacccaatcggagtcgccnctctgctgataaggtaaaacttttgccaggctaattcgaacaaagcgaagtctgccgcttttgcagcgttgccaaagtgtacgaccccgccacattggctgctgcttatctgcacgatttggtggaagacacncaaacgacgtttgaggagttggaacacttttcggnagagagtggcggaaattgtcagagaatgcaccgacgacaaaaacttaccgaaagatgtgcagaggaaaa

SEQ ID NO: 45938 - DNA, 745 bp, Heterodera glycines
aaccgcccaactgagcgccgctcccccaacccattatcggccgagcgagcagaagaagcgcaaaaaccaaacggctggcagctcaacgcaacaggcggagaaaagggcctccgactccgtgacgcacttgcggcgttcgaacggcgcttcgaatcgatcggcggacggagtgaaggaaagcggtggtggcaaagagcgctatcagtgccgatactgtcaaaaagtgttcccgcgttcggccaatttgacgcggcatttgcgcacccacacgggcgaacagccgtacaaagtgagcaaaatgagaaatgagcggagggggagggggggagaggagagagagaatagggagggagggagagagaaggggagagaaatagagagagaggagcgagggggagagagagggaaaaggtttacattttggactaatttcccatatttgcagtgccaatactgcgaacggtccttctccatcagctcgaatttgcagcggcatgtgcgcaacattcacaacaaggaaaagccatttcggtatgttttttggcagaccagttaaataactgtgattagattgtttaattcagtcggtcaaattgctccattctgcaattaataaatcgatcaaccgattgattggtttattgattgattgatcaattcatttgcttcagctgtcactattgcgaccgatgcttcgggcaacaaacaaatttggaccgacatttgaagaagcacgagaatgaaa

SEQ ID NO: 45939 - DNA, 1770 bp, Heterodera glycines
ttaatgggttttgtgcccgtccaggacaatccgataagcgaatgccgaatggccgagttggtccggcactttttcgccttgggttggatgtgcgacaacggcagcggaatggcggtccgagtgaaagacgaacggacgggcgaacatttgattctgaactcgtccaattcgttggagaaggaaattttttcggagtaattagtgccaattaagcacacgcattaatttaacatgggcaattaagaaacgatttatttgtgatgaaaatgaacggcgaaattttgaaaagcccgtcaaaatcggaccgatctccgacggcgccgttttatttactgcgcgacaatccgggtaaatgggaataacattcaattgataaaggagaaaattgcagatttggcctgtgtcattcacactcactcaaaatgggcaaatctgatcacccaactgatcagaggagacgagttcaaaatttcaaaccaggaaatgattcaggtggacaaaaagccatgctgagggggtaatttgaaaaagccatggattagtagaaattcgaagctaaatccgcaactgtgtggtgagatcagagaaactatgaaaggattaatttaagaataatttcttaaataagttacacatttaattattttgtttgttgaaaaattaaataagaattatttttaaacaatatgctatcacattgctttccttgtccatgtaataatttcgtaaattttcacttttttcctttttttttgttagggttgtgaaaatcgtctcacaaaaggccgtctggataacattgacgtgctagtggtgccaattgtgcagacagagatcaatgagcatatgctttatgtaagcacagagagaggaaaatgaaaagggagtccattaatctgattaatttgttagccaattctgctgaggacactgaatcaaaacgcgggggcaagtggcattttagtgcgtgggcacggctttttctgcttcggcagcaacagttggcaaagcaccaaaatgatgttgaaaattggcaataaatgaatttatagaaatcatttccattgtcaggttggagtgctacgagtatttgttcgaattggcatgcgaaatgcttaattacgatttgccattggtcaaaagtccaacggatgaggcgggaggagaagaagcgaatgacaaattggcacaaagggcgcaagaagcggcgtaaagaggacggacaaaatgccgaaaaataagggacaaaatgagacggacaaattaaataacaaaatgaaaaaataatatttgaattttcaataattggaggcacaagcgaaattggggttcgaaatttcgtaaaaaataaatacggacgacggaccaaacaggtagtaacagtaaaacccaaaaataattggaatttgtcggttgctgattcggtcggtctttgtccatccgtcgcacttttacaaatcaatcagctgattctaattaaatctttgatggatgaaaatagagaaatttaaataggcaaagaaataaaaataaacaaaggaatttatatgttccccgactccagttggcgaagcgggtcaactccgtcgcgccaactccgtcccagccaactccgtcccgccaactccgtcccaggccaactccgtcccgagccaactccgtcccgccaactccgtcccaagcaaaaattcaagaatttttttaaaaataaatttgagtttaacaaaattttatgaatgggaaacaaaaaatgataaattttggctttat

SEQ ID NO: 45940 - DNA, 2393 bp, Heterodera glycines
acaaagcgtgtgaaagtgaattaataattaattaattgggaaattgaatttacaaaaaaaaaaaaaaatattttaagaatttatcacctctaatccggatttgattgaatcgctgcgcaagcagaagttcgacgtggtcatcgaggagcagctgaacttttgcggtgccgggctcggccatttgctggccattcccattcacattctcatcagcaggtccattgtttgttgttttattaaattttaatcattcatttttaatgaatatttaattaattaatttgttctaaatccattccttcgcttttaaagttgttttggtcagttttttattttattaattttataactaaattttaattaaccactttttaaaattaatttaaaataattttctttttttgttagtaaattcattcttcgttttttaatttaaaaaaaaaattaatttaacttcattattttgttagtaagcccattccattttttaattgttttcgtccgtttataattactttgaattaatttctttttgttagctaaattttaaaattaaccatttttaaaatgaatttaagttaatttgtttttgttaatttgtccattccttcgttttttaattttaataaattttaatttaccatttcccttattttccgacttccttctcagctgtcctctccaagagcacgtcgcttctcttttcggccttccttttcctttttcttatcttccttcgctaatggacgcggatttgcccgacaaaatgtcactctctgaacgatttgacaaccttttgcgcacctttgtcggttacgtttatctttggcatggcattgatccgctgacgaatattttccgaaaacatttcgggtcatttaaatgctttggtttaattaattcattttatttttgctttcaacagaaacgatttccccgaccttcgcgacattgtcaaaaattcgccgtttgttttcgttagtgtggacgaactgctcgattttccgcgacctctcttcccaaatatggtgaacatcggcggaattggcatggacaaattggacaaaaatgccaaattggaggtattctgacaaatgagcagcccaccgaaagagtgcttttgtgataaagcaacattttgagttgttttccagcggtgtttttcgggacattctgggatgtcttcgctaggatttttcaacattaattctaaaaccctaaaaagtgacgatttttgcataaattatccaattttctgtggcaccgctcctccattctttcttaagaatgtacagttttacaaatgagctctaattaatttttaggagccatttaaaagtgaaatgagcaaaggaaaggaaggcgttgttttcgtttcaatgggcaccatcattcgctcatcggaccttccggccaaatttcggcggaaccttctcgaaacttttgcaaaattctccgattatcacttcataatgaggatagaaaagggggacaatgtaataaattaaataattaagagccatcatttcggtttttagtattcagcggaaattgcagcgaaattcggaaacatttttttgacgccgtgggcgccgcagccggccattctcggtaatgcaatgggatgcgtttatttgcggcgtatttaaacccttttgttttcatacggtatcaatgcgcataattttttcccatttcattacgatacatcccataattttgcccatttttcattgtccattatctgctttacccaattggtcggtttgcagctgacccacgtctgaaactgttcatcacccacggcggctacaacagtcttttggaggcgacgcgcggcggagtgccggtgctggcgatgggtttttttgcggaccaacaccgcaacgcacgagcagcggaacggaacgggtgggcacgctcatttgacaagttgaagctggtcgaaggcacggcgcagttcgaggcgctgcttggcgaaatgctcaataacgaaaagtaaacacaaaacaattttggcacaatcaaataaaagtgccacttttcaaaccaaaagatacgctgtgggggcaaaaagaattcaaaatttaatgagcactaaagtgagttattagcaaaccacttctttttgcatagaaagcctttaagccattcccggccgaagaacgactcaccaaaagcatccgatttctcgaacaaaatgggggaaaactgccggaattgctgagcgaatcgagaaatatgggcacaatttcgctgtacaacatcgacttggcgcttattggcattgttttgttggtacttgcattcgccctcactttttttgtgtgcaaatggattttggcattaattgcaaaattaatggacaaaatgaggggacaacaaaggccaaa

SEQ ID NO: 45941 - DNA, 323 bp, Heterodera glycines
gtcgctcccgctgaactcgaggatttgctgctgtcccacgcgggcatcaaagactgtgcggttgtgggggtggcggacgaactcgcgggggaagtgccgaaggcatttgtggtgagggcggatcagacactgaccgagtcggaattgaagcgatttgtgaggggtacgtaagcaaattagcaccacttttaagattcattttcatagaaaaagtggcctcctacaaacagttgggctcggtcgaatttgtggacgaaattccgaaaagcgcctcgggaaaaatattgcggcgagtgctaagggaaaaggacacgaagaaatcg

SEQ ID NO: 45942 - DNA, 739 bp, Heterodera glycines
atgcttatgatctcgaacgacgacgaaaaaggcgcttctgttttttccatcgatccagcaggacattacatgtaatgtaattttgactgaatctcaaaatattaagtttatctgctatgatataatttttcaacatcctaatagattctgttaaaatagatgaaaaattaacggtcccagggatcaaagttcgaaataactttcattttaaaaagctttctaccaaaatacagttctgttcgtggttacggcattggagtcaagcagcagcagatcaacggttttctggagaaaaaactcaaatcaaaagaccgaaaattcggtgacacggaagtgattcaactggcgcttgaggcactgcaaaccgggctgggaattgacttaaaggctgacgaggttgaagtgattgttgctacaaaaacggacccgaaaggagtcaaagtgagcgacaaaagcattgaggagcatctgacggcaattgcggagagagactgaggacgaaagtgatttaaaaacaacattttgtggtgttatttttcgctcttctaattatggttttaacagaaaaaaatttgtttttcttcagttgattatggattttctattttgggggggggggggggggtgggttaacgaaaacattttttggggtattaggtagttacaatttttaattgacggggttgatttccatttaacagctttttacacttttataaatgcgcgatgacagaataaa

SEQ ID NO: 45943 - DNA, 2341 bp, Heterodera glycines
atgtgttttacgtaacatgaaattttacatgaaaaacttcaaaacttgaaaacaaaaatttaaatatatagttgacacaaaggcaacaatatttcgtaaaatctcattattgatttctttttgtttccttacatttaagccggttttagaccaaaaatgcaaaaatagaaaaattgcaagttttgcttttttgttcgaatttgggttcgattgggtcgaatggatacaggattcggattctccgaccgtgaaaacccctaaaatgactttaaacaaatattttctatccgaatttcagctcttcccacgcttgggattcgtcgcacgcgtggctttctggggaggagaagtcccgacttgaagtcgttcagcgggaatggcgcctgagtcggacagcgagcgcacaagcgaaagtggaggaagaagtgccaataccagcgacagctttgaagccacagacatcgctagagctagacgaggtcaagaaagaggcggaatcacgacgagaatccgctgaggattacgacgaggactatgacgaggaaaagcccattgacaaatcgcctggtaattagcgggagggaatggctcaaaggtcaaccacaaatcgtttctttagataaccgatttttgaaatttgatgaggaattgggtcgcggttcgttcaaaactgtttaccggggtcttgacactgaaacaggcaaatgcaattgttcacattggcatcacatcactccacaattcattcgtttctgcaggtgttgctgtcgcttggtgtgaattgcaggaacaaaagttgaacaaagcggagcgccagcggtttcgggaggaagccgaaatgctgaagggcctccaacatccgaacattgtcaaattttacgactattgggaacggacggacgggaaaaaaaagttggttggctttccattttattttgtttggggccgtcgattcaaaaatgcaatttgcagatacatcgtgctcattacaggttgtttgtgcacacaatttccaaactgtcctttccttttacattcattgggcaaatattttccattttttcccattatttaggtcgatttgtgcattagtctttttagtgttccctccgcttacaattgctttgcttatgctttgccccattcagaactcatgacttcgggtacgctcaagttgtatttgaagcgtttcaaacgaatcaatgtaaaagtgctcaaatcgtggtgccgccaaattctaaaggtgataatgccatttagattccctgtcatttggtttaatagctgctttaatggtctgacttatgcaaggatttcttcgtttcagggtctctattttttgcacacgcgtcccacgccggtcatccatcgggacttgaaatgtgacaacattttcattactggcacaaccggaagtgttaaaattggtgatctcggtaggtcgaggaatgctgaaataaaatattaatttcgaatggtttcgaacgtgacctaaacgccctgacaatccttttcaggtcttgccaccctcaaaaacaaatcgcacgcaaaaagtgtaattggcactcccgagttcatggcgcccgaaatgtacgaagaacaatacgacgaaagcgtggacggtcagttatgcgtaaagcatacaataacacatttaatatgtttagtttatgcatttggcatgtgtttgttggaaatggtaaccggggaatacccatacaggtaattgttttgatgctttatttgcacgctttgcaaaatgagttaagcgagtgccaataccccgcccaagtctatcgaaaggtcatttcggtaagcgattcaaagacagcaaaagcgagtcgatcgaattgatcggccctttcttctgtttagggagtgaagcctgcctgttttgaacgcattcaaaacccggagatcaaagaggttgttactccactcctttgtttgactgtgttttgattgcccaattctgaacagataatcgaacgatgcattcggccgaagagagaggaccgatcgaatgtgcggcaattgttgaacgacgagtttttcatgccagtccgtcttccattttttaatcaatttttcatgatattctttcaggaggaacaatttggcattcgagtggacattcagaacagagaccaggatttgagcagtgccagcagtgaggtgatgccgttgaatgccgcccaccctctttgatttctgtggatgaattgaatgaaattgccaaatttatgtatctgcgtcgctaaacaaaaatttttaaatttttcgactgactcccttttttcatttgcttaatttttccaattacttattccactataataaa

SEQ ID NO: 45944 - DNA, 756 bp, Heterodera glycines
atgccaccaaagccatcgggaaaaggggcgaaaaaggcagtgaagtccaccaagacggtgcgcacggctgacaagaagcgtaagaagtctcgcaaggagtcgtactcagtaagtttattgtgccccggggcgtgagtctgagtgttatggccagcacttaaaacccctgtttttaggtctacatttaccgtgtgctgaagcaggtccaccctgacaccggcatctcgtccaaggccatgtctattatgaactcgtcggtctttatgaattttttaaattttcgcttttcttttcagcttttaagaggaatttcagtatttaaggctcaaagatatgaattctttttcgagaaaatcacgccttcaatatttgacatttcaatgctcaaaaaagggatttttgcggtcaaaaatgaatgaatttatacattaaaaccaaatccaatagctaatattgcatttttattcaactaaatgcatttttccaagcaatttttcgctaatttccaataacctaactattttgacacccaaatttaatgcaattcaattttccctgcctttttttaggtttgttaatgatgtgttcgaacgcattgctgccgaagcatcgcgtctggcccattacaacaagcgctcgacaatctcttctcgtgaaattcagacggcggtgcgtctcatccttccgggcgagttggcaaagcatgccgtttctgaggggaccaaagccgtgaccaaatacacctcgtcgaaatga

SEQ ID NO: 45945 - DNA, 934 bp, Heterodera glycines
atgcttccgtctaatcctgacgacaaaatagatgaggtcgacaagattctttcaaaacttgatgggtaaatacttcatttattcattttttgtgtttattagtattaaaatttgtttattaagaaaaattgaacgtaaaatggaccctttgatgtgtcgccataacccaagacagaaatgcacaaattgtctcccattggacgtaccttttctaattcagaaatgaatattaatttatttatattttaatcaaaagtccttttctctcattcatttttagccctacgatgaaaaatttctgcatgaaaaggacatcaaacatttgtcttttcatgctcatgtgcacaaattgaccgatttgcatggccgagggacgcgttcaaacaatgtgttggagaatgtgtgctgcaaactgcgcccgaactgcgcgggtggccatttgccatacccaaaaggcatttgcacgcgttgccgcccctcaacattgacactcaacagacaggtcatctccattttggccatttaagcgaggaatgagaaaattgggccattaatatcaaatgccaattccgacacaaaaaagaacgaattaatcaaattgtccaactaactggcatttttgcggtggcacagcaaactagggtaatagttaagatggttgcccctatttttgtcggaaattttcaaaatttaaaaagtcctttcaaaacaagtttttagaggttttcgaggtagttgatcacgattctggcatccatttcgcccaatttcgaatcccggacccgaattcgaacaaaaagtcgaaaattcaaattttcaagtttcgcatttttggtctaaatatgacttaacttttagaatgttttcatgtatttaaaccgatattgaaccaaaaatgcgaaatttgaattttcgactttttgttcgaattcgg

SEQ ID NO: 45946 - DNA, 579 bp, Heterodera glycines
caaaaagggaggaaaggttttgaagaaaaagagcagaaagagtggggatacgacggcacaaagcggcaacaacccaaaggcgttcaaatttcgctcggcgatcaaagcgcaaaaactcatccgaaggcgggcgaaggacccacggcgcctttttaccaagtcattttcagggctgccgatctcagcgagaagaaaaagcacattccgattgtcgaccgaagtcccgacgtcctcccgccactgctcgttgcccttgtcggtcccccgggggtcggcaaaagcacactgttgcgctgtctggtgaagaattacgtcaaacagagcctatccgaaataaaaggtggcaatttgttttacctttgttggccaatgtttccatttttcctaaggcccagtgactgtggtgaccagcaaaaagagacgggtgaccttttttgaagtgccaaatgacataaatgccatggtcgacgcagcaaaaattgccgatttggtcggtttttgtggatatttggataaagaattctttcgattttctaggaccgcattatcatcgatgcctctttcggctttgaaatggaa

SEQ ID NO: 45947 - DNA, 1277 bp, Heterodera glycines; identical to SEQ ID NO: 25689

SEQ ID NO: 45948 - DNA, 1780 bp, Heterodera glycines
caacaacctccacaatcgtcctccgcgacccatcaaggaggtcatcatcgccacacatcttcaggccatcaccgttcgtctggaatgactgcttcttcttcgcgtgctccgaataggacacgtaccggagatgacctgcacattggcaagtacaaactgctgaaaacaattggaaaaggcaacttcgcaaaggtatgttattgcggttataagtttctaaaaaattaatgattgataggtcaaattggcaaagcacgtgccgaccggagtggaagtagcaatcaaaatcatcgacaaaacggcactgaatcagagcagcttgcagaaggttgtctgtctgtttaatggtgaataactgaagtaatgagaagttttttcctagctttttcgtgaagtccggatcatgaaacaattggatcaccccaacattgtcaagctgtaccaagtaattgagagtgagacgactctgttcctggttatggaatatgcgagtggtggtgagttgtttgattatctggttgcccatggacggatgaaggaaaaggaggcccgggcaaagttccgtcaaattgtttctgccgtccaataccttcactcgaagaatgttattcatagagatttgaaggtttctaaactaattcttattggaacaaattttgtggttaaggcagagaatttgttgctcgatgccgacatgaacatcaaaattgccgactttgggttcagcaacacattttcaccgggcaacaaactcgacacattctgtggcagtccgccctatgcagcgcccgaattatttcaaggcaaaaaatatgacggtcctgaagtggatgtttggagtcttggtgttatcctttacacgcttgtttccggcagtcttccgtttgatggccaaaaccttaaggtacacttaaacacacaattaaattcaaattgaactttttgttaggaacttcgtgagcgggttctcagagggaagtacagagtccctttttacatgtcaacaggtccgaaactgtgcaattcattgaagaatattatatctaattttagactgcgagaatctcctgaagaagtttctcgttttaaacccgataaggagaggaactttggagatgataatgcgggataaatggatgaatatgggctatgaggaagacgaattaaagccttacaccgaaccgacaaaagacgttcgggatgaaaggcgcattttgaagttgcaagcatttggctacactctccagcaaatacacgagtcgttggaaagagaaaggttcgacgaaattttcggcacgtatttgctgatgaaagaggcaaaaaagcacgacgcgcaaggccaatcgttgggagggagtggaccaaatgcgacggccgaatcgccgtttaatcaatcgatgggtccgaccgtgccacaatcgcatggggtggccaagtggtcttggctttccatgtgataaatcaaatttattaagccaacggtgtcaaatgcgaagaacagcagacgctcttcttcaaatgccgaacaaatccaaccacaacaacatgccataacatctcacagcgtaataaaccaacagtcggctgctcccatccaacaaatttcggcaactccacaagcgattccttctcgtcaaagtcaaactgctccgggacaagtgacgttcagaacggcacaattcaccagtcgccaaccgactctcagcgttcaaccacaaggtgaaacgactgaaattatcaaagaacttataattatggtattattttttgtttcttttac

SEQ ID NO: 45949 - DNA, 1368 bp, Heterodera glycines
atgagcgtaattaagaagattgacaaagacagtgttgagggtctagaaggaagtctgtctttattttctctaccgccaacaaatgtggccataaacaagacaaacgttcgtgaattgctgcctctgtctgctcttaatcaaacaggtccctatttgtttcgcttgttctcggacagccaatattgtgacttgagcaaaacctatatgtacctgctcagctcaattgaacggaagaatgatgcgggagaatgggtagcactcagtgacacggacccaaatgataaacatgttggggtcatccaaaactttggtagcagctttgtccgctcgctgaaggtcaacatttcaggtattgaggtgtttgacagttcaatttattatcactaccgtgactacataatgaaggagttgggctattcacaggaaattcgtaaggctttccacgaggcatcgtgctactaccccgacgatgatgaccagaacagcgcaacaaacccaggttttaccgcacgtgcggcacggttttcaggcggtaaacagtgtgagacaatggtaaaactgaattttgatttggcacgtcaaaatgcattgatgttgaacaatcaggatgtaatattcactattcaccgcaacaatgattcattcctcttgcttacgcccccatacaaaaaaccagatggtacactgcaggaaaataagaaagagtaccgtatacgtgtgcatgacatgcgtctctatgtgcgcactgtggacgtcacaccgagccttaaccttgccattagccgacaattggagtccacttcagcaaaatatccgttgcgtaaaattgagatgcggtctatttttcttggcacaggccggaccgagttggcacacaacgtgttcacctcaacgttgcctcgtcgcctaatttgcacttttgtttcaaccgacgcatattccggtaaccgaaaaatgtcgccctacaagtttgagcacgccaatgtacgttcaattagtgttgaagcgaacggacagacctttcccagcaccccgtatttgctgtccttcgatggtgcacagccccgttttgttcgtgcatttgtagacatgtacgcaggcctgggtttggatgactccgacaccaaaacggtctcgattgggatgcagcgttttcttaatggttgggcctttttcgtcattccgctgacctccactctggaggacacacctggttttgagctgatcagacaaggcacgtgcacgataaaggtgcaatttgagcagcctataaaagcggatggatatgagatgcttgtccttggcgaattcgattctgtgttgtccattaatgcagaccgggttctgagtacagacggaagtgtgtaa

SEQ ID NO: 45950 - DNA, 2251 bp, Heterodera glycines
atgaaaaaaacccaccctccacagattgtgacgattgaccccaatttggcggcgctcggtctgcccgcctacccaccgttgccgccaacgacagagccggccaaagtggaggaaatccgacgcactgtttatgtgggcaatttgccaaagggatgcgacggcgaggaggtgctcaacttcttcaacgcgtgcattggcgaggtgagagggccaacgaaagccccgcgggagggggggggggattggaatttaaaacaactaatcagaaaaacatcagagatagtttttttttgcacaccgttctgcagctattgttttcaaaacagttagctttttgttaatagttttctcaatttctcaggtgatgtatttgcgaatggcggccggcaacgactatttgccctgtgactacgcttacgtcgagttcagtcagcagtcgtcggtgccattggcactgcaaaacagcgactcattggagtttcagggacgtccattaaggtcgaatgggatctcccaacattgtgtaaaaacaggataatttataaaagtagggtttcatttgttagatttttcattggaatctggaaataagaaaactaaatttattagagcactcggaattttgacggaacaggcgcaggatccatgagtttagagatggacacggacatgcttgccaggattaaaatcctaatttaaacggcatattcaattagtttaattagagcttcgggtactgagttgggattctcgctcgaactcaaaaaattctcaatgaaaatcttcaaaaatttctcaagaatatctcccttaatatcattagggcttgccaaaaatgaacaaaactttccgggcctagttttaatccactttttaaatatgatcccctcagaatccaacattccaaagttgcgatcataaaaccgcaacgcaaaacggctgaccaggcacttgaggaggtggaggaagcgatcaaaagcggcagcgacgggcgcacaacgacggacactggtactaacagtatgttattaggggaatacgccaacgtggagcaattggagacggagcagcgcatcaaaacggcactgaagcaaatcatgcaaagcgtggacctggacgacgtgtaaaagcggaaaaagttgaaaaaatacgtaaggcgccatttgcaggacgagtcaggacatccgccggcggttgagcgaacaaatttcggtggatcagcggcgctacaaagagttcatcgaccaccaaatgctcgtcatccttggtcagatataccatatctgatcctgaatttatccacacttattttccaggtcaattggatctgccctcaaaaatcttcgattacctttaccttggcacggaatggaacgcgtccaattgggaggagctgaaggcgaatgggtgggccaaaaaaaggggcgtaaagatggagggggaggggtttggcttatccccccctcgtcgtatgaggcctcggacaccccccccccccctcgttcgtcgtaaggggggcggctgtaaaagagggagggggtcgtaacgaagcaggaaaaatttaaaatgtgcacaatttccttagcgaaatcaatacaaaattttaaaaattttcccggcggcgcctatcggcaccgccggaccgcccgccaccccctttcccaaaagttttttttggaaaaaggcgccgcaaaaaaaagatggtttgaatagcaacaaaaaaaggtcatcgccggagaaaattgtggaccttcgtatgaaaaatcggtcccgagacaccctccccccctgtcccaatcgtccgtcgtatggcccttggtctgagacaccccttgtatatgtatgtttttcagtgtccaatacattctgaacgtgacgaaggaagtggacaatttcttccccactcagttcacttacctcaaaatttgggtgtccgacgagacgaccaccgaacttttgatgcattggcaacgcacctacgactttatcaaggaggccaagtgggcaaattgccaaaaatatgccaatttgaaattcaaaaactccacagagaaaagggtgccaaagtgttggtccactgcaaaaagggcatcagtcggtccgcgtccactgtcatcgcttacgcaatgaaagcgtacggctggggactggacgaggcgttggagtacgtcaagcggaagagggactgcatcacgccaaaccccggcttcatggagcagttgggcacattccatggcatgatgcaggccgg

SEQ ID NO: 45951 - DNA, 704 bp, Heterodera glycines
atggagcgaacaaaatatgaaaagcaaaagggatttgctgctgaagcacaaaaatgggaggaggacattgaccgatttatggaggcattggcggagaggggaaaggtgggcgtggtgttaattttttggatcattgcccacttttaatccgtctttgaagcaaaaaaaaaaaaacggatttggccaagaatttgtgttatttatccacccttttttctttcctttagaatgttcgttcctccaacagtgaaaaaaaatttgactttgaaaaatggtgcgaagaaattgataaacatcctgcatttgcacgcgatttgaaaccgaccgaagacggacaatattcaatggaaatgcaagcaatacaagtgaacaaaaagggaacaattgggggggggagaagaaaatatattatttgagtgaaaaaggaaagcaatttcaggcaatgaaatacgacgaggacaacccaacggaatgtgccaatgcgtacaaagaggagggaaatcggcactttgagaagagaaattatcggtgggcgattgatgcgtacacaaagggtaattaattaaacgatgaattcatcgcccgtcgttccaaacatttgcgcttccttaccatttgcttcctttttcaggtatcaaattgcgttgttccgatgttcgtcttaactctgttcttttcgctaatcgttccgctgcccaccggcg

SEQ ID NO: 45952 - DNA, 1310 bp, Heterodera glycines
cgtaatgagcacactccgatgtcactttatcgggtcgtttcgcagctggcgcaagaaggcttcgttgacatttttacgctgttcactttggtattcatttttgatttcctactttgtttttccaattttttattgagtttagattgctccaactcggaaggaattgttggaggagcacaaatcgctaacggacctcgtcaaattgcggtcaaaccgtgcggaaacaatctcttcgaatgtggtaacgatatttgagaaatattcgttaagggtcgatttttagagtatgtaagaaaaattggttatatgaaacaatataaattaatcgatccactttttattttgctaaattcaaataaaaatttttaaaaaaggtaggtcctgcccggattcgaaccggggttattggattcaaagtccaatgtgatcaccactacactacaggaccgattgatataggctttcttaattaccattttctcgttttaattaatcctcaaaatttaggtcggtctgttggcgagtgtcactgaaagctttccgatcgcgtcgattctgaacgcggcaaatgattcttcgttggaccaaccttcgccagcttcggccatttctttttccgccgcgactcagtgccaattgaacgaagaccgaaaattggcgggctcacgttttgacgatgtgaaaagaaaaattataataattaaatggagtttttttagactgttttgaacaaaaaccaaaagctcggtttgctgtgtgctctgttggaatttggcgacttggaaaaggctcagaaacttttggaatttttccccgacggatatccctttggtgtttggttcgttttgctttgctttttttatttgcatatttcaataatttttctatttttcagtcaaagaatttcaatggcatttgctaatattatcggattttgcattgaaccgttctaccgtctgtatgtcccactttttaaattattattatattactttaacaattatttcagaaaggctgcttcgaactacgaatgcttacccaattcttctgcaacgggcgttcgaatgaaagaaagttgggaacggttcacatgtcatccaaaacaggcaaagtcgaccatttgtttttaagcatttgatttttacaggtttccgattggctatcttttttcgctgatgcttgtccgatcgcctttcaactcggcccatacattggggcccgtcacgaagtcgccatcaaaatgatcagacttttaaacacatattatagcgatgaggaagcacaaagttcggtcaccgaagtggacagtg

SEQ ID NO: 45953 - DNA, 647 bp, Heterodera glycines
atggcttcaacaacaattcgcttttgctcattgttcaagcgacttccagcaaagacatttgttagttgcaggactttgtcaacgagtcggccgatgtttggtatgaacaaattaacttactacacattataaattcttctaattgtactttcttcgttttgttcgaattcaattccagcattgaccttaaatagcatgataatcacccaaaaacttaggagtcttgttaaaacttgacttcaatgttgtccctggctatatcgacgcttttctgatccgagttttcacagttcggctttacccccgcttcccctttcgttaagtgtgccaatttgccattttttgcgtttttttataatttaaaaccaaagtaccatgattttagcaatgggttaaccaataatgtttggttttagcagatattctctacacggataaacacgagtggctttcgttggacgaggcgagaagtgtcggcaccgtcggcatcacaaaccatgctcaagttgggattgatttgttgactatttggattgtttaaatgccaattgtaggaatctctgggcgacgttgtttacgtggaattgcccgaaattggcaaaaaattggacagtggaggcacagcgggtgccatcgaaagtgtgaag

SEQ ID NO: 45954 - DNA, 2507 bp, Heterodera glycines
  unsure (1)..(2507): unsure at all n locations
gaatgtgacaaatgccattcaaggtaatttttgagaaaagcatcttctcacttttttcttgaccaacaaaaaatttatcagtgcaaaaggaaaataaataaaaaataaatctaccgtaacccgttacagtatctcccttttttgagattttagaaaatttaggcaaatttttaattagaaatactgacgcattttctatgtgccctttttgggctgttggtggagcagtataagaactgtatgccaggcatgttcatcgtcgggctgccgtttgccgtcaaaattggcggatggtgtgccattctcgcgctgaccggcgttgcctggatttgctaccgcactgttagtacttttttgttgatttgccgtcgggtagcgtctgatgattctgatcacttttacctggacacctatcggcttagttttttgttaccgaaggcaaaaacctggcacttttctccatcggtcccagtcccaaatattctaccgttcatttgcttatcattttgccagggtctgattctgatcgagtgcctttacgaggactgcccgactgatggcactgatcactcatcacagcagaaaataaagaggcgacgaaaagtgagacggaggtgaaacgttgggcagtagcagaaggcactggagatcaggggatggcacagaattccgattttccaaaaattttgtgcctcggaatgccatncctgctggagatgttcgagagtctatttttacctaagagaacagagttgcccagaaacgacactgaaatccctaaaaattcagttatcgggaagtggccgaggcggtgcgaccggggcttggcaaatttgtactcatcgcgcagctgaccgaacttgcgagcacgtaagcagacgaaacgcaaaatgaataattaataggacatttaaaaaaacttccccccatttttggcacttttttaaaatttgccaattcttttacctatctttttgccacaccgatgtgcaacaacctaagtatccaacaaattaagttgcattctgtacattgtactggccggggacctgctccaaggctgcttcccgagtgtcggtgcgtttgcttttcccattttttgttgttgatcaaatctgtaagggacagtctgtgaccaaatgatcaggccaaatatgggggggggggcacttaattggctaacaattagtggcataccaaacaaattatgccgagaattgatcaaacatgtgacaaaatacaagcccgattgatagtgtccggtcaaaactaaggccgaaaactgctctaaaaacccgaaagaaaaaacaatttaaaattttggtcgaaactctcgaccgactgggtttttttcactcattggcattcgctctgatcactttgttcatccaatgcttttccctcagatcgtcctgcttggatgatgctgaccaccgttgtgcttctggccaccgcctttttggacgacctgcgcgtggtgtccaatctttccatggcaaatgctgtctcccatttggtcatcaacggcatcatggtacactgttttttgcgataatgccatcatcatgtaataatgtcaacccaacctgttcaaggtgttctactgtctgagtcaggtgttttgctggtggctctgctatttaatcacttcccccccccgtccgcttctcacagttttctgagtggcgcttctcctcactgccaattgtgccaaactttcgcctcttccccactgtggtgattaaaaggggaattgaatttcgacacaatcacataatgatcagagaaagttgtatggtcataggtaaaatcttatagcttaatctgacatgggcttgtcacccccggcttttccttttactctttgaccgattattaattgggggagagaaagtcggccgttttggcgccaaatgaatactttcttcccttatcaactatattaaataaacctaataaaatttgaaagcgcttaactaactctattagccggaaaattagttaagattattgtctgttttacatcgcgccccttttttggacgggtaaatcaaaaaagattaaaccactttaaaaatggtggcgccaaagaaacggatcgactctaattcccctccctatccactaattaattaattgcccccaatttccgatcggcaccgtcgtgttcggctacacctcacacatctttttgcccgctctcgagggctccatgcaggtccgtccgtccatgttttaatgccggatatcacttctccttaccccaacccaaaaaaggatgccgacgagttcaagccgatgttggcactgtcccacagcgctgctgccgttttcaaggcgctgttcggcctgatcggctttctgacatttgccgagttcacgcagaaggaaatctccaattcgttgcccaatcagggcttcaaagtttggagaagtgccatttgggataatgcaaaaacggactcaatcccggccatgtttaaggctctatcacgatttttttcttc

SEQ ID NO: 45955 - DNA, 828 bp, Heterodera glycines
gattacgggccccgcgtcaatttcaaataccaacgcgtgaacagtgctaaattcttcggcttgcccgactatgttgaccatttgttgcttcggatgggtcaaatgcggggggagggcgtcgcgcgacttttcgatggtttccgtccggtggaattgtgcaatttggactactccagtgagcgactttcatccattgacttgcataaggtggtcgttgttgctgctcatttcctttgttttaacgaacaaccgaagggttatccgtttgagagggaatccgaaaaccgacaaattggaataagccgttttggcgtttaattggcaagataagttaaatgagaacattgccactgaattttatggaatgtcgggctggggaccctttaaattgtctgaatttttattgttgcaattggttaaatgcactctctgcttctcaggatgacgaatggatatggggcgagcgacttgtcaggtagatttgatgaacatccgggtattacagtatttttctctcctttctaccgtattcccccttcctatactgtatgttgctgcttttacagtgtctctctgaactcggattgtgtgttcacacttgaacaccccggccgcaaattgctcgtcttcgtcccggtcccgcgccgttcccttttgtgtttgtccggtgaagtgcgctccgaatggaaccacggcattttcccgtgccatattttcggccgaagagtggtcattacactcagagaattggccagcccatttttggtcagtctcttcctcatttttgacttgatttgtgatctttttggctttaaggatgaccccaaa

SEQ ID NO: 45956 - DNA, 907 bp, Heterodera glycines
ctgatcacccaacgtcagcaagtgtctctgctcgtccgaaagggtctgattgagcgtgcgttggacttcaacatcattctcgacgatgtggccatcaccgagttggccttctcgccccaatacagtgccgccgttgaggcaaaacaagtggcggcacaggaggcgcagcgggccagtttcatggtggagaaggccatccaacagcgccaggagaaaattgtccaagccgagggagaggcgcaagcggccaaattggtaaaaaaaggacggcatttccaactataattttcgttgtttgtgacaaaataagaaatccaaaaaattttgtttgggtgttttacacgtagaaatgggttatacataaggagttcataccgtaccaagtaaaaaacaataaacatttcctgtgatggaattccaaaaatttataaaaatgttcttttacattggcatgaccatgtactttcttaattccaaaaacaaatcgtttcttcatattatttctttattgtctttcataaattttcgtctctgttcccctttggctataaaaccggttccccattaattgaaaaagacaattttcgcttgccattttttctggcggggtcttttgccctttaaaaataaatgcgttttatagacataccataattaattgagttttaaacaccctctcctaacccctcttaattactcacttaaatactctgtcatttttaagttgggcgagtcgatgaagaatgaccccggcttcctcaaactgcgaaaaatccgtgcggctcagaaaattgcgcgtttcattgccaactcgtcaaaccgcgtctatttgccttcggacggacttttcttgaacttggccgacgaagactatttgagtttggcgaccaacaaagggcgccgttga

SEQ ID NO: 45957 - DNA, 539 bp, Heterodera glycines
atggcttctatagacccgaaggatttcttcaacaagtttgccaaaccgagcaaaggtgccggagtcggcgctggcttgatgactgcagctgcggtggccggttatgcgctgtacaagtcgatgtatacgagtgagtttttgcgcagacaatggctcctaatgcttctcataaatttattacacaagtataattgtgtgtttcagttgaggctggccatcgtgcgataatgttcaaccgaatcggtgggctcggcgacgaggtgtaccgggaaggactgcactttcgcattccatggttccaatatccgattgtctacgacattcgtgcacgtcccaaccaaattcggtcgccgaccggcagcaaggatttgcaaatggttaacatcgggcttcgtgtgctgtcccgaccggacccggggcagctgcagacgatctgccggatgctcggcaccaattgggaggagcgagtgcttccgtcaatttgtaacgaggtcacagatggcgtaataatggggagagactcaaacaacataatttaa

SEQ ID NO: 45958 - DNA, 1998 bp, Heterodera glycines
tgaaattgaccgattttacaagagggtcgaagaattggaggttcagcgagaagatgaacacgaggaattggtccgtttaaatttaattgcttttttaatgattagtcattgtagaatgaacagtcggcactccgttcggacatcgaaatgattgacgaacaaatcgagcggtggaaaatggtcaacgaactcgagaagaaaaaggaaaacattgtcgagtcggtggcaaccaaatttgagcaaaagccgaactttgaccctgtggaaatgtctgatgacgatgattccgatattgttgattttgataggataagttggagaacaaaagctttttaaaggataaatttttcgaataaatcgccgttacgactgaattaattgttgaaattctttgtagtatttcactcttttaacatggtataataattttgaaattccagactttgttccgttttgcacaaatgaattttatgagacgtgctttcattgcttcaattaatttcccacgcctgaggaataatgtgttgagaagtgtcgtcccatacgtcctcattggtggtggtaagtcatggttattgccaatttcgtgcctcataaaaatttagtagaatatagggtattaatttgattctggatatattgaccctaaaatcgagaaataaaaagcctcaaatggtacaaatttagggtgaggggtggcaacaagctaaaagcatgttcaccacgatattggtgggagggtggcgacaatttataaaatctattagttcgaattatgaaaaaatatttttggcactgcgagttattacgcgtcgttgtcaatccgtgcgagggacccggacgcaagagttttgatcataacggacgagcatgaaacaccgtacaaaagaggaccattgtccaaaggtatggggaaacaccgcagggaatgaaagggtgggaagggacaattagcttcggaataaccttttcaacactaaatttcaagagctttggtggtttgccgatgaggcgagcattgactcgctgtcccacacaaatccgacgagtagcaccggacggaggcgttacgctttttacgaggcggacggcttttacctgccaccggacaagcttgatgagtgggaacatggcggagttgggctaatacgtggcgcaaaggtcgtcaaggtggacaccgagggaagctttgtgctgttggaagatggacggaagatcgaattcggcaaatgccttatcgcgacaggtgagggcacgcaaactgttggcaaattgtgccaaattaatgctcagggagtgacgcgtggttgcacacacagcttgaacaccttcctgaactggatgactttgtcacaacacttggaaaggttgattagtgagaagaaattaacaaaatcgaatttaaggcttccgactttcggaaaatttattccaaagttgacaaaatggctgtcgctgaaaacggcacacaaaatgttattgttgttttgggaggcggtcttttgggcacggaattggcctactcgctgaaccgacggtacgctcgtgaccaggaaaaccctgcgctgaaaattgtgcagctgtgccaagaacccggtggggaagagaatcggtgtaattcacggagggcattggagtttaattgggtctaaatttatactttctttgattcatttttatgctttttcaggaattttatccgaaattctgcccgatgctctgagcgattattcaacggatatgctaagataccaaggaattgaagtgctgacggacactcgcattgattcggcatcggttaagggaagggatgagaaaaggcgccgaatttgtctcaacacaactgcagcaacgacaagcgacggtccgaaggaaaggaagcaagttatggccgactttgtaatcattgcgttgggcgccgaaccgaacatcgaattggtggacgaaaagagcagcattaaactggacaaagtgatccgtagtaaattcactaattga

SEQ ID NO: 45959 - DNA, 1563 bp, Heterodera glycines
atgagcgtcgaactcaccgaagaagagcgcactttgctgtccgctgcgtaccgaagggcgatcagcactcgtcgttccgcgtggcgtgtcatcgaatcccatgtgaaaaagtcgaccatcatggacaaacagaagcaaggtgtcaaggtgctgcagaagaaggtggagagcgaggcggaggagaagggccgtgaaattttggtcagtgcgtccgtccgtgcggcgttttccccggaaagaatttaactccaaaaaattttttgaaatttttcagactctgttggacaaccagctcatcccaaaggctgccgacccggaggccaaagtgttctacatgcggatgaagggcgacttccaccgctacttggccgagatcaaaccgtcggaagcggatggtaaaagggcttcgaaaatgctaaaattcaacaaattcccccctccccaattttcagatcttcgcaaggcacagaaggcgtaccaggaggcgtacagcattgctcaggaaaaacttcgaccatcgcatcccatccgtcttggtgtggcgctgaacttttccgttttctacgaggaattactgaaatcgacggaggaggctcgccgaatcgcacaaaaggtggttggaaggatttcattgttttagagaggctgctgttcatttcatttttgcgcaggcttacgacgatgcaaatgcggttatattgacggactcgagcggcaacgaaacgctgatggaggcactcgcaatcattgagaagctgcacgacaatctggcggagtggaaccagcgcaaaggtggagctgaatagaacgccgctgctgtgaatggagatgaatcgcgcaattgatatgggtgattaaattccgatggattaactcaattgtacacatatgtatgtcatggtgttgtgtatatgtatatattgctgtattatattgtataggctgtataaatgcgtcaatcgacttttaggcgattaatcaatgaccatcgtcaatttcttagggcataccttattttttcttacttggtcaatgttgtgtatttgggtaatactaccgatggtaggaatgaaattcttaggccacaaatttttcttcatcagtgtcaacatttcttggttacgcttttttagtatatcataattagggaacggatttttaggggcgaaaaagtttcaaatataagggtgaaatttattaaaattgcagtttttgtataaaataatttaaaacataaaggaatcaattttaaattacaaattttgattaaaggctcaaaattctttttaagtccattttcaacacaaatccactcaaatttatatcaaacaccgtttgttgatcagtgacaagaaaaacgaaaattaagggtcaaaatgatcgctttttgtttcaacctacctatttcacaaatttcattttaggaacaattcgaatttaattaaagtcgggaatttatttacctatttatttatttaattagcccgttttttcctttgaaattcgtataaaagacagagaacataataattgactgtcattctctgcaaaatcataaataaa

SEQ ID NO: 45960 - DNA, 2781 bp, Heterodera glycines
atgatgagacacaaactccaaaatggtcttgatgtgattgcaattttgttttttcttcgtgaattcaccatgagacaggattgcacgttgacaatttttcgtaatgagcacagagagatttgcagttggctctatccgagtggtggatcgtcaactctcctcataacaatccaattaacgttgttggaaaagcttggcccatacgcgtttgtcacgtaaccctaatttttcaaaagaaggaaaagcactcctaaatttagttttgatcttcattaaggctgaaaggggatcatgtgaaaaaaagaatatttgtgcgttaatcatttctttattgataaacttggaaaaataattgatgaattttttggtaattggtaatttcgcaaatcatccatcatctcattggcatcacactgagaaatatgtcctcttctcttgagaaaatttatcaaagaataccagcataaaatgaaaacgggaaaagcaatgagatagtgggcaagcaatagaagttgtatgaggaagttaggatggtagcttttgttttcaaatgttagtacttgtatctctggctttaaactggcgttgactgtagtgtttattaattcattctccaattaattcattctccaattaattcataaattatcacgtgacaaattcctttacaattttcgtaatgcactgaaaaaatttcctaattttccacagttcatcaaagttcgcagggatatgacccaaagcgaactcaaaattttgtactccctgcggcaacaagcctatcaggccaatactgccgcaggtgagtacaaatattttgtggtcgatttggagatcaaatctctgaaaaccccccgcccgctcagaactcgctagggatacgcgagcaaaccaaacaaaaaaattaggaataagggagaaaaaagtccctgggtttcctgcctattaataaatgcccgatcaatttcaaataaaatatctgatttagaacatatagcacaaaagtatgatccatcaatattcatcatcaatgagacctggttaaaccccagaaatacaattgaaaatgaactatctataaatggtagatatagagtaatgcttgcgaaccgaaatgagaaaaagggcggtggatcagcaattctaactaaaacaaatattccttatcagacactattctctgggacaaaattccaaagcgaaattttacacattaaattactttttaaaaaaccaatccaaatcataaatatatatcgtccaccgaattgtacagttcagaatactaaaaagctactcaaatttatttcggaccagagtaattctgaaaatatcatatattgtggggattttaacaccccaaatatttatgggatgaaaataaggtaattcaaagaaatgaccctgtgtcaaatttattgattgagtttattgaccaaaaacaattgaaacagcatgtcaaacaaccaacaagaaaaaaagctattttagatttagtaattactagtgaatcagaaataattaatgatttaacagtatttgaaaatttttcaacttccgatcacaaaatggtcggattcaaaataaagggaaaatttagtcgtaataatcacagagtttatagaagagattttaaaaatattaattttgcaaaattaaatctagcgatacttgaaaatcgaattgatttagcaataaactcagtatacaccgttgaacaaaaatataaagaattcttaaataaagtaatgaaattatatgatacgtttatacccaacagatctctaaaatcgataataaagcaatcatatcctcaaaaaaataaaagatttattttcagagaaattacggttacataagcttgtaaaaaagtttcccgataaaagtgagattattttaaattacaaaataatttcaagggaaatgaaaaaacaattgaaccaatttagaaatgaaaaagagtcaaaaattatttcccaagggcaaaactcagttaacaaatttattcgaaataaattatcaaaaaattatgaaattcctactttaatcgatagtgctggaaatatgtattccagtaatgagcaaaaatgcaaagtattagcagaaacatttcaaaaatcatttttagaaaattcaattgttaatggtccattaactcaatcagcacagaataaaattaaactttttgacattgaattgaatgcggaataatttggaatatattaagaaagctccccaggcgaaattccacttcaccggataatgttccttacattttattaaaaaattgtgcagagccaattaccaaaatattagctgatatatttagattgattttggtaaaaacgatggacgatatatataattcgatacaaatgaatcagcaaattgacatcatctatattgattttgtcaaggcgtttgattctgttccaattgatttattacttcaaaaaatcaaaaagattggaattgaaggaaaaattcaaaattttttaactaactttttaaaaaatcggagttttaaagttaaattggcgaagaattgtcagaaagtttcaaaatattttcaggagtgccccagggaagtgtcttagggccattactctttttaatttttataaatgatcggccgtcctttattacaaatgaagctgcatcagttggcataaaaatgtatgccgatgatgttaacttatattatgcccatgaaaatgatgaccattcgaatcagttggataaagaaattgaggctttggaaaaatggtcaaaaataaatgg

SEQ ID NO: 45961 - DNA, 840 bp, Heterodera glycines
atggaccgaactgccaaactgtggcatttgcaccgcaacgaatgcctgtgctcctttcagcacattgactttgtcacttgtttggcatttttgccaaaggtgtgtttgttttcaatgatctataattggctttcaatctaatggtccaattgcttttgatttgttcgatttccttttcatcgcccaatccattttcaggatgatcgttatttcatttcgggctctttggacggcaaaattcggctgtggcacattcccgagaagaaagtggccatttggaacgaagttgagcaggtggaggacgaaatttatatgactaaaatcacaaattcctaattttcaggttaacaaattcatcacggcaatgactttcgtgaagaatggcaaatttgtggtgatcggaacttttctgggccgatgtttcttttattcgaccgatgtatttattttgtttttttttagtatttttaaatttaatttcctcatttagcaactcaaatatcacactgtcattgacgtgcgctcgtcccgtggcaaaaattcggttggacacaaaattacttcgttggccgtccacggagacaaactccttgttgcggtgcttccaataaaaatttaattttaaaaatttcaatgtttttttcagtcggatgactcgcgaattcgaatatacgacttgcgtgacatggatttgtgctgcaaattcaaggcattcaagcgttcattgctttatccgtttattttggccattattttcatttttccctttttagggtgcccaaatcagtcagagtttaatccgcgctgccttttcgcccgatggttcgcatgtgatcagtg

SEQ ID NO: 45962 - DNA, 1838 bp, Heterodera glycines
  unsure (1)..(1838): unsure at all n locations
tcaggtgtatcncatcgacctggtgaagacgcggatgcaaaatcagcggaccggctcttaccttggcgaagtgatgtacaaaaacaggtgagtgatcggttgttgttatttgacaccaacaattgctcttttcttcagttatgactgcttcaaaaaagtgataaaatttgaaggttctacagaatttccttcctttttttacctattaatctgttcaggtgttctcggtctttaccgcggacttttgccccaaattattggcgtggcgccggagaaggccattaaactgacaatgaatgattttatgcgcgacaaattaacttctgacggtcgcatttcgctttcgtccgaaattttggctggtggctgtgctggggccagtcaggtggggaaaaccagggacggtcccagtcatatcgctggaaaataaaatctttgtataaaatatttctaaaatataattttaattggaggctgttcagaatttttaaataacttagaaacatcttgctcatttttgtaattttcatttctttgaaaattataattttgttttttcaaaataaaataaatttatttacttccattttttgaaattttattttaaattctatctttaagtttaaaaaatttccaagaagttcaaaaaatgatattttttattgtcgaaatttaataaaaagcatttttttaataatttaagaggaatttttggaaaaatttacctattaagatcgaaatctttaaattttcaaaaatttcactcaaaaaaattcttaattcgaattttttcaccgccggatcccaagtttctttttttttgccataaaaactcattcactgtcagtattaaaattttaacatttaaaattgctcattttgaggttgtcttcacaaatccgttggaaattgtgaaaattaggctgcaaactgcgggagagatcatcaacggcccaaaagtgaatgttttcaccgttctgcgcgagttgggcttcggcggcctctacagaggtgcccaggcgtgctttctccgcgacattcctttctccgccatttatttccccgtttatgcgcatatgaaaatgaaaacagccgatgaacaggtcgtatggtcagtccaatgattgtatatcaaactcagttctttagggttacaatcgcccttggtctttgtttgtctccgcttttattgccggggcgcccgccgctgctttggtcacccccggttagatttactggtgttgggttttgatacggcttgcacttttcatttaagctgatgtgatcaaaacgcggctgcaagtggccgctcggacgggccaaacgacgtacaacgggcttatcgactgctcaagaaaggtgctaacggactaacattgctcctttagacttgatcaattttctgtttaacagattcttagggaagagggaccttcggcattttggaagggcgcggcaggtgtcatttaatgttaattaatagccgtctcctgtaccaattgttttttaagctcgtgtttgtcggtccagtcctcaatttgcggtgactctcctcacttatgagctgttacaacgcattttttacgtcgattttggtggtactcggccaagcggttcggaagtctgttttttatttatcacttttttagttacaaaattcccagcccgaaataaatattcaatttgatttcgtttgacaggtttcgacccacaccacaatattggaccaagcatcggaaaacccccaccacatcggtggatacaaattggctgcagcaaccttttctggcattgagcacaagttcggcctgttcatgccgcgatttgagcccaaattg

SEQ ID NO: 45963 - DNA, 2178 bp, Heterodera glycines
caagtgcacagcatggcacgctttgcacacaacgacttcgccttctgtgaagtcacttctcttaattgcttatccattaatccctttgccaattaatccttccctttcagcggtctgtcaatgacatcgaaagtgcagcgccaaatgcggcgtttgtgctcaaaaaccgcacgcgacgtgaagcggactacgcgggatatagccccagcattttgccaacgaatgggccactctttcaggagtgtccgggtaagcgatactcttgtaactgactgttggcacacccaaatatccttaaagcgtgttgcattccgggcgaaagaggccccaccggcgaccccggcttgcccggtttacctggtgccccgggccctgacggtgcgcaaggtcgtcccggcacgacgccgaatgcgtcgtgcattcccgagcgcgtgtttgagcccccgccgtgtttgccatgccctcagggtcctcgagggcctccaggtgctatttggcattttgggacttccgatatttcaatttaaggtcaccccggattccctggagaggtaagaagtgttccaagtaagtgttcgagtttttactcagcctggcgatcgtggcataccgggccgacctggccaagatggactgcctggcaagccgggcgaagacgggccgcctgggccggacggagcgccaggacaaccagggccatacggcgacaaagggcccacccctgaggcgcacataattcctggcccaccgggagacccgggcgagacgggaccatggtgaaaacattattttcttttcaataaaagagatactttaaggggtccgcccggccatcctggacctcctggcgaagacggataccccggaggatcgggcgaaaagggatggcccgggccgccggggccgcccggtccgatgggaacaccgggactgccggggccaatgggagaggcgggccctatcggtaagagagtaaggagacaaacaaaagaaaacacctttcgaaggcactcccggcacatgcgtatgccaagacactgaagtggtgttgaccgagaaaaggccgttgtcgccgtcgcttccgccggcggagccgacgggcgacgcttacggcgtggggaaaatgggcgcattgacacccccggccttggagagcgcaaatacagtgacggatgagctgtacaagcggaagaagaagaagaggaagatgaagaagcgcatctgattgattggtcactgatcagaggacggaacggaaattggcgaatgattagagccaaaagaagcgattgactgcccgaaggcattccccggcaatgccaacaaacgctgccgtccctttgttgcctctttttccaaatcttgtgccaaatcgatctttttttgtttgctatcatttgatttgattattcgttcacttttgtgcctttccattgctcaccctttaattatgcaattcaaattttaataaagaaataggcaattaattcactccaaattaatgcacatattaatttcaaacacttttcatttactgtatttacctacagtactcgaaacatttggttaaaagaagtagatcaattttgtaatttttgctaaataattggtaaatatttttgtcaaatttacaaatgatataattaattgatgtgactttttggcacatcaaagtttgtctgaatccaacataaatggatgagatgaatacatgagttaggaaagctttaagcgaaaagttgggggccggcaaagtttgggtgtttttgtttcccgggccaatgttttttccgaccgaccgaaccaacgcccattccctcccccccccccgcccaattgctttttttgggggttactttttaacacattcaatcaaatgtggtcgtccattctcccatcctttgtttgttccttaattgtcaaaagtgtctcccctttctttgatttgtccgtgtctctctctgttccttccgtccgtttcgtttcgttttcttcggctgattggtcgtgcgcttcgccccccccccgtcctccgtctgtcccccgggggaagggatggactgtcgccgtccgtcgcccttcgtcggcgccctctgcctttgaacagttgctcatccacccttagtttctgatcatccgttgatcggttgggtcgcgcacttttcatcatttcccaaa

SEQ ID NO: 45964 - DNA, 456 bp, Heterodera glycines
atggacgccgatttgaacaccaaacggatgtcgccggaagcactgagggaccgcagcttcacccagaagagcgacacctgggcctacggcgtgctgtgctgggaagtcttcatggatggcgcctcgccaccgagagtgagtgaaaagcccaaaaaagagttccaatttttgatcatttcccccttttttccagatgctgaatggacaccgactgcaatttccccatgacgcgccgcagaagttcgtcgagttcatcatgctgcacatctgggacccgaaggacaagaaccgatactcaatgggcgcggtgtacgactggctgaagcaacacaccgaagaaggcgaagaaggacgaggaaagcgcctgaactagaatatgatgatgtgtgttgtatattgtatatttgtatgttatataaaataccaaatctgagattcgtttttctgaaaaataaa

SEQ ID NO: 45965 - DNA, 540 bp, Heterodera glycines
atggacgccaatttgctgcaaaatgtggcgacggacaacaacaacgaccgccaatttggacaacagcaaatcctgctcggccaaactttcgattggacgcaattcaaagtgagtggaagggggggggggcaaaaggaaaaatgatcattttcgaaaccttcattaaaatttacaaattctcaatggcggagtgagggtggtcaaccaaatttttaataatcgtccgggccggaaggggtcagccaaaattgactatttttttattgttttcatatcttttttgcggcgaaattggatttttgagcaaatcatacaaaaaattgctgttttcgaaaagtttggaaaaataaaatataatttccctctcccatttgtcagaatcgtctcgcgttggaccgctgcgtgtgcatggggcacagttttggcgccgcctcgtcgctgtccgcgtgcgctgaatatccgtcgctgttcaacgcctgtgtgctgctcgacgcctggctgtacccggtggaacgacgaatgtttccggcaactgtgcag

SEQ ID NO: 45966 - DNA, 3709 bp, Heterodera glycines
gcgtcaaaccctggccaatttgagcagcccgatcaggatttgaactggcgccagggccaacatggctcgttggccttccctggccaagtgtgcatcggcgccggcggcgacaaaccgatcgaaaatgcctctctgactgtgtacgggaacatcgccacgaccggcaacatcacacgcccatcggaccggcgcgtgaaggaggacattgccgaggtaggccgtgtgcttgccaaggctcgagactcgcatcagttaattaataattgacccacttgtccaggtcagcactgccgaagcgatggcccgggtggcacagatgcgcctcgtcgaatttgcctacaaaccggacattgcccaacgctggggccttaccgagcaggacaggcaccgggtgggcgtcattgcgcaggcgagcatttgatatacattcccaatgatcagtgctcttattctgatcggccttttttaggagttggcagaagtgttgcccgaggcggtgaaagacaacggcgaatttcttacggtcgatgacactcgcgtgttctacgatactgtagcagcagcgcaggaattataccggtgggagaaaaattaagagaaatgggcaaataatcagagaaatgtgaacaggttttaaactgtggaatgaccccataattatgcttattttttgtaacaatttagtttgaccggcaatttgggcagtaagcttgaccaggtcgagaaaatctcgcaaaaattggcccgctacgcacagaaacggcggcaactcggctcaatggcatcgggtgagactattggatgcttaaaaggatgtaattttaatacaattatgtcttttaaggcctcagcgacttctccactttctttggcacaaaatcgctcctcgatggtgccggcattggcggtggtgcggacggggacaagcaaagctgcgtctcctattcccgcacttcgcttgcgtcggccgtcaccacaatgccaacaacgacgcattacgacaacgacgacattgtgcaagaaaaggcgaagaaacaacacattggcagtggcaaaaggttgcccgacagtcacataaaatttaaattcaaaatttggcgccaaaaaagcattttgccaactctcgaaccattggataattgccaattctcgaaactcgaatccgagaacaattaatcttctgtgtgcttttttcagtcgaagaccatcatcatccgaccgttaccatcatcgttgtcgctcctattcgtcggcctcggcatactgtaaccggtcccattacggtggcgctggtggaggcggtggtccgtgcactcgtcgtcgattcgccgttgtgcacctcaaagttcactcagggcacaattgtaacgcttgtgatcatcatggcactttggtaaggatgatgccttttttgtaagatatagttttgaaaattgaaaacttttataacaaatttgctaaaatttaaaaaaattaactcaaaacactcaagtttggttcttttttagcaaaacaataataaatgggctattaagggcaaagtataaaaatacgaataaattatcctttgttattgtaaaatatgccgtgctttaaaacaattaataacctttaattagttaatcaattatcttcctcctaattgatcgtactgttacacaccttcgttcagtctggtcacaatgtgcacactgtacgtgatggactggtacaaccgtacctacgtgtttcccgtccgtctgatcgactcttacaacggcttgccccaccatcatcaccatccctcgtccccgtcctcgcctgattcggctgctgctgaccatggccggcaaccacaccagcagcaaattgagcccggcaaaatggtcaagccgtttgtggagtggaaattgcccgatcggccgcagaatgtgccgccgttgaccgtattctgtggcggcgctggcacagtgatggcctcactctcgtcactaattcctggtgacacgagaataatacgcgcattaattagcactaattggatactttacagtaccgctggttggccacggcacctgtccccattactgttgcggaataaacagcaaattggcggctacatcaaaagagaactttggtgaaaaactgtcgaagagtgtggacgaatgggtcgcattggcgtcaaaagtggcggaaaatgttgtgcctccggcgccacaattacttctgacacaagtgaatggcaaaaaattataattagataattacaagcacattgtatgattggtatatgatcaatagaggaacgaattttttggcgcatcgattagccattcgaaatgttggattaaacaaattcaaaaaaaaaagtgtttacactccaaaaattgcaaattttaatgaattgacttgggttttactttttttatattaaaaattaatcaaattttaaggatcagcagaacggaataggtcaaatgaacactttggcaaacggagcaaaatttgaggtaaaaaaaattatatggatttattcatctctgagttgattgaattttattattattttgtaatttttttcaaagttttttgctgttttaaatttataaaaattaataaaaaaaaaataacatttttcaaaaaaaaaactgacccattaataaattaatgcctaattgattttgaaggtgctgaatatgaacttcaccatcgatgcgcgctattgcttcaacgaaagttgcgatgcacggaacggttatttcaatttgtttgtgccggtctctgaacatttcccgaccattccgctgcaaatacgcattaggtgaaaataaaacgattaattaaatttattaaataattttaaatttctaatttagcactgatgatttgacgctatttgttgatgattgtggcggattgaacggcttccaatataagccatgtcaacaatatgggaacaaacagcttcaactggaggacgactcggaacgaagtcaaccgccggaaacgaacagagtggggaacaaatccaatcatcattattggcctaattagcaacagatcatttaatatgggagacattagccaaaacgatcgtccaattaatcaatcaataattgttttttgccattcaggtgaccgaaaacattttcgaactgtcggctgcctcctttttacagagcgcatacaggtcaaagaattatgttctgtgattttcaataattatcccaggaggtactgccggatgactaaatccttaaatttttaattttttttgctaattactaaaagtttattagtcgcccactatgactataaatttgaaaaattattaaaaaaaatttgagagcaaagtgcaaaaaaggctttcggattcaacttttttttagcttttaaattgaaaaaaaaatatatattaaagtatcatatagtatatatattaaagtatcatatagtatatatattaaagtatcatatagtatatatattaaagaatcatatagattccgcatcggacattccgccaacctttgcgaaagggacgagcggcaacgcgggcgcgcatttgacgaatacaacctgttcttctaccgaacatgcgcactcaaagccaccgcaacagcgacggaagcggagaatggtgctgaaacgcgtagcagaacgcggacggcggcagcggaaacggcgaaggagggagcagcacaacagaacggtggtggtggtgttgctg

SEQ ID NO: 45967 - DNA, 1932 bp, Heterodera glycines
ctctcttaaggtgtgctggtctacgtgaacaatgtggagcggggtcagcccgaggtgtacgttgtgctggaagaagctcagatcggggtccgcatcagagagtcctacgcggtggacattgaccgtatgccgatgtaccaagagtccatgggcatgttggacattgccctgtcggtgccaccgcagtacggcgtggtaagtttgaggagtgtggcaatttgtttgttcaaaattttgaatttcgacagcaaccggacggggacaaaacgcgggagcaggagacacgccaacgttacaatttgccacgggtgtccggcctgatgaggccgttccccgacacgtccaccggctccatttactcgaccctgacactgaacgaagtgaactcggaggcgatacggcaacagatcatcaactactgtaggtttttcaattatacagttagcaaaattgttgggatactgtaattgtccggttactgtaacaggaaaaggaaattttggcatcttttgtgtgtggcttttgaattgacattggcatatttccgcagatcgaatcccgggctccggcgaacgcttcacggactatcagcagcaggcgttgaaccaattccaaatccccaccgacaacatgttcaccaccagcaaggaggaggacaagaagttcgaggcgttccccgaggcgtccatcaaaagtgagcccatctacaaaacggcggccatctacgaaacgtaataaataataggggaaaaataaacaaactatgagggggaacggacaaatgatccatccgacttaggcctcagtatcgttttgtgcctcggaccggcgctgtgctaatgcaaatgctgcagcagtgcaacgatttggccaaccgagagacaagtgagtttgacggggagggcaccagagtctaaatattgccaataaaggccgttgggacaggggtatgcgaaaaacaaaaaaaaattttgacgaaaacgaaaaaaggacgaaaatttaaaatttttaaattcaaaaacgaaacgaaaatattttgatggacgaaaacgaaactgaaaaagtgacgaaaaaagaggacgaaacgaaaacaacacgaaatttcgcataccctttggttgggactaattcttggtctaaacacttcgcgtcatttccaccgtctcggttctcgggataaattctcggtcttaatcttggggccaaagaggcttctcattattgaagccatttctcggctctcgatgataaatcatttctttaatatttcacatgacctatcaaagtgtcaccttattcgggctgtctcctgctgctactgatacccaactgagtacagcttgaactcttcagttggtcttcagccgtaccaaggccaaatgtactgggactgggccagccaatgcccggacaatcccggaaaaatcttgcaagaatgtggtgacaatgtgccttgtctgtacgattacacgctgctgaacgcggaagtgttgggcaacgaagtgaaggacacgtggaacgcgttcttccatgaccgttggtccgccattcaaaattgtacggcatttttggcgcaaattccaattttaaacggaatgccaaatttgttgtaatcgtcttgtccctaatttgcgcagataacagttgtggcccgatcaacattgagtacccggaatatctgatcaaaactccggcactctcctccggctacctccagggggacattgcgcgtttcgagtgcttccaaactcactggatcaaaggggatgccgagtttaaatgtgatgaaatacgatcaacaattaaaacatgggatatgagctttttgactcctttgattgggccagggactgatcaggaacaatctgatgaaatttatactgccaaattcgaattgataatttaataacggtcacagtgattggatcaaaa

SEQ ID NO: 45968 - DNA, 799 bp, Heterodera glycines
atgagtggaaatgctgaagaccatggctgtgagtgaatcattggcatttaaatttattgttggttttgtttatgtcaatccattttttcagatgcaaataatccctccgatatcattcgtgatttaaatgtcgaaaagaaaacaaagactgtctctgatgtcacgaccaatgagcagattgatataaaaccgaaaattgaggtgcgcaaaagctacgaagagaagaaaaagaagcgacaccattactcatcggaagaagaggaagaggggacggaagaaaagaagccggaaccgatcgatcaggaacaattgctggtgaacatgcgtgaggagcacaatttgaagttcaagaccggcattctgattggtcttcgagcggacgaacacataaaagtcggcacaactttgaagtttcgggcttatcaatcaattacctttcagaaaatgtcagcgatggttggaggaggagaggaaaaaacttttgaggcttttctgaaaggactggatgagaaaaaacgaagaaaattaatgaagtaaacacatggatgatagttattaatgtacaaaagtcaacatttagaaaaatcatgaagactgaagtgagcgatgactccgatatcgagaaggacaaaaaacagcgaaggaagcaaaagaaggaggaaaagcgcaaggcggacaaaaaacacaaacatcgcaggtcgtcgagtcgggagaccagcagaaagcggaaggaggggaagcaccaccgccactgaaaaggggaagcggactcattcttcggattgccgccatttgtata

SEQ ID NO: 45969 - DNA, 778 bp, Heterodera glycines
cccgaaatgaaatacatcggaaatatgcacggcaacgaggcgatcggcagggaattgctgctgcgattggctcaattcctctgcgacggatggcggcaaggccaacggtcggtggtggagatgctcaattcgaccaacattcacattatgcccagcatgaacccggacggtcgcttttccttttgccatttggcaaaacgtttcatcgctgtcgcccattttaggctttgagttgacgctgaagacaaagccggaacagcgcggatgggtgacgggtcgcacaaacgcgcacggggtcgacctgaacaggaacttccccgacttggacgcgatcttttacaaggccaacgcacaacggctgccgttctttgaccatttgctggaagtgttccacgactccgacaacggccaacaggcgagtgacagcaagaaatgtggtcaaacagagcatttggtgctttagtttgagcccgaagtcactgcagtggccaattgggtgctttcgtggccttttgtcatttccgcaaatctccacgagggcgatttggtgagtcattcatcagcaggacttcggaatgttcgtcgtttcacaggtggccaattatccattcgacgaaagtctgaacccgaacgaacttcgcgcctattcaaagtcgcccgatgacgtcacttttcggttagtttttggcacttttccttgggtttttggtttagcctctgatttaaattgttcacaaagatacatcgccgagacttacgcccgtgcacacgcgcacat

SEQ ID NO: 45970 - DNA, 2111 bp, Heterodera glycines
tacattattggtatcattggcaagcttatcatgtttcgaagctatttctaagctatcgcttcgcgattagactattaccaaaaaagttatacatgaaagttgcgaaaaagccgaaattagtcaaaattttgaagttttttcttagtaaaattttttccagactagaaaatttttaggttttttgaaaggctaatagagcatctgaagagctttcgaatgataccaacaatgttggatttggatgcaaatgaaaaagttatagacaaaaacataaaatatttttgaaaatctgtacacagataacatataagtaagtacctttgatttgactgactaacactcctgttaacccttcgtcttgcatattatttattaataacaagcacttacaaaactctcgtccatgaccatgttcatctccaattccacacattttcatcagatcctcatcctcatcatctgacgacgaaattgatcggccctccatttgattcaatgttctttgaggaaaagacgattgtgctgccatttataattagaaacctctctctatatgtaaaaaaatttttggcaaaaaattgtgtatttgaccaaaacagtgaattaaaaagaaaggaaacgataaaacaagcaaacgcaaaaacaaaatcaaaacattattcattcacagaagagaaaaaggagaaaaagaaagctaatttgtaaggaaaagagaaaagaaaacatttaaaaagaaggaatttaattgaaagaaatggagagagagagagatagaagaagaagaaaagggagagaaattaacgaaacgaaaaagacacgggacaaagcaatttcttgtggggttggaaagataaaccaagcgaaataataaaatttctataatctttattgaacataaatttaaactgtgttttttagcttttttatgaatgtgggtcttaaccaaaaaagaatgatgcgattttccttcactagactcctaatggaccctatcagccaaaaggtttcgcccaattgtaacagttctattcgaagctttctttttaggcatgtctttgcttcgccgtttccgctttactgatggcctttctgatctattcagtgtcggtaacccgttctttggtccttactggacttgcttggctctccgttttctcactctttgtcattttttccacaattgtcgcttttatctgtgctgccagttcgtcaaataaaaggtcactcactcgtattacaaacatttcgaagctcattaagatcttgaaatatttcaggtacacttttggcctggctcgagcacccgttttggccgttttctccaccactgttctagctcaattatccgctgtgtttttgacaaaagaggctgttgagcggttatttgattctgggcaacaccatcacaggtatttttgtaagtgttaagttttagtaacaaatgatcttaacagtcaccacggaggcgatgccgccccactcagtggcggagatattttgaaaactgaatatttgttctatccagcggctcttgcctcctcttccacaatgcttatagtggcttacgcactcgctaaccaaccattcaactacgtgcttaagcatgcccaatcttcggtgatccaggtatttgtataaatcgatgtttttcagtttaaatttcaatcaccaatgtttgtctaggaacatttcgctgatatttgtgcggcagtttgttatttcgtgccaggattggcccgtctgttgttgccgcgcattaactcgctgactttgttggcatttatatccacttgttgtgctattttcgtccattggtttcgtttggaattcccttgggttgactctgtcgcctcaatggtactttctttcacgattttcacttcaatggctccgctctcttcgtataccggacgaattcttttgcaaactacgcctcctcatgttcaaaatttgattgacaggtatttcaaatagtacttttatatttgatttctaatttttaaggtctatttccgaagcttctacaattgatggcgtgctcgagttgattaacactcatttttggcagttaaactttaatacgatcatcggcacagttgacgtattagtaa

SEQ ID NO: 45971 - DNA, 772 bp, Heterodera glycines
atgatgaccattcgaatcagttggataaagcaattgacgttctggaaaatggtcaaaaataaatgggttagaaatttcaactgaaaaatgttttgttttatatttagggaaaaataatatgaaaaaagaatattttattaactcacaaaggatttcagaatcggataatgttcgtgacttgggaattataattgactcgaaactgaatttttcagaacacataagcaaaattatacgaaacgcatatcttagaagctttcagattttgagagtgttgaaaagcagggaaataaagactctaacagcagcttataaaacttttgttcgacctcaattagaatacgctaccgaagtttggaaccctaatttaaaaaaagatatagacaaaattgagcgggtacaaaaatttttcacaagaaaagcttttcaaaaatgtggatttgtgtacaaaaaatatatggaaagacttaaaatcactgatttacacaaattggaagaaagaagaaaaatcaatgatttaacaacagcttttaaaataattaaaggattcaccagcctagaggctgagcaaaatttctttttctcagaaaggcccaggaggcctttacttttacgggtaaagcgccacacggccaaaactcaaaataattttttccataggatagtaagaaactggaataaccttccagttttagcggtgcaaattaataaggcaaaggaattcaggggtttactaaaagcaatgagttctgagtaggaaatttctgtgcca

SEQ ID NO: 45972 - DNA, 582 bp, Heterodera glycines
atgtccgctgtttctccgtcttccgttgtccatttgggccttccccgtccggtcgatgcgtcccaacttttctctttggaacgccatttcctccccctgggcaaatgcggcggtcaccccgcgtggcttaaccccgccaccattccgcaaagtgcagaattggcatgccaagtgaattatttgcccaaaatatatctaacctccccctttcctttttgggtttgcggctctccgatggcatttctgctgcaagtttattgtcccgacgaaccctcccacgcattccatcgcaccattttcattttcgtctgtcggaaagggaattgttcaaaagttgggactctttcatttattttctcccaattaatttataaatgccatttctctttccatcagataaatgccaccccaaatttcgccgcctttcgttgccaattgtcccgtgaaaatgcttttttctccgctgagtcggccctttgtccgtccgttgtcggcgaagtgtccgagcctttcttcgacccctcccttttcgcgcgcctttgctaaggtgcggttgtcgcgccgccagccgatgcgcgcgct

SEQ ID NO: 45973 - DNA, 544 bp, Heterodera glycines
atggtcgtgtcccgtcaattcatcgccgacatcgcttcctatttgagtcagccttcgctgaacaccgcactgatcaaaggcattggcgaggccgtgctcactcagcttcatgtcggtttattccgccattttgtcttgatcaaattgctaaaatgcactaattgtccgcctcaggcacgtgcacttgcctacgaggagcagagcacccaaatccgcatgattctggccaatgcgcttgagcgtgaccgccaatttgagcaatccgcgcggactcttatgggcataccaattgaaactggtcaaaggtgggaattcttagaaatataaatacgaaatttcagattttcattttgatttttaataaaacgaattttttatttgaatgtgtaggggctatcgccacgaattcaaaatggaactgtacttgcgaatcactgagctgtttttggaggccgacaatgtcgaggaagcggaccgacacgtgaaaagggcctcacttttgcagcaggacgtgaaggaggaggccctggtcatcaaatacaag

SEQ ID NO: 45974 - DNA, 867 bp, Heterodera glycines
gagatgaaagtcaattgggccattcagccgggcactcagcagaaaatcgacaccagcagttcgttgctacctttttaactataaaaaagaaaagccgccttttagaacatttccacatttttgtcggagatctttcgcccgaaatcgacaataaaactctcaaagatgcttttgttccgtttggagatgtttcgttagtcattttttaaacatcattttcttgtttgccggtctgaccacaattcggttttagggactcaaaagtcattcgcgacccgaccactttgatgtccaagggctatggctttgtctcttttccaaagcgcgaggaagcggagcgtgcaattgagcaaatgaatggccaatggctggggcgaaggacaatccgaactaattgggtaaacggaatacgaaagatagcggactctttcacggccacccaaacgctaatatttgaaggccactcgtaagcctggcgcaatgggcggtggagttgaatattcgagcaaaccgacggtggacgaaattatggcgcagacgagtccagaaaacacgtccgtttatgttggtggtgttcctcccggtgcgacaggtcgttttaccattttttcaatggaaatttatcatctttgtcgttcagaggaagacatacggtcgactttcagacgattcggaaacatcgtggacattcgctactttaagccgcaaggatacgccttcgtatgttccaaatttttttgtgaaatattttcctattctgtgaaggtgaaatacgagaccaaattggccgccgggaaagccatccacgaaatgaacagcaacgaattcatgggccaaacgcttcgtctcaattggggcaaagtcgat

SEQ ID NO: 45975 - DNA, 299 bp, Heterodera glycines
atggaccagcgctccatccaggagttggcccgctcatttggcattccgttcattgaaacgagcgcaaaaacgcgacggcacgttgacgaggcattccatgtgaggaatttttgtaaatttatcaaataattttttttaattcgtaaaatttagacaaaccaaatgaaaacattaagattacatttgtattttttgagtttttgaaaaattaattttttcaaaaaaatatgcctaatttcctatttttctgaatttcatccccttttcaggcattggtgcgcgaaattcgtaaacacaag

SEQ ID NO: 45976 - DNA, 559 bp, Heterodera glycines
aaattatgaacgcgatggagcaggactttgacgagaacattctcagaaagtgggtagtaattgcgtataatttgcacttggccatacaacaaatgttctcccccgctcccgacagattgatccgaaaatttgacgcggacggctcgggcaaattggaattcgacgaattctgcgcgttggtgtacactgtggccaacactgtggacaaagacacgttgcgaaaagagctgagagaggcattccgactgtttgacaaggaggcgagtaaaattggaatggcatgggcagatgaagcactcataattattattattcatccattggccggatgctaattgggcctttggcattttgctataattggcaccgtttaatatttccaatttcccctcagggcaatggttacatttcgcgccccacgctcaaaggactgctgcatgaaattgcacccgatctcagcgacaaggatttggaggcggcggtggacgaaattgacgaggacggcagcggaaagatcgaatttgaggaattttgggaactgatggcgggcgaaacggac

SEQ ID NO: 45977 - DNA, 1865 bp, Heterodera glycines
gttttcaacagaggcgaacattcgctgccgcggtgcccaacgaaatccctgtggagccgaacaacgggcaacagcctgacctggccaacagcaaggttaaatcgtagtccctcgtctatcaaaatttcaattttctcaaaaaatccgactctgagcccactgttgtcttttggcagaggctcaaagtgcccaaaagtttttttcaaaagaattttttttcagtgccaacgttctcattcatggctaataatgtgtatttttgtaaaaaaaaaattcaaaaattagcgtttgtagggtccagacaagatttgccaattttaggggcccaaactctcaaaaattttcaaaaaatttatttttctttgagtgccagccaacaagcccattgcttataatgcgtttttgtaaacaatattaaatttttttttgcctttttacagtcgaaacacactcaatttgcatgggaattgcaaattttgtaaatattgtcatttttaggatgcaaaacccaccgagtcgttttgcatgaatttgttcctgggccgtgcccagcttggccaagtgtttccctaccctttgcggttggacgacgagcagcgcgaaacgctgcaaatggtggtgacgccgagcgccaaattcttggacgaggtcaacaacccggataagtcagtaccgagtaggatcaaaaaaaaaaattatggaaatttaaaatgaggagcatccaaaatcacggagtttcgcatattttagtggttggaattctttggcgtggccagaaatatttcaatttccatatccccccccctcgcccgaattcctcaaaaaaattttaagaaattctcaaaaaaattcttagcaaaattaataaaaataaaaattctgatactttcgagcgattttaaaaaaaatttagtaaagcattataaaattgaaaaattcgccagaaaaattttcaaaaaaaaaattttttttttcctaaatttttcggttggattgggtgttttaccgtaatttaattttttgatttgcttttaatttaaaatttccattttcctaccccccccccccccttccccaaggaatgatgaacatgccacaattccgcgcgaagtgttggcccaatttggcgagttgggcgcgttcggtgccttggtgccggagcgatggcacggcgccgggttgaacaacacgcaaatggcacggcttgccgaattggtgggcgccagcgatttgggccttggcgtcaccatgggagcgcatcaggtggaaaaagagggcataaattaataaatttgaagcataatttgcggaagcctttggaattgtacactttccatcgaaaaattttaaaaaaagcaaaaacttttttgaaacaattttcggtttctttttttgttcggaaagctattcaaaaaagcttattgatcttgcatgactttttttttaataaataaagaatttttcaacattttttttggattgaaaataaatacaacccgcgcaagcggactcgaacccaaaccccgctctctcggcaaacctgcccacaccccacttagcaaaaattttcagtcaattggctacaagggcattttgctgtacggcaccgacgcgcagaaggacaaatatttgccggacttggccaccggcaaaaaatttgccagtttttgcctcaccgagcccagctcggggtcggatgccaatgtaaattttttttaaaaccggactgcaaaaaaaaaaaaaatttccagtcaattcgaacccgagcggagaaatcggcgtgcggcaaattctacacactgagcgggggcaaaatttggatcagcaacggaggctttgcggacgtgttcactgtttttgcgaag

SEQ ID NO: 45978 - DNA, 1164 bp, Heterodera glycines; identical to SEQ ID NO: 26141

SEQ ID NO: 45979 - DNA, 881 bp, Heterodera glycines
atgcatttgattaacttaatcgccctctttttcatgcttttcggtaagtcaattgtttaaattcattagcgggataattgggtaattattttgctaatcgtttccaggcccatccgtccagcaatacacaaaaacgccgacgaatgaggacaaagaagcggctgtcaattgtcacaacaaattccgatcgcaattggctctgggcaatgccgacaataaatcggggggcaaaaaaatgccaaaggcgggcaacatgcgcaagtttgaatgggacgaaaacttggccaaacttgcggatgaatgggccaacaaatgcacattatcgcactcgtggaacggctgggcaggcgaaaatttggcaatgaatggcggaacattttcgaacagttcgatacaaattgataattgtggctactaattgcctgcttaagaggatggcttcgagtacgcttgcggtcgctggtgggacgaactgaaccgttacgggttcaacccggatctgattatgaccggggaaaacttcagtggcatcggccattggactcaggtgaccaactcattattttggcctttctcgtcccattattgctaattagatactaattagttttctcttcgttttgttcagatggcgtgggccgacaccgaccgaattggctgtgccatggcacaaaactgcccaaataccaattggaaaacatatgtggtctgctggtattacacggggtaataatcaaccactgataaaacataattagtttactaataccccttttagtggtaattactttggtgcgcctgtctatttggccggggagccgtgcagcaaatgcaaagcaaatgacaaatgtgacaaagccacgggactttgctctcaatga

SEQ ID NO: 45980 - DNA, 863 bp, Heterodera glycines
gagaagattcaaaaatccggcagctattatcgtttccattgtgcataaagaatacagctattggcattttctcaagcgttacgatgagtacgaaattgacgaactcacaaaatataaagccaaagttgtgtatttgactgtgttcgaatgtggtaattagtaagtggaaacgaaaattaaaacttttttttattttaaaattttctattcaaaaataataattttgtgttttgcaatttaaattatttttttttaataatttaagcctaacattggatgatgatttaacattgcgtctgaaaggtgatccagttgctgttgtgtacgcaaatgttgtgatgactggtcacaaaatgctgcccgaaacattggctttattcaaaatgattgaacgatcgacagcttttgtaaaacaattaaaaatcattaataattaatttattacataattataaaattatgttaaactatactaattaattatctaattataagattatgttaaatttattccttttttctccagtattcttcaaccgtatgtgctgatttgagtcaaacaaagattgttcagcaggtaaaaacgatctgtttcaattcattcattttaattaattgacaatttaattggttcttaatttgcatcatttaaaggtgcttacgcgaccgggaatggttgagaaatttttcccgagtcccggcgaagcgccaatggtcacagcaattcgaaaaactttcgccaaaatatgggcattggataatgatgacgatgacaccaaggccattattgcggtaataaatttaaaaaaaattttttttttaatagtaatataaaattttttagcaaaatgaaacttaaatga

SEQ ID NO: 45981 - DNA, 1116 bp, Heterodera glycines
atgaaaaaagaatattttattaactcaaaaaagatttctgagtcggataatgttcgtgacttgggcattataattgactcgaaacttaatttttcagaacacataagcaaaattatacgaaacgcatatcttagaagctttcagattttgagagtgttgaaaagcagggaaataaagactctaacagcagcttataaaacttttgtacgacctcaattagaatacgctaccgaagtttggaaccctaatttaaaaaaagatatagacaaaattgagcgggtacaaaaattttttacaagaaaagcacttagaaaatgtggttttgtgtacaaaaaatatggggaaagactaaaaatcgcgggtttacataaattagaagaaagaagaaaaattaatgatttgacaacagcttttaaaattattaaagggttcaccagcctagaggctgatctttttctcagaaaggcccaggaggcctttacttttgcgagtaaagcgccacacggccaaaacacaaaataatttttttcataggatagtaagaaactggaataaccttccagtggtagcggtgcaaattaataaggcaaaggaattcaggggtttactaaaagcaatgagttctgagtaggaaattttctgtgccacatatacactatattttaatcacctgtgaatttttaacatttgatttatttttattcatttttattacggtattcattttgtattttttatttgatcatttttatttgtttgtttttggcaccatataagagcactatgtgcctttggtttgctcgataaaattaaattaaaaatacaaaaaaggcatttaccagtgtaacttttgaattagcgcgcaaaaatttacgccaattacgttatttggcgttatgagcaattttgtctaacactgggtttgacccatagtgtgggcggaacgggccaactccgtctggccaactccgtctgagccaactttgagtcaatataactcttgaagttattgaccgaatcaaacaatcttgatatcattcgaaagctcttcacaggctctattagcctactaaaaattacagaaaatttcgaactataaaaaaagatagaaataaa

SEQ ID NO: 45982 - DNA, 1304 bp, Heterodera glycines
tttttacaaccgcggaagtcatttcagtttcaacagatggcgcacgaacgattggaatcggaggggtgcgtcgatgccttttggacgccgtggccgttggggggacaacaaaaggatgaaaaagtctttggcggagatggaccgcgaacttgaagtttgactcattcgtcaatttattcatttttggcttttccaggaatatatgcgctcatcaaaacacccgcgagtgaaactgaccaaagcgacggactgattgaccattcggaccaaatcaaaagtgtttgtcgtcttccttttgtcgtcttaccaaagcctctctctcccctcacttggtcatttgctgctgatgaattttcgttgatatatttcccttttgtttgttctttattttataatggaacatttctctcgaccatttgttcattttggttgtcccgtatctcccgcttcccttccttccctttgctgtttttggaatcgttttctaaacaatgaagccacagaacctaattattgaaatatggaaagaatttgttacatgtcattgctcatttattcatttttgtgaataatgcatgctcaagcaataaaaattaatcagatcaaaggaaatggtctgttttccgccttctcttatgccgtctttccaatgtttttgtgcttcctcttcccgtctcttttgctcatctgcttttgttcgacccgtccgcgtgcgcttcgccccttcccccacgggggaacttcatttgggtcataatttcaaaacaatttccataaaactgccattattaaattagccatttgaccgtttattcaggctccgttcgcactgctttgttcaattttctgtgggcacgtaaatacaacgggaaatttgtgttgcgaatcgaagacaccgacagagagcgattggtggagggatcggagcaaagggtggtctgaaggaggaggccagaaccgactttcctcttcttcagattgagcagaccctctcccactttggacttacacccgacgaaagtccgttgcgtggtggccaatttggttcctattaccaatccgaacggttgcctctttaccgggaattggctgatcagttggttgacatcggccattcgtacaagtgcttctgcagtcaagaagtaatcatattatggcttcttggaattctggtgttgttcaactgtccatcccatcgtttagcgactcgactttttgcgtcgaaaagcgaactccgaacgcattccgttccgttacgatggcatttgtcgccagctttcgacagaagaaacgcgagctcggga

SEQ ID NO: 45983 - DNA, 966 bp, Heterodera glycines
taaaatggacatattttgcagaaaaaatccgcggagaatatcaatgccaggttgggcatggtaaccaagtcgggcaaatactgcctgggctacaaacaatcgctgaaaacgcttcgttcgggcaaggcaaagctggtgatcatctccagcaacacgccatctctcaggttttgattgccaatgccatgtggttggaattcgtaaactggtttccatttttgttaattttgcatcgcgaggaacatggcaccaaataaaaaatggcactctttgaatttaattaaaaactaacagggagaatgaccatgttggtttttaaatttctttttttgtggtaaaagtgaaaactcggaaaagtagtcaaaaactcaattttttctaattccgacctttttttttactttttttttacctttaagcacttaagatcaccaatatttttccaaattcgggccgggctaagagtttcgaattggccgaatcaaagcaatatcccaataatgagcgatgactttctcttaaacgcttgcaattcttcacagacaccacttttagaaatgaaaaattagcgtaattcttaccatgccccaactatacgggttttttacggacccgtaacccgatacgagttttacgtaatacggattttttaacccgaaacccttacccgttatccgaatacattcaaaaagatactacaaaattggaaaagtgccgaaattctccaaatttatttagtccatcccccgaaaaaattgctattttgatgagtttcgccccttcccatttagacgcagtgaaattgagtactacgcgatgttgtcaaagacgggcgtgcacgagtaccatggcaacaacatcgagctgggcaccgcgtgtggcaaactgttccgcgtttccatgctgtccatcactgacccgggcgactctgacatcattcgcagtatgccgacggaggcatgagca

SEQ ID NO: 45984 - DNA, 95 bp, Heterodera glycines
agacgcagtgaaattgagtactatgcgatgttgtcaaagacgggcgtgcacgagtaccatggcaacaacatcgagctgggcaccgcgtgggcaaa

SEQ ID NO: 45985 - DNA, 1176 bp, Heterodera glycines
cccccccccccccccccctgcgtttatccccatccgaatgtttttttaatcacttcaatttagaattcgagttgctatacatggatgaatttgtcgacaatttgttaagagaagaccattattgtgatatacagctgcctcgtctacaggttttaaaaattttttgccgattgtgtctttcggcaccgttctttgggggattttcttcaaactttacataagtctacaactttggaaggggtgagaagtatcctgttttgaatttgtctgatttctatttttgtcttttttatggacaattaatccgaatttcggggttcatactttttcttatggcttaaattctcaaaattggccattttggtgaaaatctgttatcaaaaattacacccaaaactaaatttaaaaaaattgacaaatagcgcaaaaatgtttgagatcattataaaccatggaaaatttctttttatctttgccaaaaatgagcagtgctggggggaatggattggctgcaaattttcctagaaatatttctttccgtttgaattttcacgaaatgaataaaacaaagcaattttgcataatcacaattttaagaaacggcaagcactcgaagaaaaggaccaactcgagttgtacgcttccgccttggacgaagacttagagcgtctttccaccgactccgaagatgagcaggagacgcggaaagcacggccaaatgtgagaatcgagagcctttttttgggacgataattgttagggatgcgatttttagttaaatacctaaaattttgcgcatttaatacgcacagataagcacgaaaaaagcattttccacttggttttgggtgtctacgttgagatttttttttacctatttaagtacctattctgggatttttttacctaaaaatcgcatccctaataattgtaactaaatgacagatcgtttctcggcgccgaagtcgctcgcgcagccgtggccgaagtcggagcaaatcgagagaacggagacgccgatcactttccacggatggtatcaaatcaaccctaaggacaaattgccagttggatttagaccgtcggggaggacgaagtgccgcgaaagacaccgaaagagaaattgaggagaataacgcactgagaaagaaattgggattggcaccattggagcgt

SEQ ID NO: 45986 - DNA, 632 bp, Heterodera glycines
gagggaggttcatttggcgagttggcactgatttatggcactccgcgcgcagccaccgtagtcgcgaagacgaacacggtcaaactgtgggccatcgaccgcatcacttaccgcgccattcttatggggtcgacgatgcgaaagcggaaaatgtacgacgaattcctgagcaaagttcagattcttggtaatataatgccattctgccccattcattcttctctcttttacagccgacttagacaaatgggaaagggccaatgtggcggatgcgttggaacagtgccaattcccctcgggcacccacgtggtggagcagggtaaaagagcgaaggggaagacagacggagggcaattagcgaccatttaaggacatcctggggacgaattcttcatcattgtggagggcgaagctgaggtgctgcagagaccgaacgacgacgcgcccttcgaagtggtcggaaaattgggaccctctgactatttcggtcggttttggcactcactcctccgctgcattaattaccggctcattaaaggggaaatcgccctccttctcgatcgccctcgtgccgccaccgtcgtggccaaaactctgctgaaatgtctgaaattggaccgggcacgatttg

SEQ ID NO: 45987 - DNA, 1869 bp, Heterodera glycines; identical to SEQ ID NO: 26275

SEQ ID NO: 45988 - DNA, 548 bp, Heterodera glycines
atggcactgaaacgtatacaaaaggtttgatcgattgttgatgcaaaacactgttttttccaggagctgcaggacctcggccgtgacccacccgcccagtgcagtgctggccctgtcggcgatgaccttttccattggcaagccaccattatggggccaccagaatcgccttaccagggcggcgtcttctttctgaccatccacttcccgacagactatccgtttaagccaccgaaggtggcgttcaccactcgtatttatcatccgaacatcaacagcaacgggagcatttgccttgatattctgagatctcaatggtctcctgcactgactatctccaaaggttttctttttggattagccatttaagttggtcttgttgtttctttttattaatagatgcgaatgcttgtagtgataatttaactaaaattcagagcctcaagatttttagcatattcagttctatttttgcccagcgtttaatttttcaatttagtcttgctttcgatttgctctcttctctgtgatccgaatcccgatgatcc

SEQ ID NO: 45989 - DNA, 1277 bp, Heterodera glycines
ataggccagaaaatactgctcactttgcagggttatggaaagaattcttagccaaaatatttacaactttctcctaaaaaacaataaaatttcggaataccaatttggttttgttagaaataggtctacgacaagtcaactaataacagttgtggaagattggtacgaggcaattataaatggaaaaaatgttgactgtatttatattgattttcaaaaagcatttgactcagtgccccataatttacttttatacaaattggaaaaaataggtataaggggcaaacttttgatgcggataaagggctttttgagtaataggacttttcgagttaaaattggggattctttatcctcaagtaaaaaagttacctctggcgtcccccagggctctgtcctgggccctttattatttttgatttatattaacgatcttcctgatgctttgccatcaggagtgaaaataaaattatatgctgatgatgttaaattatatatttgttataaagcaagagccgacacggaaattatgcataaagcattgcataatttattcgaatgggcaaataaatggcaaataaaagtttcaattcaaaaaacttttgtattatatttgggttcaaaaaacccaaaagaaacatataaatttgatggaaatacaataaatgctgtggatacaactagggatttaggagtaatcattgataacaaattacaattttccgatcatattaaccaaataacaaggaatgcgtatttacgtatgcgttccttgtttcgaataattaaatccaaatcgtctaagatttggattacgttatataaaacttatattaggcctttattggaatacgctccggaggtttggaatccgtctcttcaaaaaaatattaaaaaaatcgaaaagtgtcaaaaatatttcaccaaaagggtattttttaaatgcagccttccgccaattccataccaaaatcgattagaatacctgcaactgccaacacttgagaataggcgaaagctatttgatctgttcatggcacataaaattgtttatggccgaacagatctgaaactattttctatttttaatccatcagcacgctttaacatccccttttatagatttaacacaaaatacaaactgggcaaaaaattcattccctttgctgggagggtaacaaaattgtggaatcaactagataaagaactaataaaaacaaattctttatttgaacatttttggactaaaatacctgccccgaaaccgaatattctcc

SEQ ID NO: 45990 - DNA, 1051 bp, Heterodera glycines
atgacggagttagccaccaaaaattcgattactctgaagggttccgcacaaatggtccagcaattcttccattacggcattcacagcattctctaccagcgcggcatttacccatccgacaattttacgcggttacccatttaattatgcaaaaattgtttttaaatttttcttttagtgacaaaaagtacgggatgacgctgctggtgaacaaagacccgaagttggagcagtttttaaaccctctccttcagcacgttgaggtttcagacaaatttggagcgaatggaatttaattacgttttagacgatgttgaccaaacaaatgctgaagaagttggtgctggtcattacggacatttccagcaaagaagcgctggagagatggcaatttgacatcgaaacgacgccggaggggtaggaaaagtgggaaaatgggacgggaaatgccaattattgaatccatctttttttgcagtgaaaatggctatggaagtaaagatgagaagcgaataaagcaggaaatcagtgacgtgctcaggtatttactatgggcgtagacatgggggaggagggactgaagagaccattgtcccccaaacgaaaaatggcaattttgaaaaattatgccgctttgtgagtgtcgtcttcctttggacgcgtaaattggaatagagcctaaaaaacaatcaagaggttttttccaatttcttttcatttaggcaaatcacagcttctgtcgcctttctgcctctgcttgaacagcgctgctccttcgacgtgctcgtctacacgttcagggacactgaactgcccgaggtgagcagagggccaaccaatcgtgtggtatgaacaccgtggcgaaaaacagaaatgtcacagttttgcgttaaacaatgactacttttttgccaataaaaattgcttttcccagggctgggccgactcgagcgagtgccacattgacaatgccgagcaggtgcagctgcgctccttctccagctcaattcacacggtgcacacgcgtgtccaatacaaagccgacctttga

SEQ ID NO: 45991 - DNA, 621 bp, Heterodera glycines
atgcatgtcgagagcggaaccagcattgacatgccgggtggccaaaatggaaccaccatgttgatgatcgctgcggcctctggaagggtaggaaaaaaatgtgtctcgaaatatttcccatttgttaaggtggactttgcgcgctacttgctcacccgcggtgcaaccgttggacgcttggacaacaccggtggatttttgtaaaatttctgaatttttttgtccaatatttgttgttcccgtttcaggaagcgttttcgcactgatcctagctgccgagactggtagtttggagatgtgccgtctgctggtcgaggaatgggcagctgaagtcaaccagcaagcaatcgatggcacgacacctttgatgggcgcgagcagtgagggacgcctgaacgttggtgggttgaaaaaaattagaagatcgatttatatacctacctaactacctgattttctcttcattttcagtgacttatctcatcgatcatggcgctgaagtccaacacacggacgccgacggatacaacgcgctgatgcacgcggtgaagaacgggaagactgaagtggcacgacatttgctgaccaatggcgcaagcactgaccaaatgggcaccgacg

SEQ ID NO: 45992 - DNA, 10479 bp, Heterodera glycines
cgccaacacagcccaacggtccgctgcaccattacacggtgtacttcgcgttggacgacgaagcggccgatgacgacagttacaagcggtggactcggctcacagtgccattgcgggcggacggaggcggacaggtgatcacgggcgaggaggatgactggcatttgcctgactcagtcctcgggcgctgagttggcccaattcgacgaaacctaatggttcctgatagaaatgggatatccaatcatggattaatcatttactaattaggccaattaaaggggcaacagattggcacaaaatcggatttttcaggtggtgttggaccgtgagacgtacaacattctcgcgcaacgtgaatatcggcttcgtgtgaccgcagcaaacgacatgaacgaggggccgccttccgcggtggcacgctttaccaccggcacaggcgaaacgccaccgacagtggccattgtgccggcggacaacccggccgaagtgcaaccattagatgactattcggtgcgatttggaggaaaagaaacgtgattggcagtcgatcgattcaattggttagggaactgacacaaaagtgatcagtcgatgaattaggattgatcggaagccggccgggtttcagaaaaaggcgtttaggcaccattgaagtgataagtgatcatattaggtccattgcgatgccaccggtggcattccgccgcccaccctttggtggactttgggcaccgacgaggaacggcagccgggcggcgcgcaccttttgttgcgcaaattgcgcaaagatacaacggtaattaattaattttatcaattgctaattacaaaaagcaccgcccctcattaggcgacgtgtcacgcggaaaacaatgcggggaaagcgcagctggtgctggaggtgaacaataacagcttggactttgttgtttatagtaaaataacaacaaaatcatggaaattctattagtattttaactttttagtctgatttcgaaattacaaaattcagttgcgcgtcctcggccccggcacaccgcccaacgaattggtggtgctgccgatgcccgaccaagtgctaaacgtcgagtggacagcgccggacgaaccaaacggaaaggtgggggcagacaaattagcaatgacgggtgatggtcgagagtcttggaagccaaaaccaccaattctcgactaacgggagatttcagtctcgatattatttcataaagcaagagatttctgtaatccaacaaattcttgggtaaaggaggtgaaatctttgaaagacggtccacttgtgattgtaattccgctcttgactctcgtacaatttattaaatgttgagtcccgatcaagcatttgtgatttgctttgaccattcagctggtcggctacattattcattatgccgaactggcggacggacaattggagccgccgtcggacgcttggcaacaaattcgcgtgggcgccgacgtgaacagacaccgactgacagaattgagaccaaaagtgggtactgttgatcggaagagacctttctttaattatcccactcattgaatgccattgtctgtttagaccatttataccatacggcttcaagcggtctccgaccgtggcccgggtgtactgtcagatccggtgatggcacgcacattgccattggcaccaaaggcgcccgaaggtcgttaattatgctttctcgagagtaaattgcccaattgactgggaggagcaaatgatttgttggcactctctgttcagtgatgccggtgatggtgcatgacaacaacactgtgatggtccaatttttgccgtctgacgatccggaggaggtcggcaagaaggtgcagacgtacagaatacactacaccaaaggcgacccgtcgttggaggatgcccaatggaatgaggtgatcagagagaagtgatcgggggagggagaaaagaattggagaagaggggaatgaaaaagggatcagagaagagtgatcagggggagaggatatttagcttagaacccattaaagctaaatttgatcagtttggccatcgcaattaggggtgaattgttgactcattataagccaaagagaagagcattgattttaagaattctaatgaaaattgactgatggagaaagaactgatcaattgggaaagtcaatttatcactgataattaatcaatcaaagttgatttgaattgatgataaaatattcggcggagttaaattgagtccaaaaatcataaattgtgccaaaatagctaaaaaacgttttttttaatagatgacttggtcaattcccccgggcgcggacacaacaaaagaaatgaatgtgtttttggacggcgagaatttcgagccggagacaaaataccacgtgcgagtcatcccaattggcgtggtaagctcacggggattaatagaaccattcaaagccatcactgccccaagcttgaaaccaaatctcagttttggctttgaagatcaatctattctcgggattaaattattgtaaataaaagagagtctcgaaattgtgacgagaaaaaagccaaaggggggttacccagaaaaaaaattgacttttaaaaaaccaaatgagaagacacgagaaaaggaagaaaagagagaaacataacattttacgctcacaatagaaaagggttggtcatagaagaatgggacaatcctctcccattttttttctgttacttaggcagactctctaaccacacactctctcacctttcctctctcgtttcttttcctcacatttcgcacactatttttcctcacttcatgcgtatctctgcacaccattgaccaggaaaatgctccccatatattttcgtttcgttcttttcccctttcacgtaccattttgctgttccggcatcgcttctcggccttttggctaagatcaaagtgtagttacagttctttacggcttaatctccgtaacgacccccaccggggtccaagagattaaccaatttttggaaaatggtcgttgtcgggggcttgctcccgctcgaccgagcgttggcccgttattgcacttaactacgggaacggcgcatctcccccgcgggggagaacaaaatgagcttgaattttttttctcaaattctaatcgttttagtatttcgttaaaataaaaaattttataccttaattggatataccaaagcagtggttgtgatagccaaatttatccattgcagattgaaggaccgccgtcgcaacccaaagactttgacacaaaattgggcgttgtggcaccagacaaaccgatgatccacgtggacgtggaggacaacattctccgagtgccggccggcaccgattacaccgtggcatggcaagctcaaaaatggcacaatgggtaaaataatgctttttagcactgctaacggatttccggcaccgcaaataaaatgggtggacaaggagggcaatttggtgaggataataaaaagggattaaattccactagttacaccgatcactttgatcatcctggcggttcttttttgattgtcaatctgatcagatcactcatgatcagcttgtcatatccgatcactttcttaattcctttgacagatcagtgagggcggaatgcttcgcgtgtcggacattcgccaggcaaaggactttgtgtgtgtggcggagaatgagggcggacgcacggagaacggattcacaatttttgtggccggcccgggcagtgcgccggagaacatccgactggcggcgacgaggccaaaaagcatttcagtcacttgggatccaccgcaaattgccaacggaaacatcacacgatacatgtgagagcaaaacagttaactaatgagtcaacaagtttggcacaattagtgccaaacggctaggaagagattctgttgcgtaatagtcgatcacaaaaactatgatcagttgaccacaatgttccccattcagcatttactacattgcgcttgatgaccagagccgcgatttgctggtcggtcaagtgccgagcaaaccgatcagcgaatggatgagtaaccacgtgatgggcaaggacttgggagtgggcgagaagcaggcactgatcactgactttgtggaggcggacacggtaagaacacaagaggtggggagagagaagagagagagagatagagagagagagagaggggagagagttagagaagaagttattgtctgatttcggatggcattttttatttgctttttataggcatacgctgtggtggtacaagcagcgaaccaagacgggcctggcccctactccaaccagcacaagtgagtgccgttgacattaatctcggctttcccatttcgataccgttttctctcatccatgtacagtaagtattccgtctatttacagtatccggacaatgtctcgagcgcgtgccgccccgccaacacagctgcaggtggagccgatcaatcaaacgtcggtggaagtacattggaaaccggccgaagtgctggaggagtcgccgctcagttatgaggtggaaaattaattttaaaaattttaaaaacatttaatcattttccactaaaaatttatttatttttaggggccccaaaaataaaaaattaaaaaatctgatcaaattaatttcaaaaccaacgaaaaccttctagatttattacgtgccagccgagaagaagattgaagaggacgagctgctgagcttgccaaaatggtcgaaagttgaagtgcccgacccgagcaaaaacagtcacatcatttggaacgcgttggagccggacacggaatacgtcttcaaaatccgggcattgtgagtctttgtttcttctttttgtctaacttatcccacgttttacactgatttttttgatcagatatccgagtggacccggcattttctcggagccgtgcattgccaaaacgttgccggagggtgacgcgccgttcattgtcgtgtcctccgggagcagaggcactgcgggcgaaagcgtcattcagctgctgcccgtaggaaaactggggaaaagcaaagcaaaaagcaagggaaaagtcaatattaagcattaaaactcaaaagtgaaaataggaggggtgggcaaatcccaatgatctaaaaaaatacgtccggaagtttggagacggcttaaatagggattaattaatatccgaaatcacctcctcccgcccacagggaagtgattacactgtattctgccgtgccagcggaagacctcagccggcggtgcgatggatccgcggcggagacattccgattgatccgtccacagtgaaggaggaccacacgggcaccaaatggtacagacatggcattagctgatcatcccgttagccgaatatttttgtctttgtttctctctccctttctctctctctctcattcatctcttctttttttctctctctctttgtttctcactatttcctctcttcctttttctctttccgatcacttttttctctttctccctctctcccccttctctatgcttttgtttttaaggtcactgttcgtctccaacatcactgagccgtccacgttcaactgcgtggctcgcaatccgctgggcgtcgccaattggaccattcggctggaaatgatgtctgatctgtccgccgactggcgcgatcagctggtccgagtggaaagcagacggggccaaatttacctgcactttgccgacactttgcccaattcgttgcgccgtgccaaccaatggacacttcgctacacggacgacccgaacaaagagcgcattctgtggagtgtgttggagagcgaagaccgaacgttggaggtgaaccggggggggggagggtaatccctgatcagccgaagcatatcgaccccaattgatggcatactctcgggggaaatgccatgttttgcttaatccgtcggccaactctcaaaattgatgccaacttcattgccccatcggttctatcctccgaatctttggcataccctggaaaacccaaatttgtcaatttatgatcaagtccaagggatgagtcaatccaagacaaatctttggcatacaaaattgtcaaaaattaaatcatgccattcttcgttaaggagatcccaattcgcgcgccggcagcgccgatggagccgggcgtcacttattacctcgtggtggagaatgccaacgagggagtgcgctcgcccgtgttcaccattttggtgcccaaggcacccggcgatctccgcgtcgggtcgaacatcaatgacgaaatggtcggtgtttgtgctgatgttggtctccgcaattctttcatttatgccatactatttttttgtgccattttggggtccattttcaaaaatatggcaaaatgggtgtccgacggtgccgttaggcgccttttaaataggagtgtttgatccggcacttaacaactcactttctcaggtggtggacttccgtccggccatcagcggtccccagcagccggtgcgcgagtattcggtacgctattggcccgcggaagcggccaaggaggacgaagcggcaccagcggcaggggacgaagcggccgccgctgctgccgccgacgcggcacaaatgagcacaatccgcgtggagggcaaccgcaccgtcggcattcgcgtgcccgatctgccccgcgatgtcgagttctatttccaagcggtggccgagctgagcgatggccaagagttggccgggccaccggtgcgcatccgaacgccggccaaagaaattcgctgcgactgttcgcacgcgtgcaaactgttggagacggactctgtgcaggtgaaaaaaaggggggggggagggaaggaccggaactgaatttggcactggaaaatgaaataaataaaaagggaaacatattattaataaaataaaataaaaaaccataaatcgattatatatttatttaatcaaaatcattacaaaaacaattattttaaaatttaatttaatatgaatattttaatgtacataaattaattttgatgaaaatacataattgatttatggtttttttaaataacgatttcgccctttttatccactaactctctcatctttcctctctcgtttcttttcctcacatttcgcacactattttccctcccttcatgcgtatctctgcacaccattgaccaggaaaatgctccccatatattttcgtttcgttcttttcccctttcacgtaccattttgctgttccggcatcgcttctcggccttttggctaagatcaaagtgtagttacagttctttacggcttaatctccgtaacgacccccaccggggtccaagagattaaccaatttttggaaaatggtcgttgtcgggggcttgctcccgctcgaccgagcgttggcccgttattgcacttaactacgggaacggcgcatctcccccgcgggggagaacaaaatgagctgaataattcatttgcaaacatctgttaaagcgcataattaaatcccgcttcaggtgcgcgtggagtgttactgtccggacgggtggttgttggacgaggacgagaagacgtgcagccaagtggagccaaccggcggggccggcacagtggtcgaggtgagaaacaatagagcaatcgaagtaactaactgatcagcagaaaataagcaaaaatagcgcatgaaataaaccaattagaaatacataaaaagtgatcattaattcgctggagacgcaaactttgatcagaaaaatgatcaataattgatcaggcttctttccgtcaggttcagaaaacttaaaacctgataattaaaacaaacaaacatttcataatgcccattaaacaaaaaatgtgacaaattggagacaattagagcataagagttaattatgctgatcaaacgctccctaaaaaccaatcaatgaatgcatcggaaactaacccggcccattcaggtgtcgccaacattcgaacttgagcaacaacgtcccaaagagttcgatctgttgaagccgaggccaaccggcagagtgccgccgccaacgccggcgggccctgtcgaagcggagccgtacccctcactgaggccgaccgatacgttcaaaactgaggccggcgatgacctgggcgcaacagtgcacgtgttgccaacggactcgttgggccgagaaattcggccagtggtgatgttcaacggcactccgctgcggacggacgggcacggcaattattacgacgccatggaacggaaggtggaaagggacgaagagcagcgggcactcgggccggacggacaggtgctgaagatgaactcggacggaaattgggtgtacccgccgttggacaagtgagtacggcacgaaaaggggcggagaaagcataaagagagaaaaagggagaggggaagagaaagaaacggagagagaatagtgatttgggtaccgtacccactgatcagatatggacagccgatgcccactggtgccaacatgtaccccatttactcggtggtggacgacgacggcgtttcaatgagacgagacgaagaggtgcggatttggggattctccaaatagcagcacattctcattttttacggcatactttttccgttgcacatgcaaattaactttaattctgagcggcataatttaatttttatcgtcattttttgtggcattaattgataatttttctttaattgcctaatattttacaattactcaggggaaaattctcgaccacgaggggaaaccgttgccgaccgacgcttacggccaaccgatggggcccgacagttcgccattgccgaccaatttctatggccaatttgtgcttggccaacggctggaggaggaggacaaagtgttgcccaccgacacaatgggcttcccaatttacccaatcgtttatccggacggacaattgctgcccactgccagttccgggcttttcctggactcggaacgaggggacgaagtgcaacgggacgagcagggcattccggtggacaccgatgtaaagcattggcaaaaaaggacaaaatgaatggcacggggggggggaaggcaaccaacatattgtgaaggagttcaagccatgtaaatcaacgaactctttttttttcttggttttcacaacatttaaagaggggaggggacggcggtgccgataaacgccgtctgggaacaaattggaattttttaattaaaatttgtttagcttagaccaaaggatttgtaaaattcagggtaaaacgctgccaaagaatgaggagggaatgttcgtattcccccggccaccgtcggaatttgtgccggaggcggagggtgccgcggccgcccaaacgactgctccgcccattttgacgacctcttccgaagcgcctccacccccaacgtcagtgccgaaggcgacgacaacgtcgacagcgcgtccaaccgttgtggaagtgattgggccggacggactgccgttgtcgaccacgcgggaaggactcgtgctggaccgtgcgggcagtccactgccaacgcgcggggacgggctgctgatcggcgcggacgggcaaccgttgccaaccgattcgctgggccgttttatacatgtcactgtgccgccgggcggcgccggtgacggggaggaaacggtgccgcaaacgctgcctaccgacgactacgggcacgacattcacccgatggtggatcagttcggcatcgcgatgccaaccgacgcgtctggacactacgtggacgcgggtggtgcacaaattgagacggacgagtttggtcgcccagtggactcggccggccacctcttgccccagggcgagcaaggacaattcatttacacgcgtccggagggtgccggtggtggcgtcgttggcggcggcggcacattggaaccggccgcgaccgcccggggccaaattgtggtggttgacagtgccggacaaccgctggaccgggacgagcaaggcggttgggtgcgcgtaggaggcgagcgcaaaccgttggcgactagtgcggacggactgctgctgggcccggacggctcgccgttgcccaccaacgcggagggccaattcgtctacgcatggtccgctgagcaggagcaggagcggaaattggcaccggtgaccgactcgagtggacatctgctgatgccggtggttgatgcggaagggacgccgttggcacgcgacccggccagcggacgttacttggacccagcggatggcacaccaattgcggttgatgatcagggacgaccgttggaccgtagcggcaacgtactgtccaaaaacatttatgacgaatacgtgtggctggatgtcggtcttgtgagtccggacgggcttccggcacggacggcgggcggccgaatcggtgccgaagcgaccactgccacacttcacgacgatcacgccgtggacggggctgaacttgtgccgtctgatgaaggcggtccg

SEQ ID NO: 45993 - DNA, 1201 bp, Heterodera glycines
atggcattgattcggttggatttgaggaattggaacaacatcttcaagcagcactgcagcattatctcaaaaaggcatccattgaacccgacaccgacaaaagaaaactttttgtggatacggtcagtgagtggaagccgaattttaaagattatttcgtttgaacacttcaaaaattaagtgtcggattattcgagtctgtgccttgcctttatttgattgttccaatttctaatccgtaaattttcagattgccaaattcgagactgatctcgttcaattcaaaacgcgtatttcccagccagacaatgggcaatcagctgatgttcgcactgttttggtgcgcaaattgttggaaagtgcgaaggaagtgctctccgattggttggacgttacccggggaaatacggtcactaaacacgacattttcgcgaaattggccagaaagtaaggaaatccgaatatgcctttatttgagtcatgttttttaaggtatgaaaatgaatttttgtgcgatatgaatgcgttaaatgttcttgagccggacgtgttgaccagggtcagcgagtacattcccgaaatcattgattatgtgcagcaaatcatccgcaacggatacgcttatgtgtctgatggatcagtaagttttttttttgaatgcatttgatctctacagtgatccttttataaatgtttctttggcctttctttttacccaattttattccttttaggtgtattttaacactgcccaatttgcatcaaaacccaaccattcctatgcaaaactcctccccgaggcgtatgctgatgcagaaagtgcagaaaaacatttgcgagagggggaaggcgaactcagcgtgacagtggacaatttgaaagtgcgcaacaactgcacccctttttccccaattaattaattgtcgaatttattgcagtttttgtaggaaaagcgctcgccgtcggattttgcgctttggaaagcctccaaagacggagagcccttctgggaaagtccctggggcaaaggtatgtcatttattccacatcacctgttttccaatttgttttctgttcaggtcggcccggttggcacatcgaatgttcggcaatgagtggggccatttgcggggacaaattggacattcacgccggcggatttgatctcaaatttccccaccatgacaacgaaattgctcaa

SEQ ID NO: 45994 - DNA, 483 bp, Heterodera glycines
atgtccaattcttttcgaattctttccttattctgtccgctgtttctgcttctctttgttcctgagacttcacgagctctctattttcacatcgctgagactgagaaaaaatgtttcattgaggaaattccggacgagacaatggtgatggggcggtacaaagtgcaactgtacgacccgaacacgaaggcatatggggactatccaacaatcggaatgcatgtcgaagctaaggacccggaagaaaaggtcggcaccattcgctgacaaagagtgacgaatggttttgctaattaagttgggctttcttaggttattttgagcaaattgtacacgagcgaaggcatgttcacgttcacatcccattcccccggcgaacatctcatttgtctctattcaaattcgtccgcttggttcagtggcgctcaattgcgcgttcatttggacatccaagtcggagaacatgcccaggactacgagcag

SEQ ID NO: 45995 - DNA, 1174 bp, Heterodera glycines
atggcagtgcccttcagccttcaagtggacggccttatctacagagtcagaaactccacttacgggcaatttcccttagatgtaattgttttttgcttttcaaaatcgtcattattcttcccttccctttttacaggtgacggagcacgacttacgccagctttgcgatgccacgatggacgtcttccggcagcagcagacactcgtcaggattcaaccgcccgtcaacgtctgcggcgacatccatggccaattcacggacctgctgcggatcttctcgacgctgggccccccgccggagaaaaaatacctcttcctcggtgactacgtggacagaggcccccaatcgctggaaacggtggtgctcctcttctgttataaggtgaatttggaaaggcaaaagaattacggggcagtaatctcattttttaaggtcaaatatccggagagtgtgacgctgttgcgcgggaaccacgagtgcagtaacatcaacagagtgtgagtcgagcaacgtttaattggcaacggatggcactaattcaaccttgttttagatatggcttctactcggagatcgagcagcgctaccaccaagcggacactcgacggctcttcgacatgttcaaccaaacttttgcctggatgccgtacgtgggcctgatcggggacaggattctgtgtgagatcgacttgttgtttcattttgctcaaattaatttttctcttcatttcaggcatgcatggcggcatttctgacaggatcaccagcttgcagcagctcaacgaattacgccgcccgctgctcaccctgccgagcccgtcgttggagatggatcttctgtgggccgatccaatgctcgacatccgcggtgtggagccgagcccgcgcggggccggcgtcgtctttggcgaggacgtggtcttccggatctgcgagctgctcaacctcaactacataattcgggcgcatgaggtaggcagggtggacagatttattttcttcaaaagtttcccattttttcagctggtgcatgagggcattgaatattttgccgacgaacgtcttgtcactgtgttctcggtgccgcgctaccacaatcaaatgaacaccggagcagcactaacaatcgcggaggacctgagccacgacgtcacattcttcccgccaaattga

SEQ ID NO: 45996 - DNA, 1412 bp, Heterodera glycines
ggaaatatgctgattggcgtccccgggggccatgacgggccgagtggagtgatcgtttgctgcgagaattatttggtgtacaagaatttgggcgatcagccggacattcgttgtcccattcccaggcgacgggtaattgccattgcattttcattttgcatcaaattgccaacattcagaatgacctcgacgaaagtgagcgtccgattatgatcgtttgtgccgctacgcacaaaatgaagaatttgtactttttcctggtccaatccgagcagggcgacgtgttcaaagtgacgttggactccgatgccgacattgtcaccgaaatgcgcatcaaatatttcgatactttgccggtggcaaattccatttgcattttgaagaccggctttctgtttgtggccagcgaattcgggaatcagtgagcacaattcattaagtgtcactgtcccattttttaattggttttgttgcttttagccatctctaccaaatcgctcatttgggggacaacgatgatgagcccgagttctcttcacggatacctctggatgagggagaaacctttttctacgacacacgcgggcttcaaaatttgatccttgtcgaccaaattgacagtctcaacccgatgatcacttctcacgtgccttttaatgcttttccaacttttggcatatgttatgttctttgttcccttaagatcgccgatttggccaacgaagatgcgccccaaatttacgcactttgtggacgagggccgcgttccacgctgcgcgtgttacgcaacgggttggaagtgtccgaaatggccgtctcggaattgcccggaaacccaacggcggtgtggacagtgaagaaaaatgtggacggtacccatttatttttagtggaagaatttcgatttcatttgattttcagaccctttccatgctcacatcatcgtttccttcacaaatgccactttggtgctgtctatcggtgaaactgtggaggaagtgaccgactcgggctttctcggcaccaccccaacccttggctgtggtttgattggtgaagattcattgctccaagtgtacccatccggaattcggcacatccgtgctgatcggcgagtcaacgaatggagagcgcctccaaaacgaccaatttcaaagtgtgcgatgaatcgaagacaggtgagcggaaatatagacatccttactaaaaaggaaactgttgtgcttttgaaggtcgtgatctcactgcttggaggcgaaattgtgtactttgagctggacatgaacaaccaactcagagagtattccgagcgtcgggagatgacttcggaagtgttgtgcatgagtctgagcgaagtgccggagggggaactccgctcgcgatttctcaccgttggaatggcggatcggaca

SEQ ID NO: 45997 - DNA, 1931 bp, Heterodera glycines
atggagaacgctcatacgaaaagtgaagacgaattgtttcggtttttcggcacagggccagacggactgacagaggaacaagcagacgaattgcgggataaatatggctataatggtatgaattggggacaatttaggtaattgttaaaattattacatatttaattaagaaatgcccgcggaggaggggaaaaagctgtgggaattgattctcgagcagttcgatgatctccttgtaaaaattttactcctagccgcaataatttcttttgtaagtttttcctttttttatttgtatattttggcttcgcttcacttccctctcaggtccttgccttgtttgaggagcacgatgaccagacgagtgcagtcactgcgtttgtggaaccttttgttattctcctaattctcattgcgaatgccacggtcggagtttggcaggtcatcacttttttatcatttgtttaatatacgaatagaaaaagggaatttgcaattaaaggagagaaatgcggaaagtgcaattgaagcgctgaaggaatacgaaccggaaatggcaaaagtcatccgagcgggcaaacacggcattcagatgatccgtgcaaaggaactcgtcccgggcgatctcgtcgaagtttcgggtgggcatttggaaagagaagcaaattgtgccaaatttcaattttctgattaattgttatgatacaataatttgaagatatacagattttctcaagagatttcgtacatttaaattccgttcagttggagataaaattccggccgatttgcgacttgtcaaaatttattcgacgaccattcgcattgaccaatccattctgacgggagagtctgtgtcggtcattaagaatttggacgtggtgcccgacccgagggcggtcaaccaggacaagaagaactgccttttctctgtgtgtttcctttattttttttttattttcccttccctttggccttagggcacaaatgttgcgtcaggcaaagcccggggaattgtttttggcaccggactaagtacggaaattggcaaaatccgcacggaaatggcggaaaccgagtcggacaaaacgccgctgcaacagaagttggacgagttcagcgagcagttgtccaaagtcatttccataatttgtgtcgcggtgtgggccatcaacatcggtaggatttcaaatttcgattaattaatattagtgccttttcaccccttatttgaccccaggccacttcaacgacccggcccatggcggctcgtggctaaagggtgccatttactacttcaaaattgcggttgcccttgccgtggcagccattcccgagggtttgccggccgtgatcaccacttgtttggcattgggcacccgtcggatggccaaaaagaatgccattgtccgctcgttgccttccgttgagacattgggctgcacttcggtgatttgttcggacaagactggtgaatcaattccaatggccccaccacaaaatgtggaaatctttaatgctcaattaaattacatttaggaacattaaccaccaatcaaatgtctgtgtccaaaatgtttgttgttgaacatgcgcacggcgaccaaatcactttcgggtaatgataatatacattttgcaattccctttaaaacggttggtttttatttgtttttttcatttcagcgaattcacaatctctggctccacctatgagccgactgggcaaatcatgtacaacggagtccaaataaactgtgcaaccgaccaacacaaagcattgacagaattagccaccatttgttcactgtgcaacgactcttccgtggattacaacgaagtctttgagcaatttgcttaaaatatatgaacatttcaattctttcctctcagatgaaacacgcttatgaaaaagttggggaggccactga

SEQ ID NO: 45998 - DNA, 955 bp, Heterodera glycines
atgaaaaaaaaatttgtacgttgatttgtacaacaattaaaattttattctatagctaattgtcggaattaaaaattcttttaattatttccttttcagttgctcgcccgtcgtcggcatttgatggatcggatggcacagcgccgggagcgtctcaaggagtcctaccgcctgcacagctttgaccgcgactgtgacgaaatgctaggatggatccaggtgaagctgaagacagctaaagaccaggtcaaaaaatttattaaaaaatgatcaaaattttctggtcacttcttgattttttccgatcacttagtctgaactggtcgagcgattctatctctctctcagcctttgggtttgagtttttcagatcaaatcagaaattaactgctctaacagattaagcaatcataatcattttaacttaaatgattattcttccctttttgcagagctatttggacccgacgaacattcgcggcaagttgcaaaagcacggcaactttgagcaggagttgcgcgcaaatcgcaaccgactggacgaaaccaatgcccccgggcaagaactgatccaatctgggcactacgccaacgaacacattcaggtggggaaaagaaaaataaaattaataatataaggggtaaattatctgatctaatgaatttttctcccacggcgcctagttttaaaaaataaacttgaaaagatttatttccagaaacttttttcgggtttctcgttcgtcactagtactggtttaaaaaattgtttatcgcttttgtaaagttaggaatagctcttaaacatattgctttaaaaattaacatctttcctttgttatttgcaatcaaaattaggatttattgacgattttgcctgtttattttgagtgttttaaaatttttcgagttcgcccgcttaaaacatccttttcataaccattttgtgcatcta

SEQ ID NO: 45999 - DNA, 1143 bp, Heterodera glycines
ttggataatgttctccttgacgccgaaggtcacatcaaactcactgatttcggcatgtgcaaagaaaacattggccctggcgatggcacttcaactttttgtggcactccgaattatatcgctccagaaattttgatgggcgaagagtacggttttagcgtcgatttttgggcccttggtgtgcttatgttcgaaatgatggccggaaggtcgccattccatctcccaacaacggaagaggacgaacaaactgctgaggaccttctctttgtgagtttttgctggaaagggcggggaattacgtgatgggtgttttacgttcgccccttccccatatcattttcctgaatcagtccctcgaatttctcacaatcagtaaaaaaaatttccggcgggaaacgatacgatcctgataagcaagtcaaattcttacggggattcatggcaattcgcgaaacttttgaagaaaaccgaaattttaatgaaattggatttttctgaggctcatcgacacctcaggaccccctgccttccaaaatattttgaatcacggccaaaaattactaaggaaaaaactgtcgcagaaaaaatttgttgtcctttttaaatttagctaaaattttgaccgcgatgtgggaaagtgagtcgaagtcctctccgatacagccccatagaaacattagggcaggggggaatgtaaggggattagaaacattaacatggaagggggaataattaaaaacaatttagaaaatgataatggaacatcaaattcgcattccacgccatttaagcgtgagggcagcgaatgtattgaagggatttctaaataaagtatgccaacatcgcttaagggaattgggatgttttccttttggttttcagagtccttctgagcgtttgggctgcaaaaccgacttggaggagggactggcagacattaaaatgaacagtttcttcaagtcgaacatcgactgggaattggtttgccggaaattctccttttccccaattattcaattcaatgctttgagcttgaacagcgacagatagcgcctccctataatccaaatgtgtccggagacagagacttacaacgatttgacacgagtttcaccaacggaaatccttccctaacgccgg

SEQ ID NO: 46000 - DNA, 2209 bp, Heterodera glycines
atggtgatcaatcgtttggagaaacttttcgtcaccaacgacgccgtttcgattctcaatgaactcgaagtgcagcatccggcagcccgaattttggtgatggctgcacaaatgcaggaaaagcaaattggcgacaacactaacactgtggtcattttggctgcatcgtttctggagcacgcactgcaattgcttgacatggtttgttattttctgctgattaattaaacaatttaagttgtatcgctttcagggaatcaccgcagtagaaattgcgtcgggttacgaattcgcgcttcaaaaagtcgaggagctcttgccgggattggttgtttccactgctgaggatttatatgacattgtcaaagttcgatcctatctcaaatcgtcgcttatctcaaaacaaacggaccattacgagttaatttctgatcttgttgcgaaagcttgtggtaaattaatacttatttaataaactttaaagtattacaatttttctatctccatttctcgttgttttagttcaaataatgccaaaaaacaataccactgcgttcaatgtcgataacattcgaatctgcaaaattcttggcgccggagtggccagttcgtacgtgacaaatggaatgctttttcgccgtggtgctgaaggcgaagttaaaggcgcgtcaaatgcgcgtgtggtcgttttcgcgtgtccatttgaccttacgcaaaccgaaacaaaggttcgcttttgggcaaaaatgaaaaaaaaaaacaaattattttgcatttaattaaaagcatcggattccttttaggggactattttgatgaacacggcggatgatttgttgcaattcagcaggacagaggagtccgaagtggaagcccaagtgaaaagtctttcggatgtcggcgttaatgttgtggtcgctgccggcaaatttggagacctttacgtgcattttttgaacaaatatggaattatggccgtaaggtgtgacgatagaagttttcggaagccattcaatgatttaagattgacttcgaaattcgatttgcgaagactttgccgaactttgggtgcccaggcgcaggcgcgcatttgtgcaccgtcagaagaagcaattggccattgtgacgaagtgtttcttaaggaaattggcgacactcaggtggaaagatgggcaaaaagttcgaggagaccataacaaatttataggttgtggttttcgataagaaaagcgaagttgggaaagttgccacaattgttgtccgtgggtcttcccagtcgttggtggatgacattgagagggcaatcgacgacgcggtgaacacttacaaagcgctgactcgagacaacaaagtgagccaattccgcctaattaatcgagaggggggggggggtcttcattctatatttgtaaatggatttaaatattcgatttatctttatttgatggctcgaatgaaacattatcatttgtttgttcagctgttgccgggtgctggtgcaactgaagtggaattaagccaccaaattgaaattattggcgagaaggaatcgggacttcgacaatatgcgatcaaaaaatacgctactgctttggacattttgccaaaacaattggccgaaaatgcagggcttaaggtgaacattttttaaaagtgacaaatcgtttaaaaggaattttagccaactgaaacactcaccgatttacacgcagcgcaccaaaaggggtcgaaatgggagggagtggacgcggtcagtggaaagttgtgcaacgcgatggaagcgggcattttcgacctttactccgggaaatcgttggcattaaaattggcgacgaacgcggccatttctgtgctgaagattgatcaggtgacaaacatttgcgggagcatcgctttgtcaattaatggccattcattctatttagataatcatggccaaaccgatgggcggcataaagccaagggcacccaaagggcaggacgacgacgacgatgacactgggatggcttaatcagcacagtcacagaactcattgccgagtttttgctttaagaaagtattgttgctgcttcatttttgttaattttaatacgtaaatacactttcagtaatgcattcagttaatttcttgcccaatttcataaaaaaatctcttctacttacaaaacaactgatttttaaaagtccaagtcgccaaattctaataaa

SEQ ID NO: 46001 - DNA, 450 bp, Heterodera glycines
gctttacttacttctatcaaaatgcaaaacgacgcgggagatttcgttgatttatatgtcccgaggaaatggtaaatgctttcttgaatcttttgtttacttttatttttctttcttgtcagttcgtcgtcttctcgaatcatttcggctaaagaccacgcttctattcaattggaggttgtcgaggtggaccaggcgactgggcgaatgattaccggcaaaacgacgaagtacgccatttgtggaaagttgcgcttcatggtcagtcgttcgtaattggaagggatttatattaaaaaaattcggtttcgcagggcgagtcggatgattgcattctgcgcttggctcagagggatggaataattccgcaaaatttgtgaacgttgattcttcacagggatgcggcgttcttttgttgattttgttgcctgcagaatgataaacactgtt

SEQ ID NO: 46002 - DNA, 656 bp, Heterodera glycines
atggcctccctcaaagggcatcactcgcccgaattcacaaattttattttcgcttgtggcttggacgttcctacgcgtaagaaccgttttgaagtaatttacgctcttttgtcgcatcgattcaatgcgaggattagagttcggacatacactgacgaagtgcgtttttctaattggtttttcaccataacaaattcgattcattgtccaggttgctccaatcgattccatcactccagtcttttccggtgctgaatggtatgaacgtgaaatctacgacatgtacggggtttggttcaacaaccacccagacttaagacgtattttgaccgattacgggtttgaagggcaagtttattttattcattttcctttttgtatttatatttgtttatggcgttgtcacttttagtcatccccagcgaaaagacttcccattgtccggatacgtcgaactgcgttgggaccacgagctgaaccgagtgatttatgagccaaccgaaatgacacaagagttccggaagtttgacttgaacacaccgtgggaggttttccctgcatttcgtgacgaatcgataacctccggatacaatgtcattcaaaaggcaggcaaaattgaggccaaaaagcttgatgatgcttccaaaaaaccgtaa

SEQ ID NO: 46003 - DNA, 2153 bp, Heterodera glycines
  unsure (1)..(2153): unsure at all n locations
atgcattggacagacatttgtacaacacntcaaggtgggtgtcccacagtcctcatgactgcaataaccagcatcaaatttaatcaggttgaggtccaaaacacggagttatacgacagcggaaccctctacccctacaaggcgtacctgaccaacgaactgtcctttccgaacagtgcaaagggacactttatggccagcgcgggctaccacccatcaaggaagcacgacgacgcgacggacgccggttttctggcacgctgtgcgcgcttcgcgggcggtcgtaaagcacgcttcctttctcggctggacttcgacctgggcaaccaggagctgtatctgttgaacaacatggacgtcctgttcaccatctatcgggcaaaggatgcgttcctgttacaaagtctagcgccagcggcagcagcagcagcggcgggccaacattacgcgctgtacctacacgacataaagctgtacgtgaagatggttgaggtgcaaccgtcgctgaacctgtccatctacaagacgctggaaaagcagccggccacctatgcggtacggaagacggaggtgaagtccgtgtttctgaccgccggccgtaccgagatggatcacaacatattttccgccgccatcccgcgtcggctgaccattgcattggtggcgaacggagcattcaacggccagctggcattgtcaccgttcaacttcaagccctacgcgattcgtgagatcagcgtgcacgctgccggtcatgtgtatccggcagtgccacaccgcatggacttctccggctgtgcctacattcgaccatttgttgacatgtacgaggcgctgggcatggccaactcggagcgctccatggacattacgctggagcagttccacgacggatggaccatcttcgtggtgccaatgacatcgacgctggacgacagttgcggctttgaactgctccgctccggcaccaccagcattcggctcgcgttcaacgaagcgataccggcaggcggcgttgagatggtcgtgctcggggaattcgatcagttgatcatgatcgactacaaccgtcatattgtatccgactcaaaaattgcataaaaaggagcccatattatgattaacaacacattgctcaacgctccaaatttgtacctatcaacaaagtgtcttattcataaacctcacacaaacataaacatatattgtctgcccacgataaacatgccaaacctaagctgggtgattttgtatgagccacgaggggacggactggtggcgccacatcccctgttcaatgccagacctgaagtgccagcacgggtgattgacagtgcgccactcatttcgccattgcacagcggtcagcgtgaaattacccccaagcattatgtcaaccatcacccccagcaaagacatttgtaaatttaaggaattgcactgacgagcaaaagtgtgccatctgccgttgagatgaacgttacgatgagcgcagatggtgtggacccaacagcagcagccccagtcatgtatgtgcagatttggtccgcactgctcctgttcaccaactacgccatcatactgccgttgttcatcatttgttggttgtcggttgtacgctggcttcgtcactccggtcttattgccaccgccgtcgccacactcgtcgacgccaacatcatctcggcgtcaaatcaacaacaacaacgaacacactaaaatccgaagcatgttcagtgatggtggggagagcgggcgactgcagcaacagcacaccgcggccgtcatacgggaggccaaccgtgtgacgtcccaaatagctgcagcaacagcaattccggaaccaatgcgcagcgtgttgaacgccacggttgcaattccgatgatcgtgtccgctgcacaaactgaaggtggtggtggtggtggaagcgacgtgaaaagtgacgacggctttcgtgacgaggacattcacagtgtccgttcaacagataacgatgcgattgttaaatggggttgcgcgtttgttaaaactgtcatccttgaaaatgttcaaaaaaatttcataattaatttttttaaaaacttactgaacaatttcaatgaaaaattctaagaggaaattagaatttttgttgaaatatttctaaaataaa

SEQ ID NO: 46004 - DNA, 1187 bp, Heterodera glycines
tgccttttgcctcgacggggcgttgactcggaatacgacgggacatgtcgagaaattgaacattgcaaagaacagttggaggcgtatttgggctgggcaagcaaaaagttgaaatgcacgccgaaattcgtgggcacaggcagaaattcacaccaattggaaatccccgagtcggcatgtcacaatttgacggacgatttccaattcacgtcccaacgaaaagtaaaacggaaattcgaagggaggtggaggtgacgtaaacaatttgtccatttataacgaaggggtacaaacgctacacgactaataacctgcaaaaactggtggacaagctgaacgatgcggagacaaactgtgccacgatcagtgcggaggtcacccgtagagtttttgctgatttggatgtgcggtcggttgaccacgccgaaacaaaacgcatttataattaattcccttttataaaccatcagaaaggacaaatgggcttcaattgttcaccaaattgccactttcgattgtctaatggcgctctctctgtacgcgcagtcatcgcctcacaaaatgtgttttccggagtttgtgttcgaatttgacatggttcaataatacgttgattgtttattcgaccattgttttttagccgttcgtcgacattcagcgtgggttccatccgtcgttggccgaccttaagtcggcgtcagccggcagtttcaattacattccgaacagctgtgtgctgggctgtggctcgaacacggcccacacgatgttgctgacagggccgaatatgggcgggaaaagcactttcatgcggcaagtggccacccttgtggcacttgcgcacattgtgggttctcaaattggcgaactgttctctaattaatctttgccgttcgctatttgagggctcaatggtgccggctgattcgatgcgacttacgccggtcgatcgcattttttgtcggatcggcgccagtgacagattatctgcaggtgtcctttggctaatcagtttcgtgcctgttgttttattactcgactcattaaggacaatcgacatttttcgtggaattgtcagagacgaacacaattttgtcgcaggcgacgcgacattcgctggtgcttattgatgagctcggccgacgcacgaggttcctttgatactgaaaagcacgtatagtgaagtt

SEQ ID NO: 46005 - DNA, 1268 bp, Heterodera glycines
ccaactgatgaacgcaagttcgagctgtatcggcagtgcgattctgtgatttacacgccccccaacgaacactttggcatcgtgccaatcgaagcgttggagcagcgacggcccgtcattgtgaacaacagcggagggccagccgagacggtgttggaggacatcacggggacacgagtgagtaggggagggggggggggggggaatagggcgagaatgggttgaatgacgaaaagaatttaaaaatatttattattattaaataattaaagggggtcatagggatactaaaataactaattattacaaattacaaaccaacagaatgtgtatttctcgattttttagggtttatattgaaaaaaccgatcgaaccctttgtttggtttttgatacaaaactaaaaattaataatttaaaaatcaaatcacctgctgatcagattgccgacacttgcggtgttttgctggccaatgcaatggcatcgcacatgggccgcaaagaatggccccaactcgacaaggacgaactttacgcgaaacaggcaaacaaagcgaattaattaagccaatttaaatggctaattgccctcttttagcgcattcgcttcgatgaaaaatttagttggaagggattcggacgacgcgtggacgaagcaattgccgaattattttcggtggaccatccgccgacggaggaaatggcgcaaataatggcggaaaggcgtccccagcaaaatgaaactgtgcacgtgcacatcaacggggtaactagcaaaactaattatgccaattaattatttcctggataattcataatttatatgaatgaacactcccacaaatattcatttgaaaattcactaattgcttgagactttcctcagttacttcataagttttcgggccctaaaatattttaaatttttaaattaaaaaaaaaatttttttttttgactttgcaatttgtcccattactcccaactttcatctgctcccacccccattgttcagcacagcaaatgccaccaacagaatggcatttccgactcgaacacagacttggaacggggcatcattccccccagtcgccgtggcactctttctccccaacgtgtaaagtttctgtcgcccaatggcacgcatttgccaccgcagacaaacggaggcgaagtgccggcgacaattggcagcaaatcatcggcattttctgctgtccttacaaatggccatcggaacacggcacttcaccgacgccattcggaggcg

SEQ ID NO: 46006 - DNA, 1262 bp, Heterodera glycines
atgagatttgctcttttgggtgccgccattggtgcccgtttggaagtgtgccgtctgttggtggacgaatgggcagcggatgtcaaccaggaagcaatcgacggcaccactcctctgttagacgctagcggtgagggacacgtggacgttggtgaggaaaaaaattgtgtcaaaaatttcggttaatttttcagtgaattttctcattgaacgtggcgccaaccttgaccacaccgacatggacggatacaacgcgttgatgtgcgcagtgaagaaaagaaggactgaaatggcacggcatttggtggccatcggcacgagcactgaccaaattggcactgatggtgggtacaatgttcaaattgtcctcctacttttatacgtaattaattttcttctcccatttaaggcaaacgggcgcgcgacttggccgaagaaagcgaaaatgccgaaatgagagacattttccgtgccgtggcggctgagcagcaaagggagaacatcgacgggtaaaaagtgttttttgattttaaaaaaaagtacaaaaattcaggcaacaaaacgagcagcaacagcggcggatgtgatcggtcggatgagagaggaaatcgctgatcaaaagaattggacggatgtgccgactttcataaggaattcgatcacttatgtcttatgtatgtattgctgtgtatatttgttctcataattgaattcacttgtcatatttgtctgctataattgttcaaactgatcaggatgacattctttgtacgataaattgtaaatgaattgtgaatagaaaagtaccgaatttttatgtgctaaaaccgccaaaaaaatgccaaaaatatgtgctaatcaaatatgtttcaaggtgttcgagggctaataatgtattatcggattccgggtccaaaaaattttcgaactttgattcagatttttcagatttgtttcagaaaactcaattatcataaggcataacaaaatccattttgatcactaaggcttgtaattatatggatataaaatcgcgaaatatggccacaaaacatggacaagaaatcgtgaaatatggacataaatttgcaaaaatatggacatcaatttttcccaattgagggtacgtttcccaaaattttttcaaattcgcttaacgcaaagtaaaactttcaaaaatggctaaatatggtattaaaaatgattttagaagaaaaaaacaagatatagcttaaaattcactcattttagcgaaaaataaa

SEQ ID NO: 46007 - DNA, 1378 bp, Heterodera glycines
atgtgctcgtacgaaaacggcctggcccaccacccctgctggtatgtaagtaccgaaattttttgttcgagcgagattcgacggagtataaaagtgttgcatttttccctttcccattcattcattctccgctctccgttttccgtctctcattgtcttctccccccattttcggcaggcaatggtaaccccaattttttaaattttaaatcttttgaatgcaatttaattttttttttttcaattttaagggaaatgtttttggctcttccgtcgcggctgctgatgaggaagacaattttgaggagcgcactcgtcaattcttcgccttcgtcaaccagggaaacattggacaattgcgtgcgctggtcgactcgctggacgcggatgagctgagcattttgctggagatgaaccaaccggatgtccaacatgctcggcccgctctcgtgaacgcaattttgaatcggcacacagaaacggctgttttcttggtaaagtttccgccgacatttcgacgacagcaatttgatttccccccatttttcttcattcagttggagaagggtgctgatccgcatcagaccatgattggccaactgaacggcttgaacatgagtgagtagcaaacagcagcagaattggctatatgcactctttatgagttcaatcttcagtttctttgctcatacataaccttacttggtcaatgtgccaacattcttggcataatttttgtttcttggtgtcagtatttgttcttcctgtatttatgaattggccggactttagcatttttgttttatactaagaaagtaaatccgtgatcagagtctatccagaaagcccattaaaacatgttttttatgactaaaataaaaaaattcaaaaaacggggggaaaattgaaaattttctttgaaaataatttcagggggggggtctcaaaacagaaaagtaccgaaaaaaagttatgggcaaagaaaatgaagattggactgataaagaatgcaattgagccgttatttaaacgttgtgtccccccaaatttgcagatgtgacaccgctttgggccgctgtcgtttttgtcaatttggagctgtgccgtgcgctgatcgcccatggtgccaacattgaaatgggcacggactctggccactcgccactgctgtgcgcatgtttcaatggcaatttggagatcggtgaatcaatctcgaatggatgccgttttgccgctgcgtaattgccacaatgttttcccattttcagccacttttctcgtcgagaatggcgccaacgctaatctcgcggacactgacggaatgacgccattaattgtcacttccttttcgggacaggtggaagagttggatggatga

SEQ ID NO: 46008 - DNA, 524 bp, Heterodera glycines
aactcatcagaaattacgcggccgaagcggtgaaaagcgaagaggaattggccgagttggtggaggcggcggtcgacttggcccacgagttcggactgatcaaacgattgtcggacgacgagtcgcgccaaaggtaagcggcacaaacacggggtatttggttgtccaaacaaatgcccgatttacttcagaaggaccaccgatttggcatccattcagccgttcagtctgttcccgtccccattccctcgttcgcttttccaccgggcgatcgccgtgcacaaagtgcgacttcaaaattcaaattaaacataaaataataattattatttgtgttttagggaatgcaaaagctgttctttcgcgtttcttgtgactatgaatttctggcaaaagcgacagaacaattggccaaaacgaataaaacgtacgaacggatggtgggacttatggaccaagtccggcgagaaggccatcagcagccgtacacgctgctgttgacacgagcggtcagttgtttttaa

SEQ ID NO: 46009 - DNA, 1995 bp, Heterodera glycines
aacttttaatgtggataaagggctttttgagtaataggacttttcgagttaaaattggggattctttatcctcaagtaaaaaagttacctctggcgtcccccagggctctgtcctgggccctttattatttttgatttatattaacgatcttcctgatgccttgccatcaggagtgaaaataaaattatatgctgatgatgttaaattatatatttgttataaagcaagagccgacacggaaattatgcataaagcattgcataatttattcgaatgggcaaataaatggcaaataaaagtttcaattcaaaaaacttttgtattatagttgggttcaaacaacccaaaagaaacatataaatttgatggaaatacaataaatgctgtggatacaactagggatttaggagtaatcattgataacaaattacaattttccgatcatattaaccaaataacaaggaatgcgtatttacgtatgcgttccttgttccgaataattaaatccaaatcatctaagatttggattacgttatataaaacttatattaggcctttattggaatacgctccggaggtttggaatccgtctcttcaaaaaaatattaaaaaaatcgaaaagtgtcaaaaatatttcaccaaaagggtattttttaaatgcagccttccgccaattccataccaaaatcgattagaatacctgcaactgccaacacttgagaataggcgaaagctatttgatctgttcatggcacataaaattgtttatggccgaacagatctgaaactattttcaatttttaatccatcaacacgcggagggtaacaaaattgtggaatcaactagataaagaactaataaaaacaaaaattctttaaatcaatttaaaacaaaacttaaaagttcattaagacaataagaccggaaaaacttaaaaaatggctacataatatttaaaaaattttttttttataagtgatttggtaattgtgatctctttgactttgacctcattttatatttttcttggcgattttattttatttgtgcttgtataatccgatacttttggacgattaatgtatgtatatgtccacaaagtaagtggatttatcccttttgtggactttttcttttctttataaataaataaataaaaggtgtacaatgtgtttaacttcactcgaaaattttttaaaattttctaagttagaaattttcatccaacaacattttaaaaaactaaagaataaacgaagggagaaaaatcaaggagtgaaaaattggtagtgagaaaataaaaaatttaaaaaaaaattaatcagtagtcacactgaatgagagaggaaaaatcaaaaaaaaaaaaatcccgcaaatttttttttaaaaatatcccacctgttcagcgtggtcagcaaagaatgtgaacacgttgttcatgatgacaacatcagcattggccaaaatgtcagcatcggcatgaccatcaaaaaaaaaaagaaaaagtaaataaaaattttttttttttaatttctgcttttcaaaaaattatatgctgaattactaatttttttttaaattttccaaaattacttaaattattctcgagtttttttgcatgtaattttcttagaaaaaaatctcatgtttttcttgtaaaatttcagcttgttaagttttcgggggtgggaggagttaggggaagcgagctgctcgcgggttcgagtcctaatgaatggcgcactttccattttactgctgaaatggaacgcacatggttcagttggtaccaacagtataaaatgttttatatgaaaggccctaaagttcgaatcccaatggacgcgctttgattggaagtgagtcggtgtggctcagtggcacccccacaaagtgtccaagccacgaaatgtccaaaagagtaaaaacccacgaaatgtccaaaatttttcaaaatttataaaaacaaaatgagtctaatttaggattttta

SEQ ID NO: 46010 - DNA, 606 bp, Heterodera glycines
gccaaaatcaccacgttatttggaagacgatgtgttcgtgtgcgaatatcagatcgatcggaaccagcgcagctttgagaaaatcccgccgaagaatcgctactacatcaacactgagccatttgtgttcaactttttcgagaagaaattgacgatgaaaagggattttacggtaggtgggtggtggatcggaaagagtacggtagattgacagttatgttgttcaaacattgtaaggattacggtaattaaccgatacggtaaggggttcatgcagcggcgggtgttcacattttcactatgctagcatatgttgtgttcatttagctgacttttccaattgttacagcctttcaaaatcaccgcttcttccaccgaaaacaaaacttcgtcctcatcaactgctagcaggacagactgctgctgcacaacaacatcgccgctgttcaccaacagtctgatcagacaacggattttgcagcagaatttggagtccgtttgctcaaagatcagtgcccaaaaaattgcggttggcattggcaccagcaaaagcattgcttaaccatcatcactgatcagcagcagcagtggccattgatcgactga

SEQ ID NO: 46011 - DNA, 3960 bp, Heterodera glycines; identical to SEQ ID NO: 5269
  unsure (1)..(3960): unsure at all n locations

SEQ ID NO: 46012 - DNA, 3377 bp, Heterodera glycines
agaatttcaataaacttcccatttcacatcggtagtgccttttaaatttgtaaaaatttctgttgcccaaaaaccaataaatgttggtattggcataatttgttatcaaatgttctaaaaaaacaaattcaccacgtttcctaaatctttcaaaaatttggccaaaaaattcattcaaaaattgtagtactttgcgcttattttgaaaaaaaaatacaaatcaccgtcttagattctctgggcctgaatttcaaatttttattgaatttttgaaaattttttttcagttttacttttgaaaaaattgatccgggtcaaattttggaattcggaccgtaagttgtaaagcctatttttaatcctgaatccggtctggatccagttcactaatgctggttcgaatcggtaatttttcaaaatttcagtctatactaattactctcaacaccaaattgaccaggacaaaattcccaattatagaattagaaatgtccctggtgtttgaataatatgcatttgtgaaattgacggatctgacgtaaaaaatagtcaaagtaagcaaacccaaaaagaaaatcacataaattaaaattataaaaaaaaagattgatgttttaatgccaaaagaattcttgaagtaattttgtttcttggaaaatacggctaagttgcgaagagttccttgggatttattgaaagacacatattttatatttttatccgcgataaaaaggaacaattgtcaagaaactcggctaaattgggtatttttcaaaatgaaaagattttatttttttaaatttgattataaattatatatattttatttttatgaaaaaattaatttatttaataatctatcttttttatttcctttgcaagattttaaaatgaacattttaaaaacaaacaaaatattaattatttaagtatattttaagtaaaaaatgaacttccataatcggagtaagaaacaatatattttataaataattttatttaattatttttttctctttagttgaataaattgaatcatgcttacacaatttcatagaataaataaattatgtttttaaataataaaaaattaaaacctaattagattaaaaaatttataagatgtacttaaaattaaatctttaattctaattaagatatgctttttccttaaaatctaagctctgttaattattaaacaatgtgttaatttttgaagtaatattataagcctaacattattcactccgatcccgtcataatggcaaataaatattaaatgaattaaatttttaatgtgttggcttaacactcgtttacataattaaaggaaaattcgtcaattcgttagaatgatagtatttattgaaacagcttaattttcactaatttcggcaaacagttgggaaagtttttaaaattaagcggaaattgttgacgacttttgacacttttcaccattaacgtggaaaaaatgaataaactaattagtttgtttagttgttatattacccgctttatgtcgtcatggaccaatataaaagcggtggaaatattcacaaaaaatcactttcgaattattcgactattcaattaaacaatttcaattgaaaatgaattgccaaatatggttcggccaattgatgtgcattatgttgctgatggtgtccacggattatgttgtatcccaagacgattcatctacatcctcaagctcgtcaacgagtacatcaacttcaaccagtactagcacgagcacatcgaccacgaccccaagcacaacttcgaccagtacgtcgactagcactgcaaccacgcccacttcgacttcgaccagtacttcgaccaccccaacttcaacttcgagcacgtcgaccagcacttcaaccacgcccacttcaacttcgaccagtacctcgactacgccgacttcaagctcaaccagtacatcgacatcaacgagttcttcgacatcaacttctacgagcacctcaactacaacacccacttcaacttcgaccagtacttcaactacaccgacttcagcaagtacatcgaccagcacttcaaccacaccaacttcaacttcaaccagtacatcgaccagcacttcaaccagtacttcgaccacaccgacttcgaccagttcttcgacttcaacgagtacttcaacgactacaccaactacgaccagcacttcgtcaaccacaactaatccgtcgtccagcagctgtaccaacgcggccggtgacagagcgtgcaacttttacaagaataggtgcaaccgattttcggcatggcttaaacagcattgtgccaaagcatgcaacatgtgcccatcaacgaccagcagcacttcaactacaacctcgacttcaacaagcacctcatctaccacgaccaaagcttcaggtggttcatccggtagctgcattgaccgtattggtgcccgactgtgcagccgttacagtaggatgtgcaaccgttttggcatttggatgagactgttctgtgccaacacttgcaaaatgtgttgaaaaaacaatgaaaactgatggatgtgaggaggaatttgtgaagaaaaagataaaaattaaacaaattgaaaagatatttatttgttaattgaattttatacacaatatatatttattatttaaatttttatgtttgtttaaatgggataaaattatgaaaaaattgttttctaaaaatgctcgtttttgaacaatttatgtgaaaatttaatcacgatattcaaaggtttttttcttaacacgatgattgtagaactttttaatattttattttctaacaacattcttcaataattgacattttttcgaataatgtaaaatccagaaagccatcttaacaatttgattaaatcagtaaaaatataaactgattaattaaatgtcaaaatttatcaaagatgtacttttgaaacctagtgatttgttggtttatagcaaataatttttccaaaaaccaagcggaaaatgcgtttttcatgcttatttacacgtattaagtgcgcaataaatttaggcatttgcctaaaaatcgcatccctattaaaaataaagaaaaattaagtaaatggaaaataaatattcagctaaagaactgtatataattaaaaagaaaatatgaaaaattgggatgaagatgaattagaaataatagtacaaacacaaaaaaataataataattagtaaaagacattgccattttcagaaaaaaaaacaaatacagtcaggtgcaaaagtatggaaaataatttttaatcgaccaaaattcaattttatgttgacgtaaaattctgaaaaaaatcctccttgtctaacttttggtcctgatcaaaaaagtctttt

SEQ ID NO: 46013 - DNA, 728 bp, Heterodera glycines
tttcaaatatttattttgtaaaaccgtgttagttttgttgctgtctttgggtacaacactggtttcatcccactggttctcttctcattcatcggaagaagaaacgacgagcacttcgtccacatcgtcatcgagtacatccacaacttcgactacgacaagttcaactagtacaccgacaggcacaacttcaacatctactagtacaagctccacgacaacttcaacaagtacatcaacaacaccaaccacatcaagttcaagcagtacatcaacaacaccaaccacatcaagttcaagcagtacatcaacaagcacaactttaacacctactacatccagctctacaacaagttcaaccagtactgccacagcaccgacaacaagctcaagcactacgactcctaccatgacaagctcaacaagtacaacaccgacaacaagctcaagcactacgactccgacgacgacaagttcaacaagtacttccacaacaccgacaacaagctcaagcagttcgtcgacgagcacaacttcgacaactacttccacaactccaaccaccacaacaagttcaacaagtacgtctacaacgccatccaccacaacaagttcaacaagtacatccacaactccaactacagaaagtacaactgagacaacactgaccagcactagcagcagcacaacaaccacattgccgtcaagcagttgtaccgattcggctg

SEQ ID NO: 46014 - DNA, 1407 bp, Heterodera glycines
tattttttatttttagggtggccttgttagtgcacttcaggacgacactttacacttatggaattttaggtgcaaaatatggtgccaaatttattcattattttgataaaattaaaaaaattattgctttttttaaaaacacattttccgagagtcttttgcttttggcattttgccaaaccttttatctgctggtatccattatggtccgatcatttctctccttggctttgtcctaaattaattttttcatgctattgtgtctaatgggccaaaataatttctgatcattactttttttaattattaccctttttaccaaccaaaatttatgatcattacatctaaaaataattttaaaaaaacatttttttaaagacaacgaattcccgaaattgcccattcgttgcgcatgtcaaaggaacgaatttcgacgatttatttgccattccaaagtcgatggttgtatgttggcacggaaaaggtatttgtggcatttttgcatcatattttcggatttttaattaaatttttattataaaattttaatgttcaatttaatataaatgaatattgaatttggcaaatatttttaattatttaaaaaagcatacaaaatgataataataaaattattttattttaaaaatattaaaaaaacataatattatattttttaaatttagggcaacgtttattttgtttgtttggccacttttgaactctccacttatgtaattcaatggaacaaagcagttgatatgtatgacaaaattattttaaataaatatattaataatttaaattttttaaatttagaagctgtcggactcatcctggtgccattaaatccctcgaggtattttgccaaacaaaacaaaataatattattatttatttctaaattactaaaattgaatagatgcttttaaaggttttttaagctattaacagaatttaattgtcagattgactaaatatttttaaatttaatttaaaaaataattttttaatttatttatcgaatagactaatatttttattagtttatagactaataatttaattttatttaagtaaagaataataattatttaatctagttatccaaatgactaatatattttaaattaaatacaaataaaaattattattaatgatataataaaatgatcggattaattccaattaattgatgttctctaatttggacaggtctctcccatcgacccgaccaagctgttaattgtgttctaccgtggtcaacttgtgctgtggaatattcagacccgcgaggttgaccggttcaggttggatgatcaaccgaacagtccggtgaccgcggtcagctggcacttcgacggcaaacagttgatggccggacaccacgacgggagacgatactgt

SEQ ID NO: 46015 - DNA, 1052 bp, Heterodera glycines
atgctcgttttgctgatgcaacggccgaccgacgattcgattgaagtgactgtgactttgctgaaggaatgtggggcaatgcttctgaaggtgacgccgaaaggctcaatcggtaataaaattgtttcatctgttttttggcacagttcgcactttataaaaaaataaattatggagaattgaatagtcggacaaattcatgttcaaatcagcactcctccccaaaatttaaaaccttggactatcatttgtcttggccatttatttgtttccgataatgccgttctattcagctgtctttgagcgtcttcgtgccgtgctcaacgattgcgactcaatccatgaacgtactcagtacatgatcgaaacaatgttccatattcggaagaccaaatttgaggttggaaattgaaattagttaacaaaagccataaaatcaatttagaactatccgacaatgttggaagagttggatttgatcgacgaagacgaccaaattgcgcatttggttcagctaaatcccgaagacggaaggccctatgaccccgaaataaatttaagtacgacattttcaattaaaggaagcaaaaccttgggaaatagattttttactcattgccttggttcaattcagatgtgttcaagtacgaccccgactttgagaagaatgaggcggactatgaagagattcggaaggaaatcatcggcgatgctgacgaatctgagggcgaaggggccgacgaagaggaggagggggacgagcaacagccagcggaaagtgagtgccaaacggaggacattttgaaaagggaacacaaatttgcgtttagcgaccaccggcatggaaattttggacatgacggaacaggacatggtcagcctggagcatatcacggtttaacaatcgaaggcattttcaggtggcatttcgacgcaacgtttatttgaccatccaatcgtcattggacttccaagaagcggctcacaaactgatcaaaaacgaattgaagcccaaattagaggcaatggaaggctttcgggcatcattaatc

SEQ ID NO: 46016 - DNA, 1357 bp, Heterodera glycines
atggattcgagcaacggacacccggactcccgggcaaatctcttcgaagctgacaaatataacaaacgcaaaatcaaagatttgctcattgtcctcgatggtctggaagacactcggaaactaatgcttttattcgaagagataaactcgcagggcgaatcgaagttcgtttttaaaaatgaaaaattaatttattggtgtacttttttacgtattaatttcagtgcaccgcctcttttaaacgaatgtttgagtgccaattacaaagaaatggtggaagatttgggcttctttaaggtcattatttggtttggcattttaataacaaatgggcaaaagcttttttttctcatttaagcgttgcctgttggaaatatttattggaaattttggcacagagcaaaaaaaaaacttccccccccctcccctccgaattttctgattgtgagcactgcatcacttttcattttcagggtgcatttgaccgtgagaatgccctcgagcgtggcgttattttgcctcgacggggcgttgactcggaatacgacgggacatgtcgagaaattgaacattgcaaagaacagttggaggcgtatttgggctgggcaagcaaaaagttgaaatgcacgccgaaattcgtgggcacaggcagaaattcacaccaattggaaatccccgagtcggcatgtcacaatttgacggacgatttccaattcacgtcccaacgaaaagtaaaacggaaattcgaagggagggggaggtgacgtaaacaatttgtccatttataacgaaggggtacaaacgctacacgactaataacctgcaaaaactggtggacaaactgaacgatgcggagacaaactgtgccacgatcagtgcggaggtcacccgtagagtttttgctgatttggatgtgcggtcggttgaccacgccgaaacaaaacgcatttaataattaattcccttttataaaccatcagaaaggacaaatggtcttcaattgttcaccaaattgccactttcgattgtctaatgggcctttctctgtacgcgcagtcatcgcctcacaaaatgtgttttccggagtttgtgttcgaatttgacatggttcaataatacgttgattgtttattcgaccactgttttttagccgttcgtcgacattcagcgtgggttccatccgtcgttggccgaccttaagtcggcgtcagccggcagtttcaattacattccgaacagctgtgtgctgggctgtggctcgaacacggcccacacgatgttgctgacagggccgaatatgggcgggaaaagcactttcatgcggcaagtggccacccttgtggcacttgcacacatt

SEQ ID NO: 46017 - DNA, 988 bp, Heterodera glycines
gatcagtgcggaggtcacccgtagagtttttgctgatttggatgtgcggtcggttgaccacgccgaaaacaaaaacgcattttataattaattcccttttataacaccatcagaaaaggacaaatggtcttcaattgttcaccaaatggcactttcgattgtctaatggcgctctctctgtacgcgcagtcatcgcctcacaaaatgtgttttccggagtttgtgttcgaatttgacacggttcaataatacgttgattgtttattcgaccactgttttttagccgttcgtcgacattcagcgtgggttccatccgtcgttggccgaccttaagtcggcgtcagccggcagtttcaattacattccgaacagctgtgtgctgggctgtggctcgaacacggcccacacgatgttgctgacagggccgaatatgggcgggaaaagcactttcatgcggcaagtggccacccttgtggcacttgcacacattgtgggttctcaaattggcgaattgttctctaattaatctttgcgctcgctatttgagggctcaatggtgccggctgattcgatgcgacttacgccggtcgatcgcattttttgtcggatcggcgccagtgacagattatctgcaggtgtccgttggctgatcagtttcgttgcctgttgttttattactcggctcattaaggacaatcgacatttttcgtggaattgtctgagacgaacacaattttgtcgcaggcgacgcgacattcgctggtgcttattgatgagctcggccgaggcacgaggttcctctgaaaagcactcgttaattaatccctttaatgtcaattattcagtacaccgacgggactgccattgcatgtgccgttttcaaacacatcatgcggagcattggctgccgaacgctcttttccacccattaccattccctgtgcaactttgtggccactgacccgaggattgcacttgcgcataaaaa

SEQ ID NO: 46018 - DNA, 2049 bp, Heterodera glycines
accaaatgaaatcactttcaatggcaagtcaaacatcgccagaaaattctatccaccggcaccacctcaacagtccctcctcaacaaatataattacctcattagccgcctcagacgactaccaaataacttcacctcaaccgccgcttactacagcggacaaatccatgctaattcaacgccagaattcgtgcggcagttcaaagcgtttttttgtctcccgggtacagtaccctgctgagcaacaacagaaacagagcgcctacggtagccattctttgaggatcaaaattgcggagaagcaaagcaaagcagtggcagcagttagtggcgatagcaaagtaggacaaccacaacatctacaacggacaaaacagcagcagcagcagcaggaatttgtcaccttccgttacacttggccagtgcgaataacggaacggtggtcactttattataaagtttttaaacacaataattggcgtgacaaatagctttttaaaacagttacaccaatccaattgatttattgttgtccacactgttcagactgatcggtgccggtgaatctgccattttgaatgtcagcccggcattttgcactgccttcaatggtgggtcatttttttgttgtttgttctccaaataataaatttaaaatgccttaggtgtccaattcacttggcttttgcgcatttgcgaggaggaaatattgcctgcggacattagcgaccaaagtgagggcgacatttcgatggactcgtcgtatttcgcatcgggcggcgatgacgacgaattggagatggtgcagcaacaacagcagcaaaggaaagtgaacatcaccctctactacaaggaggggccggcacgcgacgttaagctgagcgggggaaagtaagccgaaaaatggaaattattcaaaaaataagcaaattggcacgcccaaatgccaataaattattgaaatttaaaatgttaagcatttccattcgaaactcggagggcattctcttcgacaatatgccattgcgcaacttggagtacacaaagggcggcggatggtcgccgataagcgacgaagggctggggggacggcagagggacgagcagcgcaagttcagcgagttcatccacgaccacgtcggcaagcagatcaccgtacgggtgcagatgaagtgaggaagaaacggaactgtattgcatgacaaattatgattatttatcatttttagtgatgtaattagtgtactgtgtatttatttatttacttacagtattcccttcctttttcagaatgcccgcttcgttgttccaaccgctgcaatatttgcccagcattgagtcgccgcaaagtgacaaactctcggcactctgtgccgttgttctcgacgaaatttcgccaaaataaacttaaagtcccagacgttgaacatttcgacttcaaagtactaaaccatacttccatactttgattataatgatttttctaatttaaaactcacaatcagactgacaaatacactctctaccgacacgttttccaatttgggtgttcagaagtttttgaccgttttttgaagaatctcaaaagttttggcgatggattggatgaaaaggaattgctgggaaagatacaaaatgtagaataattaatttgtaatttttacacttttattttaataaatttaggtttttgcacattattatttcaacacggttattgtccgggaggccgaatgttttgaagattttttggaggcgctggacgcctcaaggcatgtccaattccccgctcttcggcgagaatgcgaacgattcatttgcaccgaagtgatggcggtaaattcaaaattttgttttaaaattaatttaaaaacgtttaaatattaattataaagtgaaatttgaattcaaagaaccaatgatcaaattattgtgttaatttgagctttttaggaattcgccgatttggcatttgtaaagaaaatgctgctgcttgctgaacgctttaacctgtccgttctcaaaatggtacatgctcttgcgaattaa

SEQ ID NO: 46019 - DNA, 387 bp, Heterodera glycines
gtttcttacgcaattgccatttccaaacctttgtccatcacagtcatttcttatgggaccagcccactcactgagcaggaactgctccaaatcgtcaacgacaacttcgacctgcgcccaggcgtcatcatcgagtgcgccttttgcccttcgcttcccttttcctttcctctcaatttgcccattttcagggaactcggcttgaagcgcgccatttattcccgaaccgcggctaatggacactttggacacgccgatttcccatgggaaaaagcgaaaccgctcgaaattcgtcctgagctgatggaaaaactgatcgcctatagaaagtctgaacacattccgaatggctgcttcaaagggacgcacattcacgcgcaccactga

SEQ ID NO: 46020 - DNA, 324 bp, Heterodera glycines
atgttccaaattttcgtcaaaactctcaccgggaagaccatcacccttgaagtcgaggcgagtgacaccatcgagaatgtgaaagcgaagatccaggacaagcagggaattccgccggaccaacagcgcctcattttcgctggtacatccgcttgatatgccgggatattaaattttttcgcgtaatccttatttttagggaaacagctcgaggacgcacgcaccatggtcgactacaacatccagaatgagtcgacgcttcagcattgtctgaagcttttcgggggcgcaaggacgggcaaaacagcacactactcgcggagc

SEQ ID NO: 46021 - DNA, 995 bp, Heterodera glycines
atggaattcctggagaaaagccaacgacgtcgcgccggcgatgatgtccaatgggaggggttggacccggcgggaaaacgcgtgattattctcggcggaggtgacaccgccaccgattgcatcggaacttcgctgagacttaacgccaaaactgtgcaggccttcgaaattttgccgcagccggcagagataagaaagctcgaggtaaataaatggggtttttagcttctttggttgtttaccccttcgacctttttagaacccttggcctcagtggcctctgattttccgagtggactacggacacgaggaagcgaaggtgcgggacggaaaagacccgaggacttacgcaattagcacaaaggtggggagaaatggtgcgggacaagcagcaaaaccatatgatttacaggaattcatcactgaagagaagaacggagtgcacgtgttggtcggcttgaagacagtgaacatcgaatgggagaaggacgagaatggggcttggaaaatggtggagttggagggcaccgaaaaggtgtacgactgcgacctgtgcattatggccatgggtttcattggacctgaaaaggtaaaatggcagttcctggcacctattcacacattaaatagccaggaatttttaagcaaccgggcatttggtctaggaaaacggacttaggcggaactccgtaacaaaaaccctgatactttcaaataaattttttaaattcaaaatgcatttaaaatttgtgcagactgtcatcgatcaactgaggctggactatgaccctcgtcaaaatatcaaaactccgaacgaaaagtacaacaccaattgcgcgcgagtgttcgctgcgggtgattgccgcaggggccagtcgctggtggtgtgggcaattcacgaaggacgacaggccgcccgacaagtggaccactatctgatgggcaaaacgacattggccggttacggaggcattgtgttggcaccaattgcatag

SEQ ID NO: 46022 - DNA, 768 bp, Heterodera glycines
atgccaatgcccgcgcctgaaaagggaatggtcgggcccaataaagcgacggcggacgaacgaggaaaacttttgctggcggtgcaatacaacattcagcaggggtcgctgtttgtgagcatcagacggtgtgcggaactgcttggcatggactcgaccgggtacgtccccaagggcgtggccagggaaaagcgcggttggccacgcccttccgcctgcggaatgccgtcgaaaagactgtcggaaaagccattttcagcttctccgacccgtactgcaaagtttcactgaccccgctttcaacaaaagcccatcgtcagagaacgacgatcaaaaagcgaacattgaaccctgaattcaacgaggtgagggaagaaagccgacggacggacggagaacggcggtccctttcagaccctccaattcattgtgccgttcaaagacttgccgcgcaaaacattagtcatcggagtgtacgactacgacgttggacggcacgacgattacatcggtaaacgagaagggaagggacgaattgcgaagacattcccccgcccgcctcctcctttcaggtggaattgttctgtccaccgccgcacccgacgaaaggggccgacaatggcaacaagtgatggaaaacccaggcaaaacattcgaacattggcaccgattggaagtggacgagtgagcggacgacggcacgaaagaaaagcacaccgaacgcggagcagcaaatgccttcaacaaatgagaacacccattcgctaa

SEQ ID NO: 46023 - DNA, 380 bp, Heterodera glycines
atgggaaaggaaaagatccatatcaatattgttgtgatcggtcacgttgactccggaaaatcgactaccactggtcatctcatctacaaatgtggtggaattgacaaacgtactatcgagaaattcgagaaggaggctcaggaaatgggcaagggatcatttaagtacgcttgggtaagtcgtaatccaatcatgttcacgttaaaatatacttttctaggtgcttgacaagctgaaagccgaacgcgagcgtggtatcactatcgacatcgctttgtggaaattcgagacaagcaagtactatgtcaccattattgacgctcctggccatcgcgactttatcaaaaacatgatcacaggttcagttttgcaataccttt

SEQ ID NO: 46024 - DNA, 4097 bp, Heterodera glycines
ggacagtcaaattggtcgtgacgtggagatcagactttcgcgaacattccaagtgaagaaggcgtggattcgcaaagctggcctggaggcaaatatatatttttttaatttttaaattattttaaatatttttaaacaattattttttgttagggacgcgttgagccggcgaacaatggcgttttccagcaagatttgctgctaacggaacagcaggcgaatgtgctaattacggagatcaatcagaatgaggcaaaacacatttaataaaatattcttccttaaataaatatttattttaaattgaattaaaagattaaccataaatatttcatttaattaaatcaatttattttgcaattttatataaaattgaaaatactatttgtatattgtaaattgtttaatttataatattttttaaacaaattatttaatattttattgtaaatttttaagtttttaaatatttaatttagaaatatttaatggtttaataattattttacttttttcactaataattttcagagtttcttaattgtaaatattttaatttattaaaaatattattttttgccatttaataaattatttaaattatcctaatcttccatttttcattttcccatttgttttcggttggcgttggtgccgtgccgccttctgacaaccgccgtttcagtcgtcggcacaatttcaatcgccgtcgtttcactcgcgccggcaattcgctgttctttgaagcttctcccacccaaaaatggccagtcggacaaccaattctgtacatgttcgatcagtccgttcgtgggtttaaaaagaaaattaattatttaaaaaataataaaaattattatttttttttctaaaatatttccatctcagcggctttcaacaccttgtcaaatggcatttaattctccagaaattttttaaatactgtaacttttttgatcaaaagaatgaaaaaggcccaaaattgggacaatggcagttcgtgtaaacatttttaaaatttcatttagaacctagaatcttacacaaaaaataaataaatttttctctagaaaaacttaacaaaaaattttctgctaatttatttgagtttagttcaaattttttgaaaaataaatttaagaattttttaaaagtttttctataaaaaaatcattctgattttttgagaaaaaattaaagcttttacttaattttaaattaaacaacaaaaatttataggaattgtacgaacttccattgtacgaatccatgacactccaaaattatttatttaggaaataaagcaaattaaataaataattaatttaaaaacaataatttgctgcctaacttaagcggaaagtgacaaaggttctgttcgcgcggcggttcaggtgatttcttggatgacaattaaaaatatttttatgaaaattggataagggattaaatattaataaattatctctttaacattttatacattttttgtctgatttaatttaattttgaatttataaatttattgccaggaaatccaatccaaaagttgtctgagcttccaagaagcgtccagaaaaccggcaggaaaccatctgtactatgtgaagatcaacaatccacaattgtaagaaattaattaaaaaataagaaattaattaaaaaaattatttataattaaaattcactccatttcaattacctaataaatttataaaactcaattttttaataattaaaattgagtttcaactcgcaaaaaacgaataaatgaattgattttttagttttttatagctgtttaattcattgctaactaattaattaattacgatttcctaattaattaatgatcgtttaattaattacttaattgatgacttataaaaaattaatgattgctaattaattaatttcatgcttatttctaattattaattaatttttgtttgattgtaaataattaattaaattgctaatttgcaataatttttatttatattattgactatttgttttaattatttggcatctttcagttgtgggctcagttatgtgggccgaatttctccggcaaatccagtttatttgagcttcaatgcggcaacgccgttggcattgccatccatgagacaatgcacgcgctgggcctgcagcatgaacagctccgagtcggtgggttggcaatggcacaaaatttggcataattttatttaaaatttttttcaaatttctaaatttctggattaaatttctattgtgccaccatttacatatgtaggtagaaaaaaaaattcgggcggcatgggctttgtttcagtggtggctctaattcagggggggggctgaattacaagaaatcctgtagttttcattctgtacaaattggttgcttctttatgccttttttgtgcccaaacttttctatgttttttctgctattttccgattttcctcccttaaaatgccatttttattttttaattcatttttcatttccatcatcagaccgtgatctgttcatcaacatcaattgggcgaatataaatccgcaaaactatgacacatttgcgcgctcggagctggtcaaatacactagctatggcgtccgatatgactacgggtgaacagtaattaattagggttaagcgttgattcttaggaaaaaaatcggagaagaaattccccgacaaaatttgtcgtatgggaagaaggctggacaattcaaaaaaatgtcgggaagcaataaatactcccctcgtggttgagaaattttgataaaaagtcgaaaaaaataaaattttctaatttcaccggttcgagtcgggaaggaactttaatttaaattacaattaaataattgcaatattcctctctgatcaatcaattcctcagttccatcatgcattacgccagcaacattgcgtccaaatcagctggactgaaaacgatgacggcaaaggtatcaaatcaaatcaattagagagatagtcgagagtctcggcctattttccctattttcggcatcagtccaccaatcaatagagctcatttcaattctctaatctctcctctcgagcacatcctttgtcttaagagttaattctcccggtgtgactcgaactcacggcctttccataccgtggaattctttttaaccgactgagctgcgtggcaatcaataatcccgtcattattcaagagtcttagtttctcgaatctcttccctcggacatatcctttgtccatcaattaataaatccttagtacataaaagataactggcccggtggactagtacccacggtttttccatagcgtggaatgctttttaatcgactgatcaatcccatgtcctttatcccactttctccctcactccgcttccttctgccatccccataaatatctaacccatataatgaccgttttttattcaaaacaccgtaaccaaaaccaatcatgatgatttcaatttataccattttccgaccaaccccggtgccaacgatgcgcagatgggccaacggagagggctgagtgcaacggatgttgaggaactgaggcgaatgtactgcatgccgggtacaaatttggcactaattatgaccaattagcgttgggcgacgggtgtgccgaaatatgacaacaaattccgccaaattccttcaaaaattttttttgacatttaagcaatttgattgttgaggataattgccagaatttttgtatttttatgtgccattttgacaattcaatgtcatttttaaaattttatgaatcattttgacaccttttaatggattgggaataccgaaatacaaaccttttgacttatttggccctttaataaccattttggcacattttgctgaatttgtcattgtcaaaacctattgttggcatatttttcctatttttggcgcattccttcatttttgtggcacttttcccacaaattatgtcatgttttttaatacaaaggttgcgcggatgccaacgtttactgcggcgtttgggccaccaacaatttgtgccaattggccagcacgaggccgtggatgatgcaaaactgtcgcaaatcgtgctcactttgt

SEQ ID NO: 46025 - DNA, 362 bp, Heterodera glycines
cacgtgacaacaaattggcgattgaagacatggagggcggcactttcaccataagcaacggcggtgtgttcggctcgttgttcggcactccgatcatcaacccaccgcagtcggccattctcggcatgcacggcattttcgatcggcctgtggcggtggatggaaaggcaagtcgagaaaagatcggacaattcagtttgttttgtagcaaaaataacgcattgatttaggtcgaaattcgtccgatgatgtacatcgcactcacttacgaccatcgcctgatcgacggcagagaggcggtcacttttctgcgcaaaatcaaacaggcggtggaagacccgctgaccattctgttggatctc

SEQ ID NO: 46026 - DNA, 1047 bp, Heterodera glycines
atggctgaaaattttctcttggaatttttcaacttttacgacggtccaaatggtgaacagacgcgacaacaattgttaaatgcatacgacgcaaatgtacgcaaaatgggcaatgttaaatttgagtaaaattcgcttttaaggcgacgtttacctattcgatgtgttttctggcggatacccatccgaccggaaacagagacagaagtgaccatcagtaagtgctaatggagtaccaacacccataagcagtgggttacttaattattctacccctccggaacccttcgcaaatacttcaggttgatcccccctcccccctgttcccttctaattttggttccaattcattttctgtctctgttcagagagttgatcggcctgtacatccgttcttctcacaacatcatccaacaacacaaatggcaatcctatcgtgacaaaatcatttatcgtggacctatggatatagcagtcgctctgagcaaattacctccgactgagcacatcaaacaatcatttctactcgacttcaatttcacttctgtgggttattaattaaattgttgtttgtccattcactcaaattttctgcttaggaatttattgcttttcaggacaatttgatcgtcttatcgctgcaaggaatttttcgcgatgggaaagaagtgtcggatgggtctaccaactttttgaacatgaaatttttcacccgacagtttgccattgtcccaaaaacggaggggtaatttatcttggtcaacataaaaaaacctttttttgccatttaggatcgcgataatttcggatattctccaaattacaccgattagcaatgctcggatggaacggtacaacaatttgctcaagaatgcgactgtggcgcaggtcataaaacatttcttattttgttaatgagaggattttcaggtgcagcaatcggctctcgtccctggcggtgtcttggcttcggctgtccaacaacaaattgatgggatggccccaccgcctccgagtccacagacacaacctgtgttgatgatataa

SEQ ID NO: 46027 - DNA, 618 bp, Heterodera glycines
caacgttctcaacgatcacacatcaagcacccacaaagccagcccgacaacagcgacaaaaacatcaatgcgcaacttccaccggaagacatcgcaacaatgcacacgcagaaggtcgtcttcaacgcgccgttcgacaacggggggaccgcctgggtgcgggtgcgtttgggcatggtgcacgtggcatgcggttaacccccgttttaaaatttaggtgatcaaccctgggacggagcgcatcggctacgccttcaaaaccaccaaaccgcggcgcctcggcgacgccgtcaagaccaccaaggcgcagcgcatcaacatcaacccgccgaacgggacgggacgatcggcccaaagaagttcgtcaacgtgggcatctcctgcgacgccttcgaccccggcaccgagggcgaccgtggagtggacaaacacgccgcacccagacgccaccgtgttcaagcccgagtggttccagggagacggatggtgcgccgcaagaacttgtcaatcgagtacaacttctgatggaaggatgcttcgtcaccacaacatggacatgataggatcccatcccaccgtcccaaaattgtcattttgtcccccgtcatttaaattgtt

SEQ ID NO: 46028 - DNA, 723 bp, Heterodera glycines
ctgatcaagttggacccaaatctgaccctggaggagcgcatttcgttgtcaacggcttacaaaggtgcgatggcttctcgtcgtacgtcctggcgtgctttggtctccatcgaggaacggaccggcgcgagtttgagcgatgcacaacaacaggtggcatcatttggccacaaattctgatcaaaattggcccaataatttcccccaaacaattttcaggtgttggagaactatcgtgagaaggtgcagaatgaactggtgaacacttgccaagaacttttggtgagtttctccgttttccaccgattttttccaaatttttaatttccccaatttccaatttagacatgcatcaacgaagtgctgtttccgaaggcgtccgacgtggagcagaaggtgttctatctgaagatgaaagccgactactaccgttacatttccgaagtcgcgacggacgaagaccgatccggtgggatttgagaggatttgtgcccgattttcaggcattttgtgatttgtgtgattcctcaatcaactaaccatcctctgttttttacaggtgttgtcgaactcgccaaagttgcctaccaggaagcgattgacatggccggcgacaaaatcccagcgaccaatccgactcggcttggccttgcgctcaacttcgccgtgttcaactacgagatcttaaattcggtgaccgaggcacgcaaagtgatccaaact

SEQ ID NO: 46029 - DNA, 2297 bp, Heterodera glycines
aaatgttcggtcagtgggcctcggcacattttggacaaattgagcgagtttcgtgccgattttttgcactcaaaaagtgcccgattggcttcgtctccgtcctttgtgcaggtcattcaatgttttttgcacttttatttgcaatattttgctctttttaggtcacttttttgcaattggttgccaaacttttcccgtcagaagcgcgtttccatccaattcttacgcccacaattgcatttgcttctgaactggtcggaaagtgcgttttttcatcaatattttaaaaaattcaggggtttgaatttttcattttttggaaaaattttattttttcacgacaaatttctcgaaagattatttattgcgaaataaaatccatccactgaattttttcttcaacaattgccttttttgggtccattattcccccccccccttcaaattttctcattttcagcactcgcatttgctcggttgaccaatgcgctcgtctgatttttctgtgtgcccaaatgtgcgattggttttgtcgtcggtctgtcgctgccgccgttttcgtcatttttttttcaaaatttcccaattttctaaaaatttaggcctcgtttcttccccgaagtgttggcctttttgttgggcgctcttcagctgtgctgtgagagcaaaaatgaggcgaaagaagtgccatttccgtcgatgaatttcccaatttcgctgccccatcgccaaatgctttttgtcgcgccaaaggttggttattttatgggcacagcgatttggttccatatttatgccaacaaattgactgatgctgttccaatttcatcatggcatttttttgaaaaaataaatttttacctggaacgactcgtaatagctattttcgatgtcaacctattgaaattcaaggttttagcaaaaaaaaaaaaaaaaaattttttttgcctttgacacaaaaaagtttttaaaaaaaaattaaatttatttccttttcacggtccatcaattttattaaggagtcaacaacaacatcaacaaccggcacttttggtaatttgtcacttggacaaattttccacccaaacattggcgatttggagacggaaaatggtggcattttggatgaggaagagaatggtggtggtgccaccagcacagacgaggacaaatgccgtctccgattggccaccgttcgcgcactgttcgccacaattggccaatacgcgcgcaaatacggcaccaccaccgccgccgacgaaagtgtcgccgccgccggggaccaaccgacaaacgacggcggcacaatgtgtcccgcgttcaatgcctgttttgggtacgttctttttaggatttgggtcgtcggatccatcctaattgctgattttttgaaatttatttaattttttatgaaaattcctgcttccctaatgcctccaatccgtagaattttgaggaaaaaatggacaatttgtttttggacattatgtcccatttttttagactttaatatgcttattgttaaccattttttcatttctcgtgaaaactgtatttgtttaattcaatccaacgtttaaaaattaatgaaattttcggaatttgatggaccgattgccttatttttttttttgtacttttcagcaaaattccaaaaatttgtgtctttttaaaaaaatcattggaaccaccgttttttttgacagccataccccatcaaataaaaattcaatatcgaagcgagtttacaataatttcttcatgtacgatttccacccccaattttcagtccgttccatcgcatttgtctccatttgcccgtggccaattacccggcccaattggcggacgaagcggcacgactcacccaactgttggccaaactgatggcacagaatgggcgagtcatgcaaatgaaacgcatcagcaaaaggggcacaacaacaacaaccaacaggtgggtaagggtaggggtttccaagtccattgccccgaggggatggcattttttaactcctccaaaatttgtttgaaaattggggctaattttttattaaattttttaaagctttgacgtaatttccttgtaaattttttgaaaatttggctttattcaatagcaaaatccgttaaataagcataaatttttcggatgtgccccgattatttcgacattcgaaattttacacaaaattttgcctaaaaaattggcaaaaattatttattttaattttttaagaataccatccgttgaaaatcgctacgaaattccatggattcggtcattttccttttaa

SEQ ID NO: 46030 - DNA, 2680 bp, Heterodera glycines
atggagaagtctcggctgctttatgttgtgctgtttcacaccgttttcgcatcttttggcgaaattgaagctaatttgctcaattacttaactgtgccggtgcgacagttttttgccgactcacttttgcaacggtacggtattgtcccgtacagtagccagtttgagtttgtctactccatggtggccagcattttcttcatcggtgctatttttggcggcgcaattatgggcccatgcatggagcactttggacgcagagcaaccgcagtttacctacggtaatatgaggcatcacccaaagcctataaaatactgtaagccacaaaactctattgaaccaaataaccgaataccaaaaccaataaaaaatatattattaagctttcaataatttaaaaatgaattatagctcatttttgggcgctctttctgccatttgtatgctgttgtccaaatggcttacaattgttgagctgtttgccattggtcattttattgccgggataattgcggcatggaaaattgccatgatcatctacttggctgagtgtgctccggaccattcgcggggtatttatttagtgaaaatttatcaaagaattttttgaaatattaggataattaatgaaaaattatttaactttaccttggcaatttaaattatatttaattttaaattaattttggttttttattttgcagaataaagtatgcaaaatatttttaatattatatattttttcaatttaatttttcaacattatttctatttagtttttttcattttatttttgaagttttttatgcgtttttttgctgttattttaacttttacatattctgcaggttggtcgacaagcctcattggctctggctcaacattggcacttttgttcatggcttcgctgtgtttgccttccgtctttggcactgcccaactgtggtggcttttgccggcatttgcattgcttttgtccacctttcatttgtgcttcgctgcacattttcctgaatcgccaaagcatttgttctgcggtgatcgtcgaaataaaacaggcggaaattgccatgagcgtgccaaattatcaattaaggtaattaaatatgaaattattagtctaaattaattttaatgtttttctacttagttttatcacggatcggcaacagatgtttttaaagtgatgaaccaatttgagcaggaacagcagttgttggccagccgggagcactttagatggagtgatttttggaaaattcccgagctaaggtatttgggaatttaaaaaaacctttggaccagatttagcagaaaatggtaatttttaggaatttttgggattatgaaaaattgtcatttcttaaatccatcactatgtgcatcatcgacaaaaaaactttgacaactttaccaaaaagccccaaattttttgtaaattggatttcgaccccaaagtttcggaaatctcaaataagaaataggaaatgggtatttcgttaagtcccaaatatgtacgcatttgaaactctattaaaaaattcattttttctcttttttgattcagacattcattgttcatcacattgctcacctcttgggtatttgctttttcgctgagtaacctaaagagccaatatttggaatcaatgctaatgcgctatggcttgactcaaacgggtgcaatgatttcaactatggtaaaaaaggaaaaaatcaaacgaatattttttatattttactaaaatttgatttatttttattacaattatactcattaattaaaattaagatactttggcgctaaatcttattaatataattattaaaatataaccccgttaataattaaataaatcaaaattttatttaaaaaaccagtaaaaggatttatccaaaaactcccaaaatatgtgctaaaaactcaaaaagagaaaatctctgccaaaaattgcaataaaaaactcaataaattcgagattttctcaaaaaaaatctcattaattatctatttagtttgctagcacgcaaatcaaattcattccagtgcatttaggtgtaaagcttcagggaactttgaaatccaatgtcaaattaaagattttggtcacttttgccaatgatttaaatggtaaaaagcaatggaaaaaaaaatcatttttttcagaaatttccaaaatatgtgccaaaacaacccaaaaatgtttttgtgagccaaaagtcccaaaaatatgttgttttttatgtgtgctcaaaactagctataattaaaagaaaatttgagcttttcatgtaaaaaatatatattcgcaaaaaaattatataagaacacagaaatcactgattataatttaatttcaggcgatgattgcagtgacagctccatgctgttttctgtcaccggtgttgatcgaacggtggggacgccgcccactatttttgctggtcacatcgttctccgtcgctgagttggcactgatcactggtgctcagtttgccagcgaccaaacggcgtctggtggcagcgctgcgacagcggcactggcactgatcggcttcacattgggccaatccagcgccaaccttggcattttgtatatgacgccaattctggtcggcgaattgattccgcacgctgctcggtcagcaacgattcaggtgcatcttatggctgagtaa

SEQ ID NO: 46031 - DNA, 840 bp, Heterodera glycines
atggcggaattgagactatccgataaatacttggagcagcggaacaaaatgttgcggaattacccactgccgaaggattgggtcgaaatttacgacccagggatgcaccgccattactattggaaccaaatgaccgacgaagtgagctaaaaacaacaaaatggggcagattttgaaagcactaccaacttttaggtcagttggctctccccaaaacacccaaaggccgtcatttcggaggcggcagcaaaatcggcaaaaggtttttgtttgtttgttttatcaagaatttttctgttagaagcatggaacatgagcaaaatcgagcgcagtgaaggcgaaagaggcgggcgaagaggggggcgagagggcgacgaaagagagggcactgagcggaggggcaaagagcggtacaaaggcaaacggacaaaggcaggcacaatctttgtgggtaaatatatgtctgacattgaatttggcaggattatgaaattgctttgccggacagtgatgaggaggagggccgaggccgagctgtggttgaactgagtgaccgcgacagactcagtaatcctccattttgtcccccatttctccatttgttccgcaatagaacgtgcaaagcggcgtggaattgacccgatggacccgtccgcttacggagacgcaccgtcgggtggctggacaaccggactgcgagaagtgagctaaaattgggacatacccattaaatggcaaaagttccctcttttctgaccctgagcgtgtgaataacctaattgcattccattttaggaccaggaagtgaagactggcgtggatgtgacggcgtctgggccg

SEQ ID NO: 46032 - DNA, 741 bp, Heterodera glycines
atgccccgtcatcgtgcaaagcctcgttcttttcatgccggattgaaattccccgtcggtcgtgtccatcgcaagatgaagaagggtatgttggaatacaggacaacaccatattctgattttgtttcattcacaatcgaatcatacattccctttcctgttcacatccacaggtccgtatgccaaacgtctcgcgaacggagtgccggtctacatgactgctgtgctggaacacatcacgggcgagctgctcaagaaaattggcgagatcacgcaggccgaaggcatgaagcgtctcagtgcatttcacatccgaactgcagcgcgcgatgacgacgagttgaggaaggtcagtgattgagtggcagaggttttgcggcacaaggacagacagcggcacatcaaaattattggcatttcagctgttctctggcgtctctcttgccgaggtgtgcgtgctgccggagctcgaatcggatgtggagcaatcatcggaaggaagtggcgagtccgactccgatgaagaaagtacggaagggagcgcgagcggaagtcaggagggtggcggtgctgctgctgcgcagcaatgagaggaggattgaattctcgagatcgccgtgataacattgactgccaatttaaaagaggatagattgtgtctctgtctgtgatatatacatttattgtaaatatgtccatgtctctttctgtgacattgtcttcttgctgctgaataataaa

SEQ ID NO: 46033 - DNA, 999 bp, Heterodera glycines
atggctgatcgtgcggggttccaaagtggatttggtggtgctgctccaccgtcggcgcgtgggcgtggtgggcctcgcggtcgtggccgtggcgctgccagagggcgaggacgtggaaaggacgccgagaaggaatgggtcccggttactaagcttggccgtcttgtcaaggatcgcaaagtccttacgattgaggagatttatctccactcgcttccgattaaggtttttactttcttttctttttataaagcttatctactatttttttatcattttaggagtttgaaattatcgatcttttgctttctggactgaaggacgaggtgctgaaaattatgccagtgcaaaaacagacgcgagcaggttggtgaaattgcattgggggcatagaagacgcccaaattaaggacagcgaactcgcttcaaggcttttgttgcaattggtgaccacaacggccacgtcggactcggagttaaatgctcaaaggttttgccattcaatcattaaattaaaccttggagatgaagctttgttttcctaattcaaaatccaaataaaaatttctttgttgatcttccggaaaaatttttgctgcggttttaatactgatcaacaatcaacatcctttttggttaatctgtacactacccaatttgaataaaaaaagaaaattcgattgtttccgagccggagtacgtaattaaccaaagtggacatattattcctaattcatcgacccttgctccatttaaaaatattctaatttaggaagttgccactgcaattcgcggagcgattatcgccgctaaattagccatcattccagtgcgtcgtggctactggggcaacaaaatcggaaaaccgcatacggttccatgcaaggtttctccttcatattcagtagtattctaatctgcaatttctttttgctgaagtttaaattcattagtccaaaaaaccgctccatagggccaaatataatgcggatttaggta

SEQ ID NO: 46034 - DNA, 638 bp, Heterodera glycines
atggttaaatgggcaagggctcaactttcctacgcaaaaatgctgaacaaaatcgaaccgttgaacaatgaattgaagcgtctggagaaagatgcggaagaaaaaacagtgaaaggcgaagaattgaagcacaaaatagaagcgctcgagaaccgaattcaggaactgaaggtaactgccaactgaattacaggtacaaaatattttcttaattgcaggatgaatacgcacaactcatcggagaagcggaacacatcaaacaggacctgcaagttgtgcaggaaaaagtcaacaggagcatccatctgttgaaatctttgcgggtggaatgcgatcgttgggaggccggcagagaacgatttgctcagcaaaatgagacattggtgggcgatgttcttctttctgccgcctttctttcttactctggctactatgatcaactgctgcgcgacacaattttcaaaaatggatgggaatatgtgattcttcacaaattatgttccgtcatgagcttgctcgcattgagtatctgtcaactgcggacgagcgcttacaatggaacaataatggaatgccgaaggacgaattatgcacggagaatgccattatgctcaggcagttcaaccgtttcccgttga

SEQ ID NO: 46035 - DNA, 1178 bp, Heterodera glycines
gctgaatcggctgctgtacggcggtctttgcctgtggggcgattgcgtctcgcgagtgttggaggagggacgccttctgatcaaagagaccgctgcgcccgacacgcgcgggttcgtccgagctttgctaacaggtaaaaggcagtcaatcaccatcaccagcatatttattaatccgtttacaaaattaattttatacaattgagggcctccaaacactggcaaatcctttttggctgcgcaaattgccaaggattcggagtttccgttcatcaaagtttgcactcccgaagagatggttggatacagtgaagcggaaaaatgtgccaaaattcggaaggtgaaatttgaggagaattttcaattttgaaaatgatttgacagattttcgaagacgcgtacaaatcgccgcttagctgtgtgatcatcgacaacgtcgaacgactgatggattactcaccaattggaccacgctattcgaacatggtgttgcaaacacttcttgtactgcttgcgaaacgaccgcctcaggcaacttcttgctccaaaatttctttatttgattttcgaaacagaatcatcgtctgcttatgttggccactacatcgaatgagcagtttttgtacgaggccgacatgctcagtgtgttcagcaaagtgatccgagttgaacagctgcacactgtcaaccacgtcatggcggtgctgggggaggccaacattttcagcgaggaggagatcagacaaattgaggacgaactccgcagcagagagtaaaaaatcaaataataaaatttagaaaagtaagggagccaaattcgaatcacctatcgagatcagggcgctgtgaaaaatcgggttttgattacaataactcgcaatttgaattatctaaaagctcgcaatttcagcaacccaaaatttacttaaaatacaaaaatctaatttacttaaataaatagaatttttgatacggctgtcccgttcgggaaaaaagattcatttaatcatatttaaagccttaattattcggcaattaacagcgatgtatcgattgggatcaagcggatgctcgaactgctggactttgtgaaacagagtgagcaaaagcaccgagtgcagctgcttctggacggaattcgtgaagcggggctgtgaaaatatttttgatttgtaaac

SEQ ID NO: 46036 - DNA, 1880 bp, Heterodera glycines; identical to SEQ ID NO: 27297

SEQ ID NO: 46037 - DNA, 488 bp, Heterodera glycines
atggccacacaattggcctcaattttggacgcgatggagcaggattatgacgagaagacactcagaaagttgcgaattcatctgaattaaatatggaaaatcaaatgatgattaagactgatccgcaaattcgacgccgacggatcgggcaaattggaatttgacgaattttgtgcgttggttttcactgtgggaaattcggtggacaaagaaacgctgcgtaacgaattgaaagaggcgttcagactgttcgacaaggaggtcattctttcattcggtctttgaccatttgtccccttcgatttgttgaccatttgtccccttcgatttgttgaccatttgtccccttcgatttgttgatcatttgtcccttttcagggcaacggatacatttccacgcagacactgaaggaacttttgcacgaaattgcgcccgacctcagcgacaacgaattggacgctgcggtagacgaaattgacgaggacgg

SEQ ID NO: 46038 - DNA, 654 bp, Heterodera glycines
atgttcgaccgaagtcgaaatgggtatattatggccacacaattggcctcaattttggacgcgatggagcaggattatgacgagaagacactcagaaagttgcgaattcatctgaattaaatatggaaaatcaaatgatgattaagactgatccgcaaattcgacgccgacggatcgggcaaattggaatttgacgaattttgtgcattggttttcactgttggaaattcggtggacaaagaaacgctgcgtaacgaattgaaagaggcgttcagactgttcgacaaggaggtcattctttcattcggtctttgaccatttgtccccttcgattttttgaccatttgtccccttcgatttgttgaccatttgtccccttcgacttgttgaccatttgtccccttcgatttgttgatcatttgtcccttttcagggcaacggatacatttccacgcagacactgaaggaacttttgcacgaaattgcgcccgacctcagcgacaacgaattggacgctgcggtagacgaaattgacgaggacgggtcgggcaaaatcgaatttgaaggcaaagcaaaatcaaacaaatacaattacctaattaaaacccaactttaatttacagaattttgggaattgatggccggagagagcga

SEQ ID NO: 46039 - DNA, 1403 bp, Heterodera glycines; identical to SEQ ID NO: 27361

SEQ ID NO: 46040 - DNA, 501 bp, Heterodera glycines
atgccaggtagagaaaccaaatttacttaaataaaataataataataataatagtaccaggaagggtaattaaaaactttaaatttgtatctcattaaaatttttagatgaacccgattttttaaaaaatttttaatgaaaataagaattttagaaaaacaccatagaagcattgcgcacaattattttaagaacagttacaaagaaaacaaattgaagcaaacgcgaaagataatggaaaaagaggaggcagccgagttggccagagaaaaaaagagggaagaggaagaacggaggaaaaagaaatgggaagaagctgagagagcattgcgagaggaagagaagagagaggaagagcatagaaggaagcttgttgaagagagaaagcacagagaaaaagcgatgcagagagaatgggagcagcgagaaacagaacaaatgaaaaaacatcgtgaaaaaacttataaaattggaggaaaaaaaaaaaaagacaaaaaatga

SEQ ID NO: 46041 - DNA, 946 bp, Heterodera glycines
atgctaacgatggtttgtcttgtggccaaaaatggcatgacaaatgaagaaaagggtaaaattaagaaaggctttttttggacgggcaattcgaagggcacacatcataattcagcatatggatgtctgtgagtttgttatgacactagctataattaaacaactattatcgcagagggcgcagaagtgggtcgccaatactcggcacaaagagatatggaagtcgaatcaaatggaagagactttacatatttaatgcaaatataatccataatctatctattttctctatccgtgtgaaaatttaaaacagaaattttcacgggcactcaaataaattaatttatctaatccatcattcatattgttacttggctttggaacctctagtggtccatcctttctcagcgtgtgcaatgactcctttcccctccccccctccgaatttgcatatttattagcaaagaaagggtcgtccggcttggattgagacagatctactggggcagattgtggtgtagaatttctcgttggatcacccgcgcacctccgccgaaaatggacagaaaagagaaatttgcgcggggaaaaatgaaaaaaaaaggaattcgaatattttaaagacattggagtgaattgggccaaaactataaataaaaaaggtaaaataattctttgtagggagtaattaaaaaaaagttcactgacaacagtaaatttgtagtttttaagatatagaaattttgaaacaatattatcgttagaattaaactgaaaaaaaatcaaattgcaatttgaaaagagatttgattttttcaggtctgatccaaatcaacaattggaagccgatcaacttcgagacaatcactgacaacccggaggaattggtcagcaatttgttccgtgaaatttccacacacatcacactgaaaatattggcaaaacg

SEQ ID NO: 46042 - DNA, 1484 bp, Heterodera glycines
cccaagttggggaaacctactttaaataagccgtagaccctttattgtttttaagtgatgtattacctaaccacccctaaaatccgaaatcatggaactctgtcacttgctaaaagtttacgattttttacgcttccaaatcagttgggtcgaataatttttttttgaaattttaaaaatttgtaccgaaggcttttggttcctttctattgaactccttgattttgtggtctggatccggcaatttaaaaattcccctctgtttttaggccatcaaagcgctgaaggagatgggcctgcgcaccgttttggtcaacccaaatgttgccactgtgcaaacaacgaaaggttttgcggaccgtgtctatttcttgcccatcatcaaggaatatgtgaccgaagtatcggacaggacaaatgggcccatcctttgaaatttgattgaattgtaggtgatcaaaaaggaacgtcccaccggaattttgtgcacttttggaggccaaacggcgctgaactgtgccgtcgatttgcacaacagtggcgtactgtcggaatacggtacttttacaattaattggctttacagtattcaaatatttcgtcatagtaatccccatattggcaattcattaccatatttcatattaaatgttccaaaaaaaaaaattttgggtgccaaaatctttttttttattttattaattttttttcttgaggtgtcactgttctcggcacgtcgattgagacgattatgcgcacggaggacagagaattgttcaaggcatgtccaaaagacttttgaaaaattaaaattaaaaaatataaaaccatttttaaaaattttgtttttttaaggaatttgtgctgaaaattggcgaaaaagtagccgattgtcgtgcagcgaacacaattgaggaggctgaaaaggcagctgaacaggcgaggaaccaaaaacaaattcatccccctccctcgagaaatattttcgaaagaaaaaaataaataaattttctaaaaaaattttctatttgtttgtaagcaaagaaattaaaaaccgaagaaaaattcttttaaatataaaaatttttttgaaaattcttaaaaaataacgaaattgatgggggtttaaaaatcgtataaaaaatgttaagaaaattttagtttttataataggaaaaaaatctttgaaaaaaatctaatttcctgtcattgttttttttaatcccatcccatttttttatatgtcctcattttttccaacagattggctatcccgtgttggtccgtgccgcgtacgccctcggtggacttggttccggttttgccgagacgcgtgacgaacttatggcaattgcacgccaagcacttgctcattcaaaacaagtgctgatcgacaaaagttttcaaggctggaaagaggtgagaggaggcgattgaatgattatatttttttgtcgcgaactgcgaacaatttccctaatttg

SEQ ID NO: 46043 - DNA, 821 bp, Heterodera glycines
atgacgatttttgggaattatttttggaggtttttaccaaccaaattggtccatcatggtatcattcgaaagctcctggtgaggagaagctttttctaagcggatgctaaccattttgaagcattagaaaaaagttatgggcgtttgaaattttgttttttgaataacttttctaatcgacccattttcaaattaatctgacctatcattagatgcagaaaatttttctctatcgatatataaaatttggttggatttaacaagtagaaaaaattttaaacaggatgaagcaaattcggtttttctctattaatagagatgaagaaatagtatgccaaaaagagagatatctttttctctgcactctctatttattggtacacatctcgctttttcggacggtgtgggaggaatcatatcattcttaaaaaatcaaaattcccaggtccgtgtgctgatcgcttgtgatgtcctttcacggggcatcgatgttttggacgtcgattgcgtgatcaattacgacctgccgataaacgaacgcattttcgttcaccgagctggtcgtactgccagagcaatgaaagaaggactactcgtttcactgacaacaaaagaagaagtgtgctaagtgactacattttcacattttactttcccacatttttttccctttagaaaatgaaacttaaaaagttgctgtctccgcacaacctttgggagagcattcaagaaacaaagtccaatgactcggactttaacgaagaatgcatgcaattatatgaaaacgcgctaagaaagttgaaaaaacgatttgaacaaaa

SEQ ID NO: 46044 - DNA, 803 bp, Heterodera glycines
atggcactgacaaccatttcgctgcattccattgaggacgaatttttgcgcgacggttacaccgatgagaacattcatcagcccgaacttcgtgccgaccctgaacatcggtgttgtgcatttacgggtgcttaaattattgtgtttttcaaaactgaaatgtctagaggcttttaggggacgacggtttaataaatgtgtcaacattcgaacaaattcgaattcaattatgaaatactaatcttttcatcgtttttttaatccgtattgactgacaaattccaaaattctggcttttcacattatttgaatacatgggttctttacgaatataaaattttcaatccaagattcgtccgaaccttgatttccaaggtttattttgctaaaatttcaaatatcatcattttccaaattttttggggtgttcgtttttggtgttttgtcaacccccagtctcatctctataaatttcatggactaattggacatgattggatacgttttttcgtatactcctaacttacatctccctgttcagtgtatggacgtcatttggctgttgtgccgtttaacatcgtcgaattggtgcgccaacaaccgtctgcagtcagcagcagggaggaggccaagctgtacaaccagcagcaacaacagcaacaaatgttgttgcaaagttacaccatcaaaatgcgtttgttggacgaacggttggacaatgtgctggacatgtgctttttgcatggttattatgaaccaacattgttgttcctctacgagcccatccaaacaaccgcgggacg

SEQ ID NO: 46045 - DNA, 2560 bp, Heterodera glycines
atgggacgggggagcagtgcccggcggactattggtgccatgtcggagcgaacgcggagaccaccgtttgctgcagcggaggtgggaaaagctcgaaagcacgagaaaacaatggttgttcatttgtgcagccactcgcgtgtgcgcacttccgctggccgaaggcgtcggccacgctttgctgtcgcggtggtatttcagcgccaaagacggaaattgccaccgctttatttacaagggcatcggtggcaatcaggtgatggtgattagaagggggacgacacaatttggcatttgataaatcccttacggggataactgatagcttaaccctccatgcgcataatattctacccctctgtagaacaactacgtggactacgagcagtgcatgaacgcgtgtcccgatggcactttgtcttccgtctcttaccctcccccctcaacgtcccctcttccatcgccgcgtccttcgtcgtcccttcagccttcgtctcttctctcactctctccgtctccccctccgccgtcggtcaatccctgcggcattggcactccgttaacagacagcgaaggacaaaagccgcgcgaatgttctcctaatagccgttgtcccatttcacacttttgccatatcggtggcgaccctttggcattgccaaatgtttgctgtccgaaaagtgaggcccaaaaatactaaataattaaagtgatcagcagaccaaaatttgggtgggaaattgatagatttcaaaaataatccgttcacaaatcattgtttgggcgacgagctcaagacttactgatgatattatgatatccatgttttaaataatcagcagatggcgacccgtgtgaacagcctttggctgaaggcattggccaattcaaattgacgcgtttccatttcgacgcttcttcgaggcgatgccgcgctttcgtttaccgtggcctccggggaaatgccaacaattttctgttagcggaagactgtgaattggtgtgccaagctgagccaagtgggtgtatgccattgctatatattttcacaaaatgccaatgcttttcagcgatgccgtcgttccgtgtgaatccgtgcccacggggaattccgttgacggacgaccaaaatgagccattagtttgcggcaacagtttggccgcgccggacctcgcacagtttggtcccctgacagccgcgcatcagaatcaattggagacggggtgcccaaggtggaggagggatcagatttgagaccgatggtcccgagggaagcgggtttatggcataattggtggacttttgccgatgggaacctaatcacggccaattaacagtgactaattgctttttgagtggtttctggtgccatgttggctcttctccggacacgaccaactgctgccctcagcttgcggatggtaataattaaggcgacgtcttaccatttttttcattcgtgtcattttccccgaaaggtggcaaaagaccgtgcgatcttccgttggaatacggtataccgatggaaatgggttacggtggccaatcacttctcaaattctttccttttgccttaggcactggcgaacagaaattggacaggtggtacttcgacgtcgattcgcaaatgtgtcggcatttccgctactccggtgggtttttcgcttttttggtcatttccttcatttttctttcaccaaaggaatcaaaggcaatgcgaataatttcgtgtcgcgcgaccattgccagcagaagtgcccttccgacccggtcaatttcggcactgacagcgaccatcagcagcagcagagacagcgcacttcgccgccgccctttgcggtcggtcgctcgcggttttcgtcctcctctcctctcccctccttctcctcctttccatcaacctcaagtccgactccaacaacaaactcattgtcagcagttgtgccacttcttccaaatccgtgcctttttggcgatttgttgcgggacgaagacggaaatgtgctaaaatgtaagcaaaacgaagacaagggatgtccagaggacactcacttttgccacgtcggccaccgcctcactcaaagcggctgctgtccccggacaacgacaacaacaggtgaaacaatgtgcaaaacggcacacattaaatgctctttcgtctataattttggtcagacccgtgtttgttgcccgtcagtcgcggcattggcacagtcgcgcacattcggtggcatttcaacgccaacacaaaacactgtgaggcgtttgactacgcgggacaaaagggcaacgagaacaattttatgacgaaaagacaatgcgaggaacaatgcgaccagcagaaaaagccgcagaaaaagaaaagtggggaaattaaatggaaaaaacactcaatgtttttctttagttaatttttgcccgcacggagagccgaaatgggagagaaaggcatggggacatgggcagaaaaagccgcaaaagtgtgggccaaacaacgaatgccccgagggattcgtgtgccatttgaacagtgacattggcatggcattgtgttgtgag

SEQ ID NO: 46046 - DNA, 1464 bp, Heterodera glycines
  unsure (1)..(1464): unsure at all n locations
acagtgactattgcttttgagtgtttctggtgccatgtggctcttctccggacacgaccaactgctgccntcagctgcnggatggtaataattaaggcgacgtcttanccatttttttcattcgtgtcattttccccgaaaggtggcaaaagaccgtgcgatcttccgttggaatacggtataccgatggaaatgggttacggtggccaatcacttctcaaattctttccttttgccttaggcactggcgaacagaaattggacaggtggtacttcgacgtcgattcgcaaatgtgtcggcatttccgctactccggtgggtttttcgcttttttggtcatttcctttatttttctttcatcaaaggaatcaaaggcaatgcgaataatttcgtgtcgcgcgaccattgccagcagaagtgcccttccgacccggtcaatttcggcactgacagcgaccatcagcagcagcagagacagcgcacttcgccgccgccctttgcggtcggtcgctcgcggttttcgtcctcctctcctctcccctccttctcctttccatcaacctcaagtccgactccaacaacaacaaactcattgtcagcagttgtgccacttcttccaaatccgtgcctttttggcgatttgttgcgggacgaagacggaaatgtgctaaaatgtgagcaaaacgaagacaagggatgtccagaggacactcacttttgccacgtcggccaccgcctcactcagagcggctgctgtccccggacaacgacaacaacaggtgaaacaatgtgcaaaacggcacacattaaatgctctttcgtctataattttggtcagacccgtgtttgttgcccgtcagtcgcggcattggcacagtcgcgcacattcggtggcatttcaatgccaacacaaaacactgtgaggcgtttgactacgcgggacaaaagggcaacgagaacaattttatgacgaaaagacaatgcgaggaacaatgcgaccaacagaaaaagccgcagaaaaagaaaagtggggaaattaaatggaaaaacactcaatgtttttctttagttaatttttgcccgcacggagagccgaaatgggagagaaaagcatggggacatgggcggaaaaagccgcaaaagtgtgggccaaacaacgaatgccccgagggattcgtgtgccatttgaacagtgacattggcatggcattgtgttgtgaggtgattttgatgatggagaatgcgtcggcacatcctcttttcagaacccggcacatttttgtctgcagtcgcgcgagcgcggcccctgcggcgcgagggaattgcgctacgggtacaatccgctgacggacacatgcgtacagtttcactacggcggctgcggggggacgctgaacaatttcgaaagcatcgatcggtgcagggaaatttgttgtcggcaataccaaagaaggaattgaaag

SEQ ID NO: 46047 - DNA, 1288 bp, Heterodera glycines
cattgccaatttccacagataaacgccacgacacagtgattgtgcccatttttggcattccgacgccctttcacatttcgatgatcaaaaacatcagtcagccgaccaatgagggcgacttcacctatttgcgtatcaatttcacccaccccggctcccaaattggcaaagagagcgcacagtttcccaacgcattcgccaaatatttgaaggaactgtacgtggttttgtgtgtgtgttcttcagtttaattgtctgtccaatttcagcactttcaaaagtcgcaatgtgcgcgagccgggcgaacgcgagacgcccagcgtaaatttgcagacggccgctcgactgatcaaggagatgcaaaagcgattccgcacccaggaagcggaggagcgggagaaggagggcgcggtcaaacaggacaaactgatcatttcaaccaacggcaagggaaacccgaagctaaaggtgtgacatccgggaacggggggatttgagaaatgattgttgaaatgcacatccaagactttgttcaggatttgtacgtgcgaccgaacatcatcgcaaaacgcatcagtggcacgcttgaggcacatgtcaacggtttccgttacacgtcgttgcgcggcgacaaaattgaggtgatgtacaacaacatcaagcacgccttcttccagccgtgtgacaacgaaatgatcattctgttgcacttccatttgaaggtctttctttttgatttttgatcaattcgattggtcacacagaatccggtgctgtggggcaaaaagaaatattcggatgtgcaattcttcactgaagttggcgagatcaccaccgacttgggcaagtaccatcacatgcaagacagggacgacattcagagcgagcaggcaatttaatttaatatttaattgcaaaatcttacgttttgaatttaatttttaataaatgcttaagatggaacgcgaaatgcgcaagaagctgaacatggccttccagaacttctgtgacaaagtgtttcggatgaccaatgagcaggtggactttgacacgccgttcaatgacttgtcgttcatcggtgccccccatcggtccaccgtttctctgaaaccgacctcgtcatgtttggtgcacctcacagaatgggttcattttctgaatattgagaacagaatttggcattttcatttccgttttagcctccatttgttgtcacacttgacgaagtggagttggtgcattttgagcgtgtgtccagcaacaccagcacattcgacacggtcatcgt

SEQ ID NO: 46048 - DNA, 1072 bp, Heterodera glycines
  unsure (1)..(1072): unsure at all n locations
atggaaattgacgaagaggacgacgatgaggagggagagagagaaacgaacaaccaattggacaatggccaaagagcgacgaaatcgaccgctaaagtcgttgctaacccggacaacctcaacaaactctttatgccgttgcccaaacttaacgaacagcttttacgtgatgaagttgacgtggaccaattggaacatcaattgacggagttggaaaagcggaagcggaaacaatctgttgccaacctgacattggtgctcgacttcttcgctaaggttgacggactgacacgtaaatgtgtaagactcattttagttgaaaaaataccaaactgagttcaaagaactcgccgccatcactgagcaacgcgatttacaccgggcctttcatgatcggctgaagaagcaacgcttgcacgaatttatggaaggattccgagagattgcgacagaattgcggatcacttatcagatgatcaccatccaaggagatgtatcacttggtaacgttcctccttttatttatttttttactgtttttcatccagaattggttgattcgcttgatccattcgccgaaggcattgccttcaatgttcgtccccccaaaaagtcatggaagcagatcaccaacctttcgggtggtgagaagaccctcgcctctctttcactggtgttcggtttgcacaagtataaaccgactccattatacgtaatggacgaaattgacgcggctttggacttccgaaacgtttccatcatcgccaattatcttctggtaaatcttcccactgtagcacattttttaaaattaaatttaatccgccgtcatttattaaggagcgtactcggaatgcccagtttattgtgatttcattgcgcaatcaaatgtacgaaaaggccaaccgactgatcggcatttacaaagtgcgtgactgcactaagaatgtggtcgtcaatccgtctgccatgagcaaggcttttgaacaggacaagaaacggaanagcaacccttaaccgataaaccattttccgatctcacttatttaactctttggttctctctttgcaa

SEQ ID NO: 46049 - DNA, 947 bp, Heterodera glycines
gggttacacatttccccttctcctctttcctctctgttgttatcacaacacaattccaattcgtcaacagcttcttcactcatcgacgagatgacttcttcaagatcggtgatcccttccacccccttttttcatccgctttttccttccctcctccccccattcagcgaacgcgtcgtgcaacttccaatactgcttcaactactgctactgctggccgtagacgcagccgttcaagacgccgtacacgtgcagaacaagtacgagaagcgactcgccgcgcgttacgtcagaacaacggcggcaacgcgaccaggacgaggaagaagcgcggggcagcgatgcgtcgtccgcccaagctcaaaccgctccgtggaaggccgaggggatcgcgcaaatcgagggcggcgccgcgcactgctggacaaaagcgtggccgtggacgtccgaggaccgtgaaaaaaggccgtgcccgacgggggaggagcgctgcccagcggcagacgacgacgactgcggatgcagccaccaacacggacgcgcactgggtaactattgcggagttgagggcggcgaccaacactgaggtgaccgctgcgactactccggcaacaatgacgacgaccgcggatggcgctgtggcgactaacactgacgcaaccggagcgacgactgcgacaacggacgcggcgaccgctgcgactactccagcggcaacaacgaccgcggatggagcgacggtgaccaacgccaacgaacccggtgcgactacggcgaccaacactgaggcgcccgctgcgactactccagcgacaacgacgaacgcggatggagcgacggtgaccaacgccaacgaacccggtgcgactacgacggctgcggcgaccaacactgagacgaccgctgcgactgctccagcgacaacgacggcgaccgcggatgggacg

SEQ ID NO: 46050 - DNA, 1055 bp, Heterodera glycines
tttcgggcagcaacgattttacgctgaaaatgttcgattattcaaaaactgcggttaaaagggcaatgaaaacgatcacggtaagtcatattctgaaagaattttacaatgaaatgtttggaaggaggtcgagccgatcactgcggtcagttttcatccgagcggagagttttttctatgcgcaactcggcatccgaccttgcgtctttatagtgccgaaacacaggtaccatccatatttttagattttaatttgtttaaaatcgctttcaatatgttcttccgtttttaaatagcatagaaaacattttttacatgattctgaaaacttcatcgaatctgtttctttagcaatgctttgtttctacaataccgaaggaccaacattctgattccattacggatgtgtgctattcggaaaatgcgcgaatgtttgtcacgggaagtcgtgatgggaatgtaaaaggtcgattattagacataggtcatatatggaaagaggggcgagggagtcgactcattaaaaccattcttcgccgataaaaggtcccaaaaatggaggtttttagaattaggttttcagcccttgtccttctccctcacggcccccttcttttttgtcctttatttcacttttttttttagtttgggacggagtttccaatcgatgcattgagacttttacccgcgcgcatgacggagccccgatttgcagtgctcagttcactcgtaatggaaaggtattgcttcattatgcataaattttcccagttaattactaaagtgtcattgctgttaattggggtcggtcttacgattacatgactttttccgtccgtacattttcgactagtttcttaaggtccattttcgtcatgtgataaaatatcaaatgtatgaaaattaattcggatggtaccggacctgtgtggtaatcttggcttttagcgattgggaattccgattaattgccctgtttcattcgtttcagtacgttctcacagtaggaatggacagtgtgcccaaattatgggaattgtccaccaatcgctgtg

SEQ ID NO: 46051 - DNA, 1135 bp, Heterodera glycines
atgcttttaagttggccaaagaaggctggacagccgccgcagaaagtcgtttcgaaagacagtgcaccaccggcaaagaaagccgacgccgaggtatgaaatttgcccattttccaaacaatggcatttctttaatcggttttataccaaatagtggttcgatgaacacgaaaattggaaatcgcaccggtttcacccatcctgattaaaacaatccaaaattcgaatacatttcgagtaaatgaaaatactcggagaaggctcatattttcaaaatatgcacacacaattgaatacattttgttacatgttcattaattaaatcgcaatgaaagagttccccaattctcaaaatcgaattaattttggcagttttgcattgaaatgccgaaaaagtgttggtgccatgtcatgccaaaacgctgcattttaggaagacttcgacctgttcggcgacgaggacagcgatgatgaggagaagaagcgcatcaccgaggaacgtctgaaggcgtacgcggagaaaaaggcgaagaagccgggcccggtggccaagtcgaacgtcatctacgacgtgaagccatgggacgacaccattgacatcaaggacattgaggccaatgtgcgctccatcgaatgcgaagggctcgtgtggggcacgtcccgaattttgccggtcgcattcggcgtgcagaagttgcaggtatatatatggcctgcccgcccgtttaactatgtgtagttgtacaagaattgctaattttcggttttggagtgcaaatattccccccccccccgaaaaataaaattttaacggttttttttaatttttagggagtcggggtaattgtacaacctcctcccattttgattggttaacagaaatcagacacttttaacatggagggtgtgtttaagtttgttcaatgtaattgtgcaactgcagaatttgtccatccataaatgtatgcctagaatttatttattttttgtctgagccacgggtgtatcggaagtggctcagttaaacggagtaattaattttcttcccatttcttagattggatgctgtgtcgtggacgagaaggtgtcgacggattggctcgaggaacaaatcacaggcaaacattataactaa

SEQ ID NO: 46052 - DNA, 575 bp, Heterodera glycines
ctctctgttttcagatcgccgatttcggactgtctcggaactacggtctgcatgccaccttcaccaccgaggtggtcaccctgtggtaccgtagccctgagctgctgctccagtgcaagtacggtactgcggtcgatctttggtccgccggttgcattttggcggagctgtacacgcgcgacgcgctcttcagaggggatacggaggcggagcaattgcgcatcatttttgagtgagtttttcaaaaaatgctgccgcaaaaaatgttttttttttcaattttattgccctgtcgagtagaatatttcttcccccccctcagaaaactcggcactccgtccgtctctgtttggcccgccgatgcaattgtccctcattctttctacgccgaaaactctccgcacataacacctccgtttgccaatcagatgccccaatatttgcccgcctccggtgttgagttgctcacggcaattttgcaatttaatccgcacgaacggccgactgcggttgaatgtctgcagcacaaatactttgtctgatcactgatcgcgggaaatgttcatttccgcttt

SEQ ID NO: 46053 - DNA, 1071 bp, Heterodera glycines
atgggcgtcaaagttgccatcaccggtggcagtggctttctcgccgctcatctcatcaaacgcctgagggcagacgcaaatgtggacgaaatcagaaccatcgacagaaagccgttcagacagctcggaacaattggtgggtaatttggcaggatgtaaggacagggacggcccttttaatgtcgtttttaccttcccccctcctaatttcagtttgttcttcttcagatgattgccctccttcctccgtcggttttccctcactcattcatttccaatgcgatttgctggatattgccaaacttgaaaaggcattggatggtgtcgacgtgttattccatttggccagaaaggctttcgaatatattttcttcgctgatcaaaaagcactgaatgatcgctacagcagagacaatttggaaggttttcgattgaattggcacactttgccattttaataatacttaagccactcattcgcttctcaacaccattttcaaatgctccgttccgcgattggtccatgtcggaggtgaataaaataaacaaaataaaaatagtggacctaacgtaaataatcatttgcaaaatgaaaaacggaactcaaatcgaattttgccaaatttgtctatgtccgtccattggcactttcttcctaattaattccaaattccttcctcctttttcacattttttctctccctttccgatgcctttgccaacattcccccgggcgacaactttggaagcgctgagcacatccatcgcggattgccctccaaatttttgcttggccattacggagagacgcggataaaggccgaattggccgggcgagaaaaatgcgggaaaatccttccaaacggtgcgaagtgaaaataaatatggcaaattattaattatgacaaattgccaatttgttaaggacagcccttccacgcacttttcctccgtccgacttttgtgtacggcgaaggggagaagagattgccaatggcacttaaaaaagttgcggaacggcacggacagatcaacgaaattgccgggccatcaaatggaatgttgcaatat

SEQ ID NO: 46054 - DNA, 1517 bp, Heterodera glycines
  unsure (1)..(1517): unsure at all n locations
tgcaggtcacnntttcccacgcgcggacnntcgtcgatcggtcggacacaacgccaaactctcacaggataaagacgtaattcgaatgaacgaattccctttcgcttcagtttcactttcccctttcttctcagattgcttatgtggaacaaatgactggtcagtattattgacaaattcaaacaaaaagccaacaaaatccgaataaaattcgaaggttataagcgcttaaaacgcggctaccgtccgctggctgaccgtcttcaaaaacagctcgacttcacttcaggtgggcggggaaggacgccatgttaagggtgggcacttctcccatttcagttcaatcgcccaccgaccctttgtaccctttccaatggtatttggtcagtcatttgcccttcgctttgcccccccccctccactgatcagtcacatttcagaagaacgacggccaatcaaatgggaaaccgcggcttgatctgaacgtggagaaggcgtgggctctcggatacaccggcaaaaacattacaacggcgataatggacgatggggtgggaaaaggatgagcgaatgttggggaagggtttatgtccatcaactgatcgaatgtgttgatcacttctgctgaaggtcgattacatgcatgccgatctccgcttcaacttcaatgccgaggcgagttacgacttcagctccaacgacccttacccgtacccgcggtacaccgacgattggttggtggaggggggggggggtggagggcatccgacggattgtgccattcgtcgcaggttcaactctcacggcacgcgctgtgcgggagagatttcagctgctcgcgacaacggaatttgcggggtcggcgttgcctatgacagcaaagtggcagggatacgaatgcttgaccagccgtacatgaccgatctgatcgaagtcagatcgaatggggagcaaacgtacctaggctttccctttgaaggccaattcgatgggccacgagccgaacaaaattcacatttactcagcgagttggggaccaacagacgacgggtgaagagacagagagacggggacactgaaaaatggcatttcaggaaaacggtggacggcccaagaaacgcgacaatgcgagccattgtaaagggagtgaatgaggtggggtgggaagataagaaggggataatgataagggataaggggagataaagtggaaatgtcaagagagacaaaagataatgaggacacaattagtaaaagtgaatcccgttttgctactctatacatatatgtatttgctattgtgcctttccaaagggtcgtttcggtctcggctccatttttgtttgggccagtggcgacggtggcgaggacgacgactgcaattgcgatggatacgcagcatcaatgtgagaaggccggagactcatccttgatcaatttccgcatatatcaattcttttaggtgggccatttcaatcttttctgcctttcacctcggcgaaaatgcccattatttc

SEQ ID NO: 46055 - DNA, 1102 bp, Heterodera glycines
  unsure (1)..(1102): unsure at all n locations
ccgcccgattggctgagngtggacgagttgaaacggatgattgttgcggaggcggaacagagagcatttgcgcccattccggagtgctttttcgagctgtccaacctgttgatgctcaacgcgcgggaggatgtcgagcagtatgagcaggttttttttaagtgtccgctttttcaatgaaataggttaaaaatgccaataaacatttagggtataattgccaccgtggcgtagtggtgtacaaccccatctctctgtcggcagttcaaataccattggagggcgccaaaaactagaaacaaaacaaaaaaacattttctctaacagaagagactccattcactagtcagcagacactgtgtgttaaaaggtgtcgctcacgccgagtggccccttttatgcatttgtgcaatgtttgtgttacgtggatggaaaagcgaaccccgcgaaagggggacgaaacgcgagagtttgtgccggacacaaaattaaatgtttggtgcattagtgctgtctcgaacaatccgtaaaaaactttttgtttgaaaaattcatcgtattcctctacccctcctacagaaattttcaaacccatccaatcgaatttttttgtatgcattttccccaagggtttaatggagacataaaataggacactttgaatccgaacttaaacatttttcgttgccaaatttacattttcaaacaaatttgaattaattttttccattttagttgaaaacacttgtcaaggacttgtgggacaaacgggaggccaaaatgcgcacgtcaaccatcaaatttcttggccaggcaagtcttgtgaaaaaatttctaaaattgcttttaaattccaagtttttgccccaatttttggggttggacattttaaagggggtcgaatttggtgcaatttgtggggccgtttcttaccatgtaaatcatggacatgaataaacggggcatttttcagtacgaaattggacatgcccaactggacaatttgacgcgcatggaaatttgttgtgcccgtgccacgctcatcgagggcagcaaacagcttgaccggctgaccgccacgctgcattccgtccgggactga

SEQ ID NO: 46056 - DNA, 2371 bp, Heterodera glycines
atgacctcgcaaggagttgaaaattatttaaaggaccaaacgatctctgacattccgacgatcgcggaaggctttcaaaacttgatgaatctttacatcaacaagtaagcaaaagttaggtgcaagtttatgcgtccaataatgactagagctgggaatttaagtcaaatgacttttttttttgctgactctaaatggccttaaaatgacttaaaaagtgtttctaaactttttttttgaagcttctaacatgcattttttgtgactttttttgacttttttaaactttgggatttttatgactttcgagtttttgcgacttttttcgtgatttttttgaagcaaaatttgaattttagcgaagaaaattccgaaaaataaaatttcgatcgataaaaaggcaatgaaacctggatgaattttttcttaattgttggaagaatcttttttatgcctattttaggacctatttataaaattaagtgcctaaaaatacgatcaaaatggtattttataaattattaaaatggaatttttttaacgttggcctaatttttcaggacttttttgcatttttacgtgtttttttggatttttttgtgctttttggctattttttctggacttttttttatgacttttttagtcgactttttgaagatttttaatgacttaaattcccagccctaataatgacatcctcagtttcttagactataactttttattacatctctaaatattttgtttattttaatgcttttccaggctttggaaccaactctccgccgaggccagtcagctcgtacgtaacaaattgtttgtgtcgacagtgaatcttttccaattttacgaggttaatgcatttatttttgaaaaatataaaataaaaaaatgaaaattttgctcgttgacaattgaacgttttctttccattttaaggaatttgtcagagacttcgagcggcgcattgagccattgcaattaattgagctgattacgccaattgccgaggacatttttgaaaggggtgagcgacaatgatatttccataaaaaattaacaatttgcagacagacaatcggcctacacttttctggacaacttcgataaagtgatcaagcaggacaaaagggccatcgttcggctggaggccagcaaaattcagctccgtctcagagacaaaccgacggccgaggcgaaatgttgcaatgacccggcattggttcgggtaaaatattagcgaatgttcccgaaatgacaactaattattgtggtagaaaatgttggaagaagcgaagacaatggtcgaccaactcgtcgaagtcggctcggtccacgccgcttactacggatgttcggcggagtaccaattccaaatgggcgaccacgaccgttactatgaagaggttggagttttgttcatttttaattgaaaatgcttcaaaaacccattaggcccttcattatctcggctgtgaagacattaacgtgaaattgagcacggaacagaagcgacaacaagccgagaaaatcagcatttcggcactccttggcgaaaacgtgtacaactttggcgagctggtcagttgttcataaactaatccgttttgccattccctctgcttcatttgtaaaattcgggttttttttattgaaataatttttaatggatagaaaatgatttaaaaacggaggagtagcaaaattatgcaaattattacaattttatgctaactaattcctcagtgatttttcttttttgagttggcccatccaattttgaacgatttgtccgacacgccaaacgcttggcttaacgaacttttgcacgcggtgaacgccggcgattgggacggttttttgaaggtttgtcaatggaatagcaaagcccagctattttctactattttcttttaagcacaaagagaaattggtcgccgcttattcggaggcagggcaaaaaattgaggcattggaacggaaattgcgcctccaatgtttgatcgaggtaagtgttgttttgggagattgtcgaatattgtatttattattcatttctgccaaattaaaattgcctcaattttcagttggcgcaccgattgccggcccaacgacgtgacctcaatttcggggacattgctcgtgttgtccgagcggatgaggacgcggtggaactgttggtcatgaaggcggttgccaacaaactcatcgatgccaaaattgacgatccttcgcgcgtggtcaacgtcagctgggtgcagccgcgggtgctttccattgaacaggtgaaaaacgatgctgggaatgaagtcaaaggggtggaataggcttttcctcactttagggacaattaaaatttcgtataata

SEQ ID NO: 46057 - DNA, 3225 bp, Heterodera glycines
gccaacctggcctccctggcaccaaaggagagcttggcatgcccggcttcccgggcacaaagggtgaaccaggagtgcctggacgagacggatttcctggcatggatggtgaaaagggcgatgccggatatccgggacagccgggccaatacggacctcaaggcctacctgggccaaaaggcaatgctggactgccaggaatccctggattatcaggtgaatgcatttgttgactattgtccattttgtttaaatttaaaattgactttttaaagtgtaacaattgttaattaccatgaagagctagttaattcttctgtaattttattaattttaaaaaactcgataaatacaacaaattgcatttgatagacattcgaaatttgcgacgttttaggccctaaatcaagattaattaaaaataatgtagtcaagaataattaagtaaaaaattattaaaatattttctcaaatattaattactaaaaacccattccattttcgtctaaaacccagggtttttggacaacttgctttttgtaacttcttttattcttttcagaatgacttggaactttgcataaaatattttttgatagagaataaccgaatataaaataatagaaggttttataattttttaaatcctaaaatttatgaattttgcctaattaactatccaattcaaggacaatcgcttgggggagtgaaaggcgagcctgggttgcccggactgcctggccgagacggtgtgccaggaccatcgggtgaaaagggcgactcgggtgtgccgggagtgcccggcttcgatggtgaaaagggatccgtcggagcgcctggatttccaggacaaaaggtcctgaaaacaacgcccagttcaaggacagattgataactgatcccataaaattttagggagaatcgggattgcccggcatacccggacaacgtggccaagacggaatgcctggatcgcccggatttcctgggcctgtcggagagcctggcccacttggtgaaccatgcttggctggcggaccaggcatgcctggacagcccggatttccggggaccaaaggtagacggcgtttttaaaattttaatttatttttttaaatttaggcgaacttggcatgcccggctttcccggcgagaaaggtgaaccaggctttgcgggccaacctggtgttcctggcctgcccggtgctaaaggcgatgccggattgcctggacatcctggacctcagggtcatccaggacaggacggtcctcaaggcccagcggtgagtgaaaaagaaaataaattaatatttaaaattaaatactaaaacagagcactatgaaaaacaccaaatcggattcatcgaattaaatctccgagttttgggattttcccaattccaacatgtcgtcactccgtgggtgtcccactacttccaacaaaatccggatccaatcaaaccatgaaaatcagcccagcttcagacttaatgtcgagctctattaatagccgaaacccaagcttaaaattaaccaatttttattagaaaacttgtaaatttcttgccagccgttgtatccgtatattttgatgaaatttttttgtcaaaaattgtggactttaggttagattaaaatagaatcaaatatttttttatttaaagggtatggccggacctgagccgttgactcagcatgggcagaaaggactgcccggggcgccaggtgttcctggactgcgcggtgaaaagggacagcccggattggacggaccacctggaccatcgggttggctaaaaatattgaatttttaaatatttttcttaaaatttttcaggaattcctggctatcggggcgaaaagggcgagtcgggctatcctggccaacccggattcccgggcgaaaaaggcgctgccggcttaccaggctttcccggcacggagggccagtctggacctcccggtctgacacattatctaattattatttttaattatttattatggatttttaagtaatttttcggattcgctaaattgagacggtgttatgagcgttacttcaaaaaaccatcaaataaaaaaaaaattttccataaaactttgctcaaaagcaattcaattttattctttatatcgttcgatagctttaattattttctattaccctgaaaaatatcgaatgttcttaagatttctctgcgaatttatgaataattttttgtctatttttttacaattcaataaaacttttttgatcgttgaaaggctaattcaattaatgaggcgcgagcgatctttgattcagagcaatttatatattcaaagttctttctgaactaatttttggacaacagttgaacaatatgccaaattaaaaaaattttaatgatttattttaaggtccatcaggccttcccggtggcccggggccagccggacccgctctcagagatggtaaaataaacaataattaaattttaaaaaatttatttaaatcaaggctttgttgtggtcacacattcgcagacgacgcaagtgccgaactgtccacaaggcactgaaaagctgtgggacggcttttcattgctgtacattgaaggcaacgaaagagcacacaaccaggaccttggtaatattatatatatttttcatattttttttaaattcacattttaataatatttaaatcggatttatattttacaaaaattttcaaaatattgacaaaaaatttataaaaattgaataagcatggacaaaaaactcaaatatgaacaaaaatggataaattttttgaaaatattgacaaaaaaaacgaaaagatggataaaaattggcattctcagaaaaatcatttgttatttttaaaaatttttaaatcttattatcaaaatgcaattcttgaataaaaacttatttttttaacattgataaaaatatttcaagcctgattccataaaaccgaaactgtgcattaacctttaattataatttatttaatttttttttactcaaattaaggcgatgccggctcatgtcttccccgcttctccacaatgccattcctgttctgtgattttaatgatgtttgcaagtaaaaaatatttgaattaattaaattttttaaattaaacgcattttatttttcttttccatttttaagttatgcttcacgcaatgacaaatcgtattggttatccaccggcgaagcagttgagctga

SEQ ID NO: 46058 - DNA, 214 bp, Heterodera glycines
atggagctgactcggctgggcgatgagccgaccacccggtggacccttctgaacatccgaattctcgtggaaagtgccgaagtcggagagggacagcaaatggtccatccgctgcaagtaaagaaagcagcgagaaaatagggcaatttacaacattttaaagatcaatttcctccatcaaatggtgcaggaaaaactcgacacagcaaacgaa

SEQ ID NO: 46059 - DNA, 2616 bp, Heterodera glycines
atgaccatttcctacactttggacgtgtccaagtccacttggggcggctttttccgtattctctcgcgctggcgcggcagcgtttggaaggcggtgatgggccaattgatcgtttggaccatcatttacatgctcatttcgttggtctaccgacgcctgctgaacacacgaagccaagaggcatttgggaaaaacgaaaattaattaaaaatattttcatttattttaagacatttgaacacctcgtgcactatctgaactatggacttgactcaacaattccgctgacttttatgctcggtttcttcgtcacacaagtggtcagccgatggcaatctgttctgaacggactcggctggattgacaagcaaattttaaatttaattattattaatttaaaatgctctgtcatttgcctgccttaagtcataattaagttggcaaatgccattttaatttcgagtcttgtaaatcgcccagctgctgctgtgtcttggcagctaataattatttaattggcttttagttgtttggctaataattttaattaattggcctttagttcggcaatgaattttgccaattatatccgcgggacggacaccgaaacacgaatcactcgtcgcacgctcatccgctacatggtgttgtgccaagcactcgttctgcgtgacatcagtgtgcaagtgcgcaaacgattcccaactttggacactctcgtcgcagctggtgaataagagcatttgaattaaatttcatgaaaattcgttttaatttcactaattaggcttaatctccaagccggaattggagcaattggacagggaagtccacgacaaatactcgcgttactggacacccattcactggtgcaactcaattttgtatgaagcgcgactccacggcaaaattgccagcgactttttgttggactcaattataaatgtaatcaattaaaaacaaatttcaatgcctaaatattatgcaacaaaaggacattcaacactttcgccatgggttggcttcgctgatgaaatacgattgggtgccaattccgcttctttaccctcaggtcagtcagtcgatgtccgtccatcgctaatggcacaaaaatttggcccctcctttttggcatcatttccgccattatatttatcgtcatttacatcaccggtgttcctcttgaatttctgaacgagctggggaagcttttgagggaaaaactatgggacgggccggctttgaaccggcgtctctggctttccggaccattgttctaccagcgccgaactaccgaccctgccctctccagatccccattttttctcgatcatataggatcaattgccgcctcaattgatccattaatcttcctctcggggaagcttcttctctatctccctctcattttcatttgcacagatcgttttcctcgctgtgcgcctttactttctgatctgtctgatcagtcgccagtttatttaccgaaaagaggctaagcaccacgcggagattgacctgttcgtgcccatcggcacaatgattcaattcattgtgtacgtcgggtggatgaaagtggccgaggcgttgctgaaccccctgggggaggacgacgacgatttggagtgcaattacgtgattgacaaaaacctgatcacgggtccgaattaaatggggcacctttcattcaaaaatcaccagcccattctgcgccatttttaggcttttcactggtggatttggccacaaagcgaacgccggagcagagtcgcgacgtgttctgggacaacgatcacattgcgccgttgtattcgatggaagcggcgcaacgcaccgtccacccactgatcggatcagcgtcaaaaataaagtgcggaacaaaatgaaggaggacataaaagatcaattaccgtatttacgtatttactgaattagaacccccggaggttctatttttcaacccctctcgaaaggggggggggttctaatacagtaaatacggtacactgatttggcatttctttttggcagcatggcaaagggcaaaaaaaccattacgatggcgcctcataagagcaaactgagcaaaatggacgaacggacgcggctggcacacattcggctggtggacaccatggaacataacgtaaagcatgcggaggagctgaaggcggacaaggcgaacaacgaaaacaaagcgttgggcgaactgcgcaagagacagtcagtggggcgaagggaacgccggcggaaaccaaattttataggcactactgataagctttacccccggaaaactaaaaaattgaaaatttgcacaaaaaattatatatccaaaacctaaaaaaaaattgacgcctcactccgtaactttggattaccgttaatgccaaaattgacttatttaccactttggagtattatggggattaattgcgcaaataacgcagaaaaagcgggaaaatccgcgacggtcggcacatggaagggatgccgtcgacgcgaagtgcacccgatttggaacgcgacgggttccatcgccttcgcgagagcagagacggcgaacattcgccgtcgcaccatcggccgaacggcacgagtctcacgtcgccacac

SEQ ID NO: 46060 - DNA, 1124 bp, Heterodera glycines
  unsure (1)..(1124): unsure at all n locations
ccgaaaatattnttggtattttagaggaactccttcattattttgttaaattgcgttcactgattgagcaactttaccacgcaaatggcaaccgcaaagtgatcgttttggcgcatagtatgggaaatccaatggccaactttttttacaataaaattgtggacaaagtgagaaaaggggcaaaagtggtcagaagaggaaggaccaaactgaatgttgttcagaattggaaggacacttttctgttgtctcacatttcgttggccggcgcgtggggcgggtcggcccaaatagtcaaattgttcgcctcgggtcagtgacacttttggaaatgcgcggaaattataattggggtcactttgccccttttcgggctacaacatggactatttccgcgttcttttgcccccctcgcggctccgtgccatgcaacgctctttcaccagctccgcttttctctttccgtccgccgccctttggaaatcggacgaaattttggcgactactccaaggcaattaattaattgctaattggcaattagggaatgcggcaaaagagtgccctttttaggcagaattacagtttgtccaacttggacaaattcttcgcggacattcagtaccctcaagggtttgaccagtggaaaagtgccagtgaggcgttggtactcgaacccccgggagtgaaggcgagtttaatgggcccgggaaattaggcatttcgtaactgtttttttttgggaggggaagggaattcccaaacacaaattcgaccattttcagcggcattttgagtgaccttcctcttaaggtccattgcatttttggcgtcggcgtggacacccccgaccaattccaatgggctcacaattggttcttccctgactatcagccgtacattcggtgagtaatcgcttaattggcgtgcgtgctaatatttttgaagttatggcgacggcgacggaacggtaaacatacggtcgttggaagtgtgcgaacggtgggcgaaggaaacggcggacggaacggtcgaagtgcacagagtgaacggcaccgatcacatgggcattctgaacgaccagcgcactttggaactgatcagagacattttgacaaagggagaa

SEQ ID NO: 46061 - DNA, 4901 bp, Heterodera glycines
ctaaactctttacgcgctgtcactttcacatttatttctctgttctcctctattaatctctttgtctctctctttctctccgtctcgctctccactctctctctctctcttccatacacacatacacacactctcttttcaactctctttctttctttttttgaattttttttatatttctctaaactctttacgcgctgtcactttcacatttatttctctgttctcctctattaatctctttgtctctctctttctccgtctcgctctccactctctctctctctcttccatacacacatacacacactctcttttcaactctctttctttctttttttgaattttttttatatttctctaaactctttacgcgctgtcactttcacatttatttctctgttctcctctattaatctctttgtctctctctttctctccgtctcgctctccactctctctctctctcttccatacacacatacacacactctcttttcaactctctttctttctttttttgaatttttttatatttctctaaactctttacgcgctgtcactttcacatttatttctctgttctcctttctctctttattttctcacccatctagagcagctcggcatatgctcacctcttctcacattgaacaccacatacatcttctctgtctttgcgctctgtgtctgatcttttcctttttttcttttccttaatttccttagctttcttactttctctattttctctgcctatttcttctatttttctatattttattcattattttgtcattcttttttttcactcactctttctctgttttcatttctcttccattccttgcaagcgatgcacacaaaaattgataataatctacaaatgcgacagtgcccagcctacacatttgtccatttttcatttggcatttttgtttgtgttggcactttctgctgacgctttttatgcactttctctaagtttgtcattttcattttttaataaaaatttaattttattttttgaaattcaattagttaattatattgtaaaatgtttgcaactgttgtcaccgcattggagcaccaaaagttgaaaagtgcgcacaacgcactgcagcaaaaagttgaacaaatggaagaaaagttttcgcagaaaatccaagaaaaggaaaatgaggtggaatctttcatttttacttttttaaactctatatttaatttattattttatttttatgggaacatttaagtgacctctctaatcacattaaaatacaatttaaaatttcgtcaatttttcatttttaataccctttaaatttctgctgaagttttttacaatctttggaaactaaaagagaaaaaaaacaaataattatattcatatttgaaatgaagagaggaaaggttcataaaggactgatcagtataaaataacagtcagcaaaaatcagagcttttttaaaaatttaattaagcaattttttggaatgaaatttgccaaaattgaccaaaaactaaatacaaagtttttactcaatttttttatttgtatgcctaattttcacagattgctcaagtgaaaagggcaaatgagagaatgcaaaagaaaatggacgaggcattggaaagaattggacgattaaacgaattggtgaggaaaaggggaaaaattaaaattttataataatttaaaaaagctaattttcatggcaatttttcgatcagatggaaagtcaaatgatacatttttatgagcaacaacagcaaaggttggacaatgatggcacatttattgccggcattgatgaggtgggaaatggaaaatggactataaaaaataaataataattaattgataaaatgatagcacgacaaataataaataaacaattcgataggcaccgtaaaaagccaaattccgaaaaatcactcattttttgtaaaaatggcttaatgctaatttgcaggaaaggcaattggatttacgctatcaatttgagaagtttaaaaaacaatcaatacttattttaaataatttaacggtcatatggcccaaaaccaaaaatgctcaaaaaatggcggaattggtttaaaacagctcaaatgaaaaaattgcgcattttccatttttccatggaataaaaattgggtactgaagtgacaactttgaatagaaactcaattatcagcccgttgctcacaaatcagttgaacctttaagactgagttacgcgccagacgattcagtcccttttgaaagtggacacttcagtacctctttttttaaacattaaacatgccaatcggtccctaatttgcatttaaacatctttatgggcagccattacttttgagtttgggccctatgaccgatattttccaatttttgtaaaaatcggcaagcaaatttaatttaattgtctcgtctgtttttatttttaattttaaaattgaacagaattcacttcaaactcaaaatggaattatgcagcacacaatggaggacaacaaccatcacttgctttttgcgcaaaagatcaatgaggtgggaaatgaaagaaaaggtcgaaaatattctcttctgtaaaatatttcagtaaatttttcattttttttataaatttgcaaatttttctaaattttttttaaaaacgaaaacaaggaaattcaattgcttaaaccccaaattctcgaaatttgcgaaatgaattttcatttcgcccgcccttttccatccgacatgctttaattgaaagcaatcatttaaaatattgggacattaataaataggatattaatttaatacattttacactttcagtgtgtcactgttgagcaaaaagaagtgagaaaattgggaggggaagaagaaaatgagagaataaaggaagaattggaacaagaggaaaaggaagtgaatgaagaggaggaggaagaatgggaagaaaataatggaagaggggaggaggaagagcaagaggaggagaacaatggaagagaggaggaggaggaagaaggggaacgggtgaaagatgaaggaataatggcggaagggcacgacaattacgggatggaaaatggcactgaatcgacacttggcactcaatttcaggcacatacaaaattttggcacaatgagaatttggaaattaaaaaaacaaatttcctcagaataagaatttttgaagacctattttttagaattttttattaagttatgagttttagtccaagttaattgctcaaacgatcggtttgtcagttttatggcaattttgaaataaatctttgggaatcgtgatctggcggtgccatgccacacgggaaataaatgaacacaataaaaattgcgattaaataccgtttcttttttacagtatgccaacaatcctaaaacaattacgcaaaagtattcattagctgcaaaattgaatggtcgtgccaagcgaatgtggtataaatgcgcgcactgtccggaggcttttcgctggctgtcagcgctaatacgacacgaacgaacgcacacgggggaaaagccgtttaaagtgaaaaatttaaaattttaatttcgttattgccgttttagtcaatttttccttattattgcacaatttttattaaactgattttttatttcatgaaattttcgtgttttttttacttattatagtcgcagaaatagaaaattaaaaaaaacaattaccgtaaatgctctaattatcacccatgggggattatttttcaagctccccagaaaaggggggataattagagactgggggataaatggagactgggggattatttttcgactaatttgtttagtgaaaattttttattttttcatggttaataaacatttaaacaagcttcaatttagaattaaataatttttatttaaatttaaaaaaatttagaaaaattccaatttatccccctgggggataaatggagactgggggattatttttcaaacgcctcgtagactgggggataattagagactgcgggattaatagagactgggcgataattagagcatttacggtaaggacaattctttaaaataagacaaatcaagaatcccattttacagcaatttttcagtgcgaccaatgcggcaaagattttgcacgggccaacacattgaacattcaccagcgcattcacaccggagaaaagccataccaagtggcaatatataaacaattaatcaattaattactccctaattaaaattaattaattgctctcccgagtcagtgtcacttatgtgacgctcgttttacgcaggatggccaactgaaaacgcacattttgattcacacgggtgaaaagccgtacaaagtgagattaaaagaatgtaactaaatcatgattagccgatttccaaaaataattcaattaattgccctagaaactgcaatgatcatccaacttcaaaactaattaattaactgagtacctattaactgtataattaacatacctaattctctttttttacattaatttagtgcacttattgtccccaaaaatttacacgtgctggcaatttgacaacccatcttcgtcgccacaccgaaaagaagccgtttatggtgtgtagatctggaaatacaaaaaagttaaaattatttaaaatagatgaatttccatttttttttaaatcgatgaatttccattttttaagtgttcccattgtggcaaacaatttgcagagtcaagcaatctgcaaattcatctgcttacacactacagaaaacgtaaagcaaacggacaattgagcaacagaatgaatgaattagtgccacaaaaaattgtccttttttgaattatttaatttatattttttgtcaatattattattgggattacagaaatattcattc

SEQ ID NO: 46062 - DNA, 1533 bp, Heterodera glycines
  unsure (1)..(1533): unsure at all n locations
gtgagtccagcgtggccatcttcatcacttccatcaccgatgtcgtctctttcgctgctggcacttactccgacattttggcggtccgtggcttttgcatgatgacagccgcttgcatgatgttcacctttctctaccaggtgcccgacttgtattaacaaaacattgctaatttaataaccgtagtaataccgtatgccatgtttttcaattcaattttataaaatgcttcttttctccccatcgattagatcactttttttgctgctttgatggtgatcagttcgcgtttgcaaatgcaacaacggtattaattgattcgtaattagtttttctatttaattaattaattaactaattaattgttctccctcccattttggaaatgcttgtttgccctgctgtttgctggcgaaagacccattcgaatttgaggaggatgaaagtgtgtccagcaaaacggagcttaacaataacaacaacaacagcaaaaatgacaaatcgagcaaagcaatggattatgaagaaagagacgaaaaagggtttcaaaaaaaataaattaaaaataattaaaatttattaggaaattccaattttttcaggtcaaaacattccccatcgcctgaccatggcttctccgagtctttttcgagcacttcggccccaatttcgagcagtagctcttctgcactcagtgcgtcagaattcaatttggcaatgcgccaaaaggggccaatgggaaagtttttcaggtgctcaaattgatttataaatttaaatatatttttttatatttttaggaatttttatgtcgattttctgttggattggcgcacaaagttcgccgttggcaccattttcttcgtttatttggccatttccctgtggggcattgtgtcaatgngccaagggttggattatgaaaagcttttgctgagttcggaccctttggtgagaaaattggagtggagatcgaactgttccacgggagtgaccaggtgaaatcggagaaaagctcattttgattgcttttatcagtgtaaatatgctttaaggaaattatttaaaaacaatttattttactttaaaaaaaccaaaaattaatttaaaattccaactgatttttttgttagttttttacattttggaaatttaaaaattcaagaccattcgaataattaatctctggtgtttctctatgattaatcacaacactttggttgatcagcaactgactgtgatcactttgtctgatcagttgctcaaacgtcgcccctttcgcaggttgaaattgccgtggtccgcgcgccggacttgcgaatgcgcgagaatcgcgcgcgcgttgaacaacttgtggccgactttgagcggttgccgaacagcgtaggcagcgcgggcacagaattttggctgcgcgagtacgtgcgctacgccaacgcgactggcgcgcggctgcacgagcgcgaccattggtcgtgggtgcgcggggtgttcgactggtcacagctgttcgccttctacaaactgtggtca

SEQ ID NO: 46063 - DNA, 685 bp, Heterodera glycines
ttgggtgtggacggaggcgggccagcagcccgacttggagcagtcctttggcatcggcggcttcggctacccggcaatggtggcggtgaacacgcgcaagctcaaatacagcacaatgaccggtgagagagttaccgtatcagtgcatatggtaaaccgaaaaaaaccgactttttcttgaattttctctaaatttttaaatttgtttttgcggcgatgtttcggcctattccgtgttctcccccccccccacgaaaaacttcaaatttataatttttttaattttcaggaaaaatagcaactcttttttttttactatttttaaaggaaattcttagaaaatgaaaatttaatggctttttaggttttgggttttcctaaaatatttttttaattgaaaatttaaggctcgtttggccagtctggcatttccgagtttctgcgcgacctttcctacggtaagggcaaaacgtcgtctgtgccgggcgcgaatatgccgtcgctggccgacgtgccggcctgggatggccgggatgcggaactgccgccgatggaagacgtggacgacatcgacttgtcggatgtgagcctggacgacgaggaggaggaaatgtcaacgaaggaagcaaagaaaggggtggatgaagaagagaagaaaaagaaaggcaccaagacggaggaggaa

SEQ ID NO: 46064 - DNA, 444 bp, Heterodera glycines
atggcgctactttcaccagaggacgtcgcaacaatgccaacgcagaaggtcgtcttcaacgccccgttcgacaacaaggtcacctactacatgcgggtgcgtttggcgtggtgcgcgtggcatgcggaataacgcccccccgcccccttttcaggtgattaaccctgggacgaagcgcatcggctacgccttcaagaccaccaaaccgaagcgcatcaacatgaacccgccgaattttgtaggaagggggggggggggcgggggtggtaaaatttggcgtctgtttggtcggagggttagctcgcgtagaactcggtctgctcactccttgtaaattcaggtcaaaatgagttttagacaaaagtggtccttcctataagtctaccagtcacacatttcgtttggaattcgaatgttagccgcccaaatttggagataaactga

SEQ ID NO: 46065 - DNA, 1164 bp, Heterodera glycines
atgtacctgctcagctcaattgaacggaagaatgatgcgggagaatgggtagcactcagtgacacggacgcaaacgataaacatgctggggtcatccaaaactttggtagcagctttgtccgctcgctgaaggtcaacatttcaggcattgaggtgtttgacagttcaatttattatcactaccgtgactacataatgaaggagttgggctattcacaggaaattcgtaaggctttccacgaggcatcgtgctactaccccgacgatgatgaccagaacagcgcaacaaacccaggatttaccgcacgtgcggcacggttttcaggcggtaaacaatgtgagacaatggtaaaacttaattttgatttggcacgtcaaaatgcattgatgttgaacaatcaggatgtaatattcaccatacaccgcaacaatgattcattcctcctgcttacgcccccatacaaaaaaccagatggtacactacaggaaaataagaaagagtaccgtatccgtgtgcatgacatgcgtctctatgtgcgcactgtggacgtcacaccgaaccttaaccttgccattagccgacaattggagtccacttcagcaaaatatccgttgcgtaaaattgagatgcggtccatttttcttggcacaggccggaccgagctggcacacaacgtgttcacttctacgttgcctcgtcgcctaatttgcactttcgtttcaaccgacgcatattccggtaaccgaaaaatgtcgccctacaagtttgagcacgccaatttacgttcaattagtgttgaagcaaacggacagacctttcccagcaccccgtatttgctgtccttcgatggtgcacagccccgttttgttcgtgcatttgtagacatgtacgcaggcctgggtttggatgactccgacaccaaaacggtctcgattgggatgcagcgttttcttaacggttgggcctttttcgtcattccgttgacctccactctggaggacacacctggttttgagctgatcagacaaggcacgtgcacgataaaggtgcaatttgagcagcctataaaagcggatggatatgagatgcttgtccttggtgaattcgattctgtgttgtccattaacgcagaccgggttctgagtacagacggaagtgtgtaa

SEQ ID NO: 46066 - DNA, 1116 bp, Heterodera glycines
atggacttcacctacaacggtgagcaattacatctaatttggctcattcaactgaattttcgcttgttttagtccattgcggcatcggacacacccgctgggcaacgcatggaaagccaaaggacgaaaatgcgcacccgcaacggtcgaactttgacaacggtacgttaatccggtgctatatactatattttggtcgtaattttaaaagcctttgtcagattttgtcgtggtacacaacggaatcatcaccaactacaaggagatcaaggactatttgctgaccaagggctacaaattcgagtcggagacggacaccgaagtgatcgccaaactcacgcaacacatccaccaacggcacccacactacggcctccggcaactcgtcgaaattgtcgtgcaacaattggtcagcagtttaattgtcgcaattgctcgacttttccttttgtattctttggactcccaatttgtttttccctccgtgctccaattatttttaaattttcaggagggtgcttttgcgttggcgttcaaaagtcgccgttttcctggccaattggtggccactcgtcgcggcagtcctcttttggttggcattaaaagtcagtccaagctgaccactgaccatttcccggtcttctacagcagacgtacgttttgataccgctttgattaaattttgttttctgattcttttgttttggatttccaaacatttagtaaaaatgaaattttttagttttcattttcaattaatttcattttccattacggtggtttagttatcgacagttggttccgttcaaaagattctccgagtgccgatattaaaggcgatttaccaattttcgctttttttaagccctttcgcttttgttgcttttttgggttgcttttgctttttttgcaaaaatttgccatttttttatttttcattatttttagcacgccgtggccccgtttcgctggtgttcgacgaaagttgcaccactgcgatggaaacgccaaacaaactcaacgcttccgacatgttcgcctctttcagcgctccttttaatggttgccattgggtttttcaaattacactcatttatcttttttagacacaataaa

SEQ ID NO: 46067 - DNA, 1384 bp, Heterodera glycines
  unsure (1)..(1384): unsure at all n locations
tgcgagagtcctggggtcaattcccagactaccccgaattttttaattaaatacatttaagtgtcaattgttcatatttttttttttcttaaaaatgctttagagatgagacaggcgctgtcattcgtccaatgcctcgaatcaaaaaagtgctttctgaacccgtgttgctgtaccaactggtgcagttgttgcttacttacgacccgtccattgtgcaacgagtggcaactttggtcaacgatgtcatgcaggacaacccttacatttcgagactgtatttgtcgggcatatttttctttatcttgatgtacaatgggtccaacattttgccggttgctcgcttcctcaaagacacccatttgaaacaagcattccgttcaactctttccaagtcggagctcgcctcccgttctgtgctatgcccaatgttgccagaagcaaatattttctacctcgaagtcattttttaattcgaattgctttttcaaaatttgtttaggaatatggagcggagaaatatgccgaagttttcctcggagagtttgagaatcccgaatgtatttggaatagtgaaatgcgacgcaatatgatcgaaaagattgctcttcatgtgtccgacttttcgtccagactttcctcaaatgttaaggcactttacaggtattgaaaaccaaaaacttttattgtttcaaatacaatattaatttttttgtcagatattgtccaattcctcccattgattatccacaactaaaagaagagctgttctgccatttctattaccttcgccatttgactgataatcaccgctttccgaattggcctattcgcgagcccgtcgagtttttgcgggcctgtctctccgcttggcatgatgagatcacgcgcaaaccggccaaaatgtctgttgaacaggcttgtgaacgcttggggctgtccacgacggatcccactgccgggtggaaagacgcatcggcagtgcgccgagcctacttcaaattagcacaaaaatatcacccggacaaaaacccggacggtcgggaacagtttgagcagatcaactacgcctacgaattccttacatcgacgctggtcagagccaattcctcgtcaacgccagacatgaatcgcatagtgatcatcattcgtgcacaaagcattgtatacaagaggaacttacaaggttcgccagcaatttggtgcaaaatcaatcatttataattttctttagtgctttcgccatacaaatatgccgggtatacccaacttatcanaaccatcgatctcgagtcgtccgacgacacattgtttgctcgaacnanngagggacgtggtcaattgctttgtgctgnncgtgagtatgccatggacgctaaggagt

SEQ ID NO: 46068 - DNA, 903 bp, Heterodera glycines
atggcaaaaaagcagtacgaccttttgttcaaacttctgttgatcggcgacagcggagtgggcaaaacttgcattttgtacagattcagcgacgatgcctttaacacgtcttttatttcgaccattggtatgtcaaatagtatcacaatttcataccgaaattccacatgacacttcaatttaccttaccttatcttctgggcagaaataaaacgggccgaatttatgaattttactaacgccaaatgaatttatcagattttcaatctttttgtttgatttttccaggaattgacttcaaaatcaagacgattgagctgagagggaagaaaataaagctgcagatttggttggttttacttttatttgattgtaaaaaagaaaaagaatgttgtttcctttccgttgtgctttttttcgattatttgttaatgaaaatgcggacactccaaataatggccctaattcaagtcaaacggttagcgcttttttactattttaagggacactgcgggtcaagagcgttttcacacgattaccacctcatattaccggggcgccatgggcattatgatggtttacgacataaccaacgcgaagagcttcgacaacatcgccaaatggctgagatacatcgacgaggttttgccaaacaaaaacccaaatccattctccaagctttgctattttttcaaatggaccaactttaagcatgcctctgaagatgtcgtaaaaatgttacttggcaacaaatgcgacatgtccgaccgaagagttgtgccgaaggaacgtggggaaaaaattgcgattgaccatggcattcgtttcctggagacatcggccaaggcaaacataaacatcgaaaaggcgttttacgacttggccgaagccattttggacaag

SEQ ID NO: 46069 - DNA, 364 bp, Heterodera glycines
atggttagaccaaacttctatttttatgttaacccaaaaattaaggcgaaaaaatccacgaagaagaaggtcgctgctcttcccgccgcgatcaaaaagacggaaactaaaaagccggcaaagagtactctttttgaacgacggcctcgcaatttttcaattggtatgagcatgataatattaaatatggtttttatctgtatatttaggccaggacattcaaccgaaacgggacttaactcgctttgttcgttggccaaaatacattttgctccagcgacagcgtgccgttcttgaaaagcgtctgaaaattcctccaccaatcaaccagttcaaatttgctcttgacaaaccaaatagttag

SEQ ID NO: 46070 - DNA, 2797 bp, Heterodera glycines
ggaggacagaaacgcgcttaaaaatttggctgatgttgcggtcaccaatttcaatgaacgcggtgatgaacttcggaagaattggggaggtgcgatcatgtcccagcgttcgcaagcacgacaggctaagattgaaaaggctcgccagaaggatgttgggcagaaagtttgatggtagttatcaaaaattgttgtttctctgttgatgataaaatttgttgacttttggtttcaaatttacaatatttgttcataccatcgttatctcttagttcttgaaaatctttttgttatttgtatttgctgtagagatgttttcttgtacgttaaatggggtgccggaatcacacgatcttttggagaagtgtcggctgccatttggtcttcacttacagccattccgtgatttgagggtactctgtgtgcatctttcttcttttgtagttctggattaagggattgaaagtcttgcagacagtcatcacgcggtgcagatattgcaggacatatatcaacccttttgtgtttttaatggacgcccgtcattggaaatgcaatttgtgctatcgcgcaaatgaaagtattactttccttgttgcgataattttttaagccttataacagtgcctgaggatttcgcatgggaccctcaaacgaaaacttttggcgacccatctagaagacccgaactccaagaaaccactattgaatacattgcaccatctgaatacatggttagcccgtgcgaaaattttttttagaaacaacaagttaagcttcgtcctcctcaacctccgatttatttgtttgtttttgacgtcggttccgcagcaatcgattgcggttacctcaacacttttgcagaacaactttcgctggacattgacaaattgcctggccaggaaagggctttcattggctttatcggtttcgattccgctttacattttttccaattcgatgaaaacgagagagagccgaggcatattattgaatttgatgttgaaggtttaactcaaaatattaatgtataataaatacttggcttttccagaaagttttgcgcctgtgttctctggactttttgttgaacttaatgttttcaaagaggttatttttaagaaaacaaaccagtttcgcatttttttagatcatcaaaaaatttatatacaacataccatcaatttttgaacgttctatgtcatcctcaaattgtctcggttctgcacttacagttgcaaaaaatttaattgtaagttttttttatctgtctttaattttattgtttaaaagaacgaaatcggtggacggataactgtttttaccgcatctatgccaaatctcggaattggtgctctgaaatgtttggaattcaacactgcaaaagtatgcgtgagtaaattggtactttaggattttcataccccacccacatttttcatgctaaaactaaacactgacccttatttaaacgtaataccaaaccagattttctttgatttgaagttacgaaacagaaactacttctattagcatgtactaattgatttctcttttacagaagatcgcatttacacctcaaattgacttttacaaaagtttggctctcgaatgtactggaaaacaaattgccattgaccttttcgttgtcggatgtcaaaacgtagatcttcgaacattatgtgatttgttattcttttgttattcgcttctgttaaccatttatggacaagggtggagggattagagggctctgttgcagttcacacgaccataaaaatttttgcaactttagtgcaccataactgttttaagaagcatccaaattaaacatttagtatcattcggtagccctaagaaaatcctctattagcctgcaaaatttcaaatcgttgggtttcaagaaatttatggctaactaaaaatatttagaaaaccaactttgaaattttgcaggctaatagaggattcttagtgctatcgagtgatactaagaatgtttaatttggatgtttcttgaaaaagttatggaaatttatggtcgtgtgaatttcaataaagccgattagagttaggttttttgaaatttcttcaattctatatgaaattatcctacattttccttttggcaaaaaatttccatccttacactgcctttcatctttctctaatttttcgcggaatttcaatcctcataaaaaatcggaatttgcctcaacccttggctatggttcaacaattcgctgattttttgctttttaagctgatatgtctcggttcagcagtggcaccgtgtaccatttccctgaatatcatttccttcgggaccaagtcgaagtcaaacggttccaaatgattttacgacgttactttattcgaaagcttggtcttgaggccgtgttgaggatacgttgctcgaggggtactcaagcaattgattattattgttttcttatttttattgtttaaattcacaggactttctcttcacactttttatggaaatttcttcgtccgttccactgatttgctcgccttgcccaatgtgagtcccgattcggccatgggcgttcaaattaaacacgacgaagtgatcacagccagtcaagtgtgtttccaagcagctttgctgtacacctcgacgaaaggtttcccttatccattgtttgaaatgtcgaaaagtcaggtgaccgtcgtattcgcgtccacacactttgtctccccgtgctcacacaagctgcacatgtattttcttcgctggacattaactcgtcaatatcgctactttcaaagatgg

SEQ ID NO: 46071 - DNA, 1416 bp, Heterodera glycines
atgcccggcgcaacgttcatccggaacctgaaagtgcacatcaaccagcgggaggtgtacgactcaaaccagctgtacagctacaaggtgttcctggacactgagctcagctaccctgtaacggcaaaggatcatactttggcgtggcaggctatttccgtgacagtgacccgaccaaagtaaacgatcgaaggaaaaaggcggtggaggagagcaagggctttcaagcgataagcaagctgagcgccgacatattcaaccaggacttgtacatgatcagcaatgttgagattgacattgagctcgccctgcagtcggacgattttatgatacatcaggaagccgcaaatagggacaagtacacgcttgagattgtcgactgcaggctgatagtgaagacggttgatctgatggacggtctcagccttgacattgcaaagaagttggacctggagcccgccagatacggcatccgaaaaacgctgatgaagtcgctgttcatcaccggtggacgatacgatttttctgccaatctgttcaccgaggaagtgccacggagggtcatcattgggctggtgcccaaccaaaattacattgggcacaatcagaagaaccccttttacttcaaccaccacaacgtaagtgccgctttgacatgtatttctggcagaaaaaatgttcaggtgcgggatattgaactgaccgcctctggcaggacatacccacagtttccgtacaacttggactacaagaacaacaggtacgcaagggcgtaccatgacacccaggagcaccttggcatggcctgtacaactgagagcaacgggatcagctacagcatgttcaagactgcctactgcctctatgtcttccaaatgaccaatgcgcaggaggactcgccgggctttgagctgatcaaggagggctgtacagcggtgaacattcggtttgccgaagcggttccgaacgagggggtcactttaatagcctatgccgaggctgacgggctcattctgattgaccggaacagatcaatcactagtgaccttacagtatgaatggtgagaattattcctccgattttgttcaaatgcctcctcctccaatgctgcacacgaagggattgtactgtgttttccggatgtgatcgagaagtcgccaatcaacttttttctctgcctcatctacctgtttggtgcagcaggtactgcggctgcgggattttacctgtttttgagggagaggcggattcgtcgcaggaatggacaatcggttcatcgacagagctctctttgagaaccgggcgacgagaaaatattttgttggcacttttccggccgaccgattgccaaagtgcacgaaatttccctgcagtctaattgtcaatttggtgagtgccaaaatattttcaataaa

SEQ ID NO: 46072 - DNA, 1644 bp, Heterodera glycines
  unsure (1)..(1644): unsure at all n locations
atgtccttgcgcaatgttcgaatatatcggaaaattctcggaaatggcacatccagcactttggtggattcttccgccaatgagggctttttgctgctgcaatgtggtggcatgttaaccatcggcaaagatgtgggcaactcgcttaaacagcaatacaccaaagtctcagacggatacgcacttttgggcatccacaaaatatccaaaggcatttttaactgctaacagttgcccaattagacaaacacataaaagaacgctgtttagatgaacattttctggttgtggtgaagtccgttttgtcggttggccaactcttcaattgcgatttggtttggcaataattagccctccgttcgacgcttaattaactttaaatagcacaaaataaccaatgtccaatttgtctcgctgaatgttttgtcgaacaccgagcaaattgacgcaagaattgtggaggcatggaatacaaaagcaacattgtttgaactcatttcgactattttcagatgcaaaaatttctttcggcagggattttttactttgctggctcaaacaaagggagtaattacgacctgacgcattcacttcaacgcaggcaaacaattggcgaatttggacagtccgatttccgcttttattggtgttttttaaagttaattttgtataaattcataacttataggaatcggactttgtcttttccttttgaacgctttggagtgtccatcgacgattggctggtcaaatgcatttgtgggtcggtgcttgtgcggacgatttacgtgggtcatcggaccgcaaaagttgctttgatctcccgacttagctgcgactacgtcggcacccgtttcaacgttcgtggaataaatgtgagtttaacatttattacagacttcagttttataattgctttctttattatttttaggatgacggaaatgtggcaaattttgtgaaacggaacaggtctttgcgaactgaagagaatcgcatttaaaataaaaaatgttagcttttnaacgttcgaagaaaaagattgttcatatgtccaagttcggggctcagtgccacttttttgggaacagcccggcatcaatgttggctctcacacaattaaattgaaaccgttggaattttcaatgtttgcaatggaaaggcatggcataaataattcaacgaaccaaaaacaatccaattgttttaggcattattcatttttgaaacaattttacggtgatttattaagtgttaatttgctcggttcaaaaaagggcgaacggagtctgtcaacggcatttcaggcactattatttttttttaattcataaaatgaaatttcttttttcagacagcaataaatttgtcaaaattacattcggatgttcgattcgtttcatttgattaccacgcggaggtgaaacagtccaaagaaaatgcgaagcgattgatcagcgaaattgactcatttattgaccattgcagtttcttcttttctcatgggtaagttaatttcaccataactgcactttggttcacttttcctttgttttcagctcctttcagaagggtgtcatccgtacgaattgtttggactgtctcgaccggactaactgcgtccaaactgttcttttttgttga

SEQ ID NO: 46073 - DNA, 1006 bp, Heterodera glycines
attgacattgtcgcgcgatgccaaggcggtaacaatgcgggccataccgttctggcaaatggccgcgagtatcatttccaccttttgccttccggattggcctcagaaaaggtgacccaaaaaacaaaacaaaaactaatgttgctgttgcaggtgttgaacattgtcgggaacggagtcgtcgtcaatttggacgcccttttcgaggaattggagagcaacaaaattgaggattcggcagaccgactgttcgtcagtgacagtgcccatttggtgttgcctgtgcacatcgcaacggatatcatgcgggaaaatgcgttgggacaaaactcgtaacaaacggaagattaaacatcgatcaaattatttacatttttcagaaaactcggcaccaccaaacgtggcattggtcccgcctattcgagcaaatgcttccgcaatggcatacgactgggcgaactgctcaaccaaccagagaaatttgaacaaaagttagtcgattaataaaattagttgaccttttgtcgttgtttagctatcgttcgctggtcgcccacttcaaaactcttttccctgacattgaattggacacggaaagtgacgtcaaacagttgaaggtagtttcttttttaaatttcattttgcatttgtcctttttttgttaggcccatgccgcacgtcttctccaaatgggcattgtctgcaacacgaccgttttcctgcacaaaaagcgtttggagggcaaatcgattttggtggaaggagccaacggcactctgttggacatcgactttggtcctatccaataatgttccaatttcttttaccatcgattgtcttttcaggtacctatccgttcgtcacttcgtccaattccaccgtcggcggttgcatcaccggccttggcattccgccgacagccgtccgtcgcgtcatcggcgtggtcaaagcctaccaaacgcgtgtcggctccggtccattcccgactgaactgcttgacgccgat

SEQ ID NO: 46074 - DNA, 1031 bp, Heterodera glycines
ttttggtgttcctttatatcgccggtcagaaaccaattaattgcttgctctctaaagtgtttaatccttgcttctccttcgcaggcatccattatctcaagtggtggatgcgcgacagaaagccgttcgaactgcgcaactttttggtcttttggaatgccggattggccattttcagcaccttcggggcgttgaggttcagcgaggagtttctctacgttatgaagaacagatcattccaagtgggcactttcgacggaagatggccaattcgttttggctttcttttaggattcggtgtgcctttccatttcgcccactcagccggccgctctttgggcctttcttttttcgctttccaaagtggccgagtttggggacaccgttctgctggtgctgaggaaacgcccgctcatcttcctccattggttccaccattcggttgtgctgatttacaggtgagtggaacgactgacggacgcagaaagtgccattgtcatcattttgtttattttttccttttttagttggcattccgcgactgaactcaccgcaggtgaccaacaaaagcaaagaaaaagaatattctaaacggtcattccctcttaagccggccgttggttcatccaattgaattactcagtccacgccatcatgtacacttactacacattcgccagcctcggaatccgattccccaaatgggtgtcgatgactgtgaccacgctgcagaccacccaagtgggaaatggggtgccctttcttcccgcactttctccggacaattccctccgctccctcggccaattccctcctcctctgatcagatgcttatcggcgtgttcatctctctgtacgtcgcccgtctgaagcttttctcctcccgtccgacggtgtgccaacagtccgttgaaaatatgtgcatttgcttctccatttacaccgcgttcgccttccttttcatccgcttcttcgtcaattcgtatttactcggcaaaaaaccgacggcagcgaaagccgtggcgaagaaa

SEQ ID NO: 46075 - DNA, 903 bp, Heterodera glycines
atgtctctgctgaaaagcgtcgactccaaactcggcgatgaaattctcaccaccatcgtggaaacgacggacattcgactcgacgacatcgaaggaaatgcaatggcaaaattagcgctggaagaaagtgttgtactgcctgcactaaacccgaaactcttcacgggtctgcgggcgccgtgcaccggaattttgttgtttgggcctccggggaatggcaaaacgatgctcgtgggttgacttggcaaattcattggctaataaatgaaaatttaaggcaaaagccgtggcgaatgagtgcaattcaacattttttagcatttcggcagcgacaattatgtccaaatgggtgggcgacggagaacgactggtgaaagcgcttttccaagtggccagaaatgcacagccatccatcattttcatcggtaaaattaaaaaagggaaatgagtaattcaaagacatcgaacccaataacatcagatgaagtcgattcgatgctttgtcagcgttttgagcaagaggacggagcagcaaggcgagtgaagacggagtttttggttcagttggacggatgttcttcggaaaaaaaggcaaatggccacgttttggtgttggcagcaacgaatcgcccccaagaattggacgaaggcattttgagacgatttcctcagcgaattttcatcgatttgccggacaaaaaagcacgttttcaaatgattcgaaggacttttgaactgaacagcaccaacttacaaattgaagatgccgaattggagtaatccgtccggtactcatttgtcaaccaaagccatttttcaggaaaatcgctacaatgactgacaattactcgtattccgatttgaaggccctctgtcgagccgccgcaaagtttcccgtgcaaa
